United States Patent Application Publication US 2020/0163878 A1 - sequence listing, part 36

SEQ ID NO: 133746 - RNA, 1701 nt, Artificial Sequence
  derived and/or modified CDS sequence (opt3) from hemagglutinin__InfluenzaA__ADM31698
augaaggccauccuggugguccuccuuuacaccuucgcuacagcaaacgccgacacucugugcauuggcuaucacgcgaauaacagcacggauaccguugacacaguguuggagaaaaauguaacugugacccauuccgucaacuuacuggaagauaagcacaaugggaaacuauguaagcucagaggaguggcuccccugcaucuugguaaaugcaacauagccggcuggauccuggggaauccugagugugaaucuuugucaacagcaaguagcugguccuacauuguugagaccucuucgucagacaacggaacuugcuauccaggcgauuuuaucgacuacgaggagcucagggagcagcugagcaguguguccucuuucgaacgguuugagauuuucccgaagacaagcuccuggcccaaucacgauucaaacaagggugucaccgccgcuuguccucaugcaggggccaaaaguuuuuauaagaaucugaucuggcucgugaaaaagggaaacagcuacccaaaauuaucuaaguccuauauaaaugacaagggcaaagaaguacugguucuuuggggcauccaccaccccucaacgagcgcugaucaacagaguuuguaccagaacgccgacgcguacguguucgucgggacuucucgcuauuccaagaaauuuaagccugagauugcaauccgaccaaaagugcgugaucaggagggaagaaugaauuacuauuggacccugguggaacccggugacaagauuacauucgaggccacuggcaaccuagucguuccuagguacgcuuuugccauggaacggaacgcagggagcggaaucauaauuucggauaccccagugcaugacugcaauacaaccugucaaacgccgaaaggcgcuaucaacacuucucuccccuuccagaauauucacccuaucacaaucgguaagugcccaaaguauguaaaauccaccaagcugcgccuugccacugggcugagaaacauucccucaauacagaguaggggauuguuuggcgcgaucgccggcuucauugaagggggauggacagguaugguggacggcugguacggguaucaucaccagaaugaacaaggaagcggcuacgcagcugaucucaaauccacccagaacgccaucgacaagauaacgaauaaagucaacucugugauugagaagaugaauacccaguuuacagcuguugguaaggaguucaaccaccuggaaaaacggaucgagaauuuaaacaagaaaguggaugacggguuccuggauaucuggacuuacaaugccgaacuccuuguccuguuggagaacgaacgcacccuagacuaucaugauagcaaugugaagaaccuguacgagaaaguacgaucacagcucaagaacaaugcaaaggagauuggcaacggauguuuugaguucuaucacaaaugcgacaauacauguauggaaaguguuaagaacggcacuuacgauuauccuaaauacuccgaagaggccaagcugaauagagaagagaucgacggggugaaacuugagagcaccaggauuuaucaaauacuggcuaucuacucuacagucgcgucaaguuugauucucguggucagccugggagcaaucuccuuuuggaugugcucuaacgguucguuacagugccggaucuguauuuga

SEQ ID NO: 133747 - RNA, 1701 nt, Artificial Sequence; identical to SEQ ID NO: 133622
  derived and/or modified CDS sequence (opt3) from hemagglutinin__InfluenzaA__ADM31708

SEQ ID NO: 133748 - RNA, 1701 nt, Artificial Sequence
  derived and/or modified CDS sequence (opt3) from hemagglutinin__InfluenzaA__ADM31718
augaaggccauccuggugguccuccuuuacaccuucgcuacagcaaacgccgacacucugugcauuggcuaucacgcgaauaacagcacggauaccguugacacaguguuggagaaaaauguaacugugacccauuccgucaacuuacuggaagauaagcacaaugggaaacuauguaagcucagaggaguggcuccccugcaucuugguaaaugcaacauagccggcuggauccuggggaauccugagugugaaucuuugucaacagcaaguagcugguccuacauuguugagaccucuucgucagacaacggaacuugcuauccaggcgauuuuaucgacuacgaggagcucagggagcagcugagcaguguguccucuuucgaacgguuugagauuuucccgaagacaagcuccuggcccaaucacgauucaaacaagggugucaccgccgcuuguccucaugcaggggccaaaaguuuuuauaagaaucugaucuggcucgugaaaaagggaaacagcuacccaaaauuaucuaaguccuauauaaaugacaagggcaaagaaguacugguucuuuggggcauccaccaccccucaacgagcgcugaucaacagaguuuguaccagaacgccgacacuuacguguucgucgggaccucucgcuauuccaagaaauuuaagccugagauugcgauccgaccaaaagugcgugaucaggagggaagaaugaauuacuauuggacacugguggaacccggugacaagauuacuuucgaggcaaccggcaaccuagucguuccuagguacgccuuugcuauggaacggaacgccgggagcggaaucauaauuucggauacaccagugcaugacugcaauaccacgugucaaacuccgaaaggcgcaaucaacacaucucuccccuuccagaauauucacccuaucaccaucgguaagugcccaaaguauguaaaauccacuaagcugcgccuugcuacagggcugagaaacgugcccucaauucagaguaggggauuguuuggcgccauagcgggcuucaucgaagggggauggaccgguauggucgacggcugguacggguaucaucaccagaaugaacaaggaagcggcuacgccgcagaucucaaauccacgcagaacgcuauugacaagaucaccaauaaagugaacucuguuauagagaagaugaauacacaguuuacugccguggguaaggaguucaaccaccuggaaaaacggauugagaauuuaaacaagaaagucgaugacggguuccuggauaucuggaccuacaaugcugaacuccuugugcuguuggagaacgaacgcacacuagacuaucaugauagcaauguaaagaaccuguacgagaaaguucgaucacagcucaagaacaaugccaaggagaucggcaacggauguuuugaguucuaucacaaaugcgacaauacuuguauggaaagugugaagaacggcaccuacgauuauccuaaauacuccgaagaggcaaagcugaauagagaagagauugacggggucaaacuugagagcacaaggaucuaucaaauucuggccauauacucuaccguggcuucaaguuugguccucgugguuagccugggagcgaucuccuuuuggaugugcucuaacgguucguuacagugccggauuuguaucuga

SEQ ID NO: 133749 - RNA, 1701 nt, Artificial Sequence
  derived and/or modified CDS sequence (opt3) from hemagglutinin__InfluenzaA__ADM31728
augaaggccauccugauugugcuccuuuacaccuucgcuacagcaaacgccgacacucugugcauaggcuaucacgcgaauaacagcacggauaccgucgacacaguuuuggagaagaaugugacuguaacccauuccgugaacuuacuggaagauaagcacaaugggaaacuauguaagcucagaggagucgcuccccugcaucuugguaaaugcaacaucgccggcuggauucuggggaauccugagugugaaucuuugucaacagcaaguagcugguccuacaucguggagaccucuucgucaggaaacggcacuugcuauccaggugacuuuauugauuacgaagaacucagggagcagcugagcaguguuuccucuuucgaacgguuugagaucuucccgaagacaagcuccuggcccaaucacgacucaaacaagggggugaccgccgcuuguccucaugcaggagccaaaaguuuuuauaagaaucugauauggcucgucaaaaagggcaacagcuacccaaaauuaucuaaguccuauaucaaugauaagggcaaagaagugcugguacuuugggggauucaccaccccucaacgagcgcugaccaacagaguuuguaccagaacgccgaugcguacguuuucgugggaacuucucgcuauuccaagaaauuuaagccugagaucgcaauucgaccaaaaguccgugaccaggaggguagaaugaauuacuauuggacccugguggaacccggcgauaagaucacauucgaggccacugggaaccuaguggucccuagguacgcuuuugccauggaacggaacgcaggaagcggcauaauuaccucggacacaccaguucaugauugcaauaccacgugucaaacuccgaaaggugcuaucaacacaucucuccccuuccagaauauucacccuaucaccaucgggaagugcccaaaguaugugaaauccacuaagcugcgccuugccacaggacugagaaacguacccucaauucagaguaggggcuuguuuggcgcgauagccggguucaucgagggagguuggaccggcaugguggacgggugguacggauaucaucaccagaaugaacaaggcagcgguuacgcagcugaccucaaauccacgcagaacgccauugaugagaucaccaauaaggucaacucugugauagagaaaaugaauacacaguuuacugcuguugggaaggaguucaaccaccuggagaagcggauugaaaauuuaaacaaaaagguggacgauggcuuccuggacaucuggaccuacaaugccgagcuccuuguccuguuggaaaacgagcgcacacuagauuaucaugacagcaaugugaaaaaccuguacgagaagguacgaucacagcucaaaaacaaugcaaaggaaaucggaaacggcuguuuugaguucuaucacaagugcgauaauacuuguauggaaaguguuaaaaacgggaccuacgacuauccuaaguacuccgaggaagccaaacugaauagagaggagauugauggagugaaacuugaaagcacaaggaucuaucaaauucuggcuauauacucuaccgucgcgucaaguuuggugcucgucgugagccugggugcaaucuccuuuuggaugugcucuaacggcucguuacagugccggauuuguaucuga

SEQ ID NO: 133750 - RNA, 1701 nt, Artificial Sequence
  derived and/or modified CDS sequence (opt3) from hemagglutinin__InfluenzaA__ADM31738
augaaggccauccuggugguccuccuuuacaccuucgcuacagcaaacgccgacacucugugcauuggcuaucacgcgaauaacagcacggauaccguugacacaguguuggagaaaaauguaacugugacccauuccgucaacauauuagaagauaagcacaaugggaaacuguguaagcuaagaggaguggcuccccuccaucuggguaaaugcaacaucgccggcuggauucuugggaauccugagugugaaucucugucaacagcaaguagcugguccuacaucguugagaccucuucgucagacaacggaacuugcuauccaggcgauuuuauugacuacgaagaguugagggagcagcucagcaguguguccucuuucgaacgguuugagaucuucccgaagacaagcuccuggcccaaucacgauucaaacaagggugucaccgccgcuuguccucaugcaggggcccgcaguuuuuauaaaaaucugauauggcuggugaagaaaggaaacagcuacccaaagcucucuaaauccuauaucaaugacaagggcaaggaaguauuaguucuguggggcauucaccaccccucaacgagcgcugaucaacagagucuuuaccagaacgccgacgcguacguguucgucgggacuucucgauauuccaaaaaguuuaaaccugagaucgcaauucguccaaaggugagagaucaggagggaaggaugaauuacuauuggaccuugguggaacccggugacaaaaucacauucgaggccacuggcaaccuggucguuccucgguacgcuuuugccauggaacgcaacgcagggagcggaauaauuaucucggauaccccagugcaugacugcaauacaaccugucaaacgccgaagggcgcuauuaacacuucucuacccuuccagaauauccacccuaucacaauugguaaaugcccaaaguauguaaaguccaccaaacucagacuggccacugggcuuaggaacgugcccucaauacagagucggggacuguuuggcgcgaucgccggcuucauugaagggggauggacagguauggucgacggcugguacggguaucaucaccagaaugaacaaggaagcggcuacgcagcugauuugaaguccacccagaacgccaucgacgagauaacgaauaaagugaacucuguuauugagaagaugaauacccaguuuacagcuguggguaaagaguucaaccaccucgagaagcgcaucgaaaaucugaacaagaaagucgaugacggguucuuagauaucuggacuuacaaugccgagcugcucgugcuucuggaaaacgagcgaaccuuggacuaucaugauagcaauguaaagaaccuauacgagaaaguuagaucacagcugaagaacaaugcaaaagaaauuggcaacggauguuuugaguucuaucacaagugcgacaauacauguauggaaagugugaagaacggcacuuacgauuauccuaaauacuccgaggaagccaagcucaauagggaggagaucgacggggucaaacuggaaagcacccggauuuaucaaauacuugcuaucuacucuacaguggcgucaagucuggucuuggugguuagccucggagcaauuuccuuuuggaugugcucuaacgguucgcugcagugccguaucuguaucuga

SEQ ID NO: 133751 - RNA, 1701 nt, Artificial Sequence; identical to SEQ ID NO: 132366
  derived and/or modified CDS sequence (opt3) from hemagglutinin__InfluenzaA__ADM31748

SEQ ID NO: 133752 - RNA, 1701 nt, Artificial Sequence
  derived and/or modified CDS sequence (opt3) from hemagglutinin__InfluenzaA__ADM31758
augaaggccauccuggugguccuccuuuacaccuucgcuacagcaaacgccgacacucugugcauuggcuaucacgcgaauaacagcacggauaccguugacacaguguuggagaaaaauguaacugugacccauuccgucaacuuacuggaagauaagcacaaugggaaacuauguaagcucagaggaauagcuccccugcaucuugguaaaugcaacaucgccggcuggauucuggggaauccugagugugaaucuuugucaacagcaaguagcugguccuacaucguggagaccucuucgucagacaacggaacuugcuauccaggcgauuuuauugacuacgaagaacucagggagcagcugagcaguguuuccucuuucgaacgguuugagaucuucccgaagacaagcuccuggcccaaucacgauucaaacaagggugugaccgccgcuuguccucaugcaggggccaaaaguuuuuauaagaaucugauauggcucgucaaaaagggaaacagcuacccaaaauuaucuaaguccuauaucaaugacaagggcaaagaagugcugguacuuuggggcauucaccaccccucaacgagcgcugaucaacagaguuuguaccagaacgccgacgcguacguuuucguggggacuucucgcuauuccaagaaauuuaagccugagaucgcaauucgaccaaaaguccgugaucaggagggaagaaugaauuacuauuggacccugaucgaccccggugauaagauaacauucgaagccacuggcaaccuaguggugccuagguacgcuuuugccauggagcggaacgcagggagcggaauuaucauuucggacaccccaguccaugacugcaauacaaccugucaaacgccgaaaggcgcuaucaacacuucucuccccuuccagaauauccacccuauuacaauagguaagugcccaaaguauguuaaauccaccaagcugcgcauggccacugggcuuagaaacgugcccucaauccagaguaggggacuguuuggcgcgauugccggcuucaucgaagggggauggacagguaugguagauggcugguacggguaucaucaccagaaugagcaaggaagcggcuacgcagcugacuugaaauccacccagaacgccauagaugaaauuacgaauaaggugaacucugucaucgagaaaaugaauacccaguuuacagcuguggguaaggaguucaaccaccucgaaaagcggaucgagaaucugaacaaaaagguugacgauggguucuuagacauuuggacuuacaaugccgaacugcucgugcuucuggagaacgaacgcaccuuggauuaucaugacagcaaugucaaaaaccuauacgagaaggugcgaucacagcugaaaaacaaugcaaaggagaucggcaacggauguuuugaguucuaucacaagugcgauaauacauguauggagaguguuaaaaacggcacuuacgacuauccuaaguacuccgaagaggccaaacucaauagagaagagauugaugggguaaagcuggagagcaccaggauauaucaaauccuugcuauuuacucuacaguggcgucaagucuggucuugguggucagccucggagcaaucuccuuuuggaugugcucuaacgguucgcugcagugccggaucuguauuuga

SEQ ID NO: 133753 - RNA, 1701 nt, Artificial Sequence; identical to SEQ ID NO: 131077
  derived and/or modified CDS sequence (opt3) from hemagglutinin__InfluenzaA__ADM31768

SEQ ID NO: 133754 - RNA, 1701 nt, Artificial Sequence; identical to SEQ ID NO: 130717
  derived and/or modified CDS sequence (opt3) from hemagglutinin__InfluenzaA__ADM31778

SEQ ID NO: 133755 - RNA, 1701 nt, Artificial Sequence; identical to SEQ ID NO: 132884
  derived and/or modified CDS sequence (opt3) from hemagglutinin__InfluenzaA__ADM31798

SEQ ID NO: 133756 - RNA, 1701 nt, Artificial Sequence
  derived and/or modified CDS sequence (opt3) from hemagglutinin__InfluenzaA__ADM31808
augaaggccauccuggugguccuccuuuacaccuucgcuacagcaaacgccgacacucugugcauuggcuaucacgcgaauaacagcacggauaccguugacacaguguuggagaaaaauguaacugugacccauuccgucaacuuacuggaagauaagcacaaugggaaacuauguaagcucagaggaguggcuccccugcaucuugguaaaugcaacauagccggcuggauccuggggaauccugagugugaaucuuugucaacagcaaguagcugguccuacauuguugagaccucuucgucaggaaacggcacuugcuauccaggugacuuuaucgauuacgaagaacucagggagcagcugagcaguguguccucuuucgaacgguuugagauuuucccgaagacaagcuccuggcccaaucacgacucaaacaagggggucaccgccgcuuguccucaugcaggagccaaaaguuuuuauaagaaucugcucugguuagugaaaaagggcaacagcuacccaaaacugucuaaguccuauaucaaugauaagggcaaagaaguacuuguuuugugggggauacaccaccccucaacgagcgcugaccaacagagucuguaccagaacgccgaugcguacguguucgucggaacuucucgcuauuccaagaaauuuaagccugagaucgcaauucgaccaaaagugcgugaccaggaggguagaaugaauuacuauuggacccuagugggccccggggauaagaucacauucgaagccacuggaaaccucgucguuccuagguacgcuuuugccauggagcggaacgcaggcagcgguauuaucauaucggacaccccagugcaugauugcaauacaaccugucaaacgccgaaaggggcuauuaacacuucucugcccuuccagaauauccacccuauuacaaucggaaagugcccaaaguauguaaaauccaccaaacuucgccuggccacuggcuugagaaacgugcccucaauccagaguaggggccucuuuggggcgauugccggauucauagaagguggcuggacagggauggucgacggaugguacggcuaucaucaccagaaugagcaagguagcggguacgcagcugaccugaaauccacccagaacgccaucgaugaaauuacgaauaaggugaacucuguuaucgagaaaaugaauacccaguuuacagcugugggcaaggaguucaaccacuuagaaaagcggauagagaaucugaacaaaaaggucgacgauggauuccucgacauuuggacuuacaaugccgaacuucugguguugcuagagaacgaacgcacccuggauuaucaugacagcaauguaaagaaccucuacgagaagguucgaucacagcugaaaaacaaugcaaaggagaucggcaacggguguuuugaguucuaucacaagugcgauaauacauguauggagagugugaaaaacggaacuuacgacuauccuaaguacuccgaagaggccaaacuuaauagagaagagaucgauggugucaagcuggagagcaccaggauuuaucaaaucuuggcuauuuacucuacaguggcgucaagucucguccuggugguuagcuuaggcgcaauauccuuuuggaugugcucuaacgggucgcugcagugccggaucuguauuuga

SEQ ID NO: 133757 - RNA, 1701 nt, Artificial Sequence; identical to SEQ ID NO: 132884
  derived and/or modified CDS sequence (opt3) from hemagglutinin__InfluenzaA__ADM31818

SEQ ID NO: 133758 - RNA, 1701 nt, Artificial Sequence
  derived and/or modified CDS sequence (opt3) from hemagglutinin__InfluenzaA__ADM31828
augaaggccauccuggugguccuccuuuacaccuucgcuacagcaaacgccgacacucugugcauuggcuaucacgcgaauaacagcacggauaccguugacacaguguuggagagaaauguaacugugacccauuccgucaacuuacuggaagauaaacacaaugggaagcuauguaaacucaggggaguggcuccccugcaucuugguaagugcaacauagccggcuggauccuggggaauccugagugugaaucuuugucaacagcaaguagcugguccuacauuguugagaccucuucgucagacaacggaacuugcuauccaggcgauuuuaucgacuacgaagaacuccgggagcagcugagcaguguguccucuuucgaacgcuuugagauuuucccgaaaacaagcuccuggcccaaucacgauucaaacaagggugucaccgccgcuuguccucaugcaggggccaagaguuuuuauaaaaaucugaucuggcucgugaagaaaggaaagagcuacccaaaauuaucuaaguccuauauaaacgacaagggcaaagaaguacugguucuuuggggcauccaccaccccucaacgagcgcugaucaacagaguuuguaccagaaugccgacgcguacguguucgucgggacuucucgauauuccaagaaauuuaagccugagauugcaauccguccaaaagugagagagcaggaaggaaggaugaacuacuauuggacccugguggagcccggugauaagauuacauucgaagccacuggcaaucuagucguuccucgguacgcuuuugccauggagcgcaacgcagggagcggaaucauaauuucggacaccccagugcaugauugcaacacaaccugucaaacgccgaaaggcgcuaucaauacuucucuccccuuccagaacauucacccuaucacaaucgguaagugcccaaaguauguaaaauccaccaagcugagacuugccacugggcugaggaaugugcccucaauucagagucggggauuguuuggcgcgauagccggcuucaucgaagggggauggacagguauggucgacggcugguacggguaucaucaccagaacgagcaaggaagcggcuacgcagcugaccucaaauccacccagaaugccauugaugagaucacgaacaagguaaauucuguuauagaaaagaugaacacccaguuuacagcuguggguaaggaguucaaucaccuggaaaagcgcauugagaacuuaaauaaaaaggucgacgauggguuccuggacaucuggacuuacaacgccgaacuccuugugcuguuggagaaugagcgaacccuagauuaucaugacagcaacgugaaaaaucuguacgaaaagguuagaucacagcucaaaaacaacgcaaaggagaucggcaauggauguuuugaguucuaucacaagugcgauaacacauguauggagagugugaaaaauggcacuuacgacuauccuaaguacuccgaagaggccaaacugaacagggaggaaauugauggggucaaacuugagagcacccggaucuaucaaauucuggcuauauacucuacaguggcgucaaguuugguccuccuggugagcuuaggagcaaucuccuuuuggaugugcucuaaugguucgcugcagugccguauuuguaucuga

SEQ ID NO: 133759 - RNA, 1701 nt, Artificial Sequence; identical to SEQ ID NO: 133758
  derived and/or modified CDS sequence (opt3) from hemagglutinin__InfluenzaA__ADM31838

SEQ ID NO: 133760 - RNA, 1701 nt, Artificial Sequence; identical to SEQ ID NO: 130717
  derived and/or modified CDS sequence (opt3) from hemagglutinin__InfluenzaA__ADM31848

SEQ ID NO: 133761 - RNA, 1701 nt, Artificial Sequence
  derived and/or modified CDS sequence (opt3) from hemagglutinin__InfluenzaA__ADM31858
augaaggccauccuggugguccuccuuuacaccuucgcuacagcaaacgccgacacucugugcauuggcuaucacgcgaauaacagcacggauaccguugacacaguguuggagaaaaauguaacugugacccauuccgucaacuuacuggaagauaagcacaaugggaaacuauguaagcucagaggaguggcuccccugcaucuugguaaaugcaacauagccggcuggauccuggggaauccugagugugaaucuuugucaacagcaaguagcugguccuacauuguugagaccucuucgucagacaacggaacuugcuauccaggcgauuuuaucgacuacgaagaacucagggagcagcugagcaguguguccucuuucgaacgguuugagauuuucccgaagacaagcuccuggcccaaucacgauucaaacaagggugucaccgccgcuuguagucaugcaggggccaagagcuuuuauaaaaaucugaucuggcucgugaaaaagggaaacucuuacccuaaauuaaauaaguccuauauaaacgacaagggcaaagaaguacugguucuuuggggcauccaccacccaucaacgagcgcugaucaacagaguuuguaccagaaugccgacgcguacguguucgucgggacuucucgcuauuccaagaaauuuaagcccgagauugcaauccgaccuaaagugcgugagcaggaaggaagaaugaacuacuauuggacccugguggagccaggugauaagauuacauucgaagccacuggcaaccuagucguucccagguacgcuuuugccauggagcggaaugcagggagcggaaucauaauuucggacaccccugugcaugauugcaacacaaccugucaaacgccaaaaggcgcuaucaauacuucucucccguuccagaacauucaccccaucacaaucgguaagugcccuaaguauguaaaauccaccaagcugcgccuugccacugggcugagaaaugugccaucaauucagaguaggggauuguuuggcgcgauagccggcuucaucgaagggggauggacagguauggucgacggcugguacggguaucaucaccagaacgagcaaggaagcggcuacgcagcugaccucaaauccacccagaaugccauugaugagaucacgaacaagguaaauucuguuauagagaaaaugaacacccaguuuacagcuguggguaaggaguucaaucaccuggaaaagcggauugagaacuuaaauaaaaaggucgacgauggguuccuggacaucuggacuuacaacgccgaacuccuugugcuguuggagaaugagcgcacccuagauuaucaugacagcaacgugaaaaaccuguacgaaaagguucgaucacagcucaaaaauaacgcaaaggagaucggcaauggauguuuugaguucuaucacaagugcgauaacacauguauggaaagugugaaaaauggcacuuacgacuaucccaaguacuccgaagaggccaaacugaacagagaggaaauugauggggucgagcuugaaagcaccaggaucuaucaaauucuggcuauauacucuacaguggcgucaaguuugguccucgugguuagccugggagcaaucuccuuuuggaugugcucuaaugguucguuacagugccggauuuguaucuga

SEQ ID NO: 133762 - RNA, 1701 nt, Artificial Sequence
  derived and/or modified CDS sequence (opt3) from hemagglutinin__InfluenzaA__ADM31868
augaaggccauccuggugguccuccuuuacaccuucgcuacagcaaacgccgacacucugugcauuggcuaucacgcgaauaacagcacggauaccguugacacaguguuggagaagaauguaacugugacccauuccgucaacuuacuggaagauaagcacaaugggaaacuauguaagcucagaggaguggcuccccugcaucuugguaaaugcaacauagccggcuggauccuggggaauccugagugugaauugcucucuacagcaucaaguuggagcuacauuguugagaccuccucuucggacaacggaacuugcuauccaggcgauuuuaucaauuacgaggagcugagggagcagcugucaagcgugaguuccuucgaacgguuugagauuuucccgaagacaucuagcuggcccaaccacgacuccaauaagggugucaccgccgcuuguccucaugcaggggccaaaucauuuuauaagaaccucaucugguuagugaaaaagggaaauaguuacccaaaacugagcaagucuuauauaaacgauaagggcaaagaaguacuuguuuuguggggcgugcaccaccccuccacgucagcugaccaacagagccuguaccagaaugccgaugcguacgucuucguggggaccagucgcuauucuaagaaauuuaagccugagaucgcaauucgaccaaaagugcgugaccaggagggaagaaugaacuacuauuggacucuagucgaacccggugauaagaucacauucgaggccacuggcaaccucguugugccuagguacgcuuuuuccauggaacggaaugccgggagcggaauuaucauaucggacaccccaguacaugauugcaacacaaccugucaaacgccgaaaggcgcaauuaauacuucucugcccuuccagaacauccacccuauuacaaucgguaagugcccaaaguaugugaaauccaccaaacuucgccuggcuacuggguugagaaauguccccucaauccagaguaggggacucuuuggcgccauugcgggcuucauagaagggggauggacagguaugguggacggcugguacggguaucaucaccagaacgaacaaggaagcggcuacgccgcagaccugaaauccacccagaaugcuaucgauaagauuacgaacaaaguuaauucugugaucgagaagaugaacacccaguuuacagccgucgguaaggaguucaaucacuuagaaaaacggauagagaaccugaauaagaaaguggacgauggguuccucgacauuuggacuuacaacgcugaacuucugguauugcuagagaaugaacgcacccuggauuaucaugacagcaacguuaagaaccucuacgagaaagugcgaucacagcugaagaauaacgccaaggagaucggcaauggauguuuugaguucuaucacaaaugcgauaacacauguauggaaagugucaagaauggcacuuacgacuauccuaaauacuccgaagaggcaaaacuuaacagagaaaagaucgauggggugaagcuggagagcaccaggauuuaucaaaucuuggccauuuacucuacagucgcuucaagucucgugcugguugugagcuuaggagcgauauccuuuuggaugugcucuaaugguucgcugcagugccggaucuguauuuga

SEQ ID NO: 133763 - RNA, 1701 nt, Artificial Sequence
  derived and/or modified CDS sequence (opt3) from hemagglutinin__InfluenzaA__ADM31878
augaaggccauccuggugguccuccuuuacaccuucgcuacagcaaacgccgacacucugugcauuggcuaucacgcgaauaacagcacggauaccguugacacaguguuggagaaaaauguaacugugacccauuccgucaacauauuagaagauaagcacaaugggaaacuguguaagcuaagaggaguggcuccccuccaucuggguaaaugcaacaucgccggcuggauucuugggaauccugagugugaaucucugucaacagcaaguagcugguccuacaucguugagaccucuucgucagacaacggaacuugcuauccaggcgauuuuauugacuacgaagaguugagggagcagcucagcaguguguccucuuucgaacgguuugagaucuucccgaaggccagcuccuggcccaaucacgauucaaacaagggugucacagcugcauguccucaugccggggcuaaaaguuuuuauaagaaucugauauggcuggugaaaaagggaaacagcuacccaaaacucucuaaguccuauaucaaugacaagggcaaagaaguauuaguucuguggggcauucaccaccccucaaccagcgccgaucaacagagucuuuaccagaacgcggacgcauacguguucgucgggacgucucgcuauuccaagaaauuuaagccugagaucgccauucgaccaaaagugcgugaucaggagggaagaaugaauuacuauuggacuuugguggaacccggugacaagaucaccuucgaggcuacaggcaaccuggucguuccuagguacgccuuugcaauggaacggaacgcugggagcggaauaauuaucucggauacuccagugcaugacugcaauaccacaugucaaaccccgaaaggcgccauuaacacgucucuacccuuccagaauauccacccuaucacuauugguaagugcccaaaguauguaaaauccacaaagcuccgccuggcgaccgggcuuagaaacgugcccucaauacagaguaggggacuguuuggcgccaucgcaggcuucauugaagggggauggacugguauggucgacggcugguacggguaucaucaccagaaugaacaaggaagcggcuacgcugccgauuugaaauccacacagaacgcuaucgacgagauaaccaauaaggugaacucuguuauugagaaaaugaauacgcaguuuaccgccguggguaaggaguucaaccaccucgagaagcggaucgaaaaucugaacaaaaaggucgaugacggguucuuagauaucuggacauacaaugcagagcugcucgugcuucuggaaaacgagcgcacuuuggacuaucaugauagcaauguuaaaaaccuauacgagaagguacgaucacagcugaaaaacaaugccaaggaaauuggcaacggauguuuugaguucuaucacaagugcgacaauaccuguauggaaagugugaaaaacggcacauacgauuauccuaaguacuccgaggaagcuaaacucaauagagaggagaucgacggggucaagcuggaaagcacuaggauuuaucaaauacuugcgaucuacucuaccguggcaucaagucuggucuuggugguuagccucggagccauuuccuuuuggaugugcucuaacgguucgcugcagugccggaucuguaucuga

SEQ ID NO: 133764 - RNA, 1701 nt, Artificial Sequence; identical to SEQ ID NO: 132366
  derived and/or modified CDS sequence (opt3) from hemagglutinin__InfluenzaA__ADM31888

SEQ ID NO: 133765 - RNA, 1701 nt, Artificial Sequence; identical to SEQ ID NO: 130897
  derived and/or modified CDS sequence (opt3) from hemagglutinin__InfluenzaA__ADM31898

SEQ ID NO: 133766 - RNA, 1701 nt, Artificial Sequence
  derived and/or modified CDS sequence (opt3) from hemagglutinin__InfluenzaA__ADM31908
augaaggccauccuggugguccuccuuuacaccuucgcuacagcaaacgccgacacucugugcauuggcuaucacgcgaauaacagcacggauaccguugacacaguguuggagaaaaauguaacugugacccauuccgucaacauauuagaagauaagcacaaugggaaacuguguaagcuaagaggaguggcuccccuccaucuggguaaaugcaacaucgccggcuggauucuugggaauccugagugugaaucucugucaacagcaaguagcugguccuacaucguugagaccucuucgucagacaacggaacuugcuauccaggcgauuuuauugaccacgaagaguugagggagcagcucagcaguguguccucuuucgaacgguuugagaucuucccgaagacaagcuccuggcccaaucaugauucaaacaagggugucaccgccgcuuguccucacgcaggggccaaaaguuuuuacaagaaucugauauggcuggugaaaaagggaaacagcuauccaaaacucucuaaguccuacaucaaugacaagggcaaagaaguauuaguucuguggggcauucaccaucccucaacgagcgcugaucaacagagucuuuaucagaacgccgacgcguacguguucgucgggucuucccgcuacagcaagaaauuuaagccugagaucgcaauucgaccaaaagugcgugaucaggagggaagaaugaauuauuacuggacuuugguggaacccggugacaagaucaccuucgaggccacaggcaaccuggucguuccuagguaugcuuuugccauggaacggaacgcagggucgggaauaauuaucucugauacuccagugcacgacugcaauaccacaugucaaaccccgaaaggcgcuauuaacacgucccuacccuuccagaauauccauccuaucacuauugguaagugcccaaaguacguaaaaucaacaaagcuccgccuggccaccgggcuuagaaacgugcccaguauacagagcaggggacuguuuggcgcgaucgccggcuucauugaagggggauggacugguauggucgacggcugguauggguaccaccaccagaaugaacaaggauccggcuaugcagcugauuugaaaucuacacagaacgccaucgacgagauaaccaauaaggugaacagcguuauugagaaaaugaauacgcaguuuaccgcuguggguaaggaguucaaccaucucgagaagcggaucgaaaaucugaacaaaaaggucgaugacggguucuuagauaucuggacauacaaugccgagcugcucgugcuucuggaaaacgagcgcacuuuggacuaccacgauucaaauguuaaaaaccuauaugagaagguacgaagucagcugaaaaacaaugcaaaggaaauuggcaacggauguuuugaguucuaccauaagugcgacaauaccuguauggaauccgugaaaaacggcacauaugauuacccuaaguauagcgaggaagccaaacucaauagagaggagaucgacggggucaagcuggaaucuacuaggauuuaccaaauacuugcuaucuauucaaccguggcgaguagccuggucuuggugguuucccucggagcaauuucuuuuuggaugugcucgaacgguagccugcagugccggaucuguaucuga

SEQ ID NO: 133767 - RNA, 1701 nt, Artificial Sequence; identical to SEQ ID NO: 130897
  derived and/or modified CDS sequence (opt3) from hemagglutinin__InfluenzaA__ADM31918

SEQ ID NO: 133768 - RNA, 1701 nt, Artificial Sequence; identical to SEQ ID NO: 132489
  derived and/or modified CDS sequence (opt3) from hemagglutinin__InfluenzaA__ADM31928

SEQ ID NO: 133769 - RNA, 1701 nt, Artificial Sequence; identical to SEQ ID NO: 132489
  derived and/or modified CDS sequence (opt3) from hemagglutinin__InfluenzaA__ADM31948

SEQ ID NO: 133770 - RNA, 1701 nt, Artificial Sequence; identical to SEQ ID NO: 130717
  derived and/or modified CDS sequence (opt3) from hemagglutinin__InfluenzaA__ADM31958

SEQ ID NO: 133771 - RNA, 1701 nt, Artificial Sequence; identical to SEQ ID NO: 132489
  derived and/or modified CDS sequence (opt3) from hemagglutinin__InfluenzaA__ADM31968

SEQ ID NO: 133772 - RNA, 1701 nt, Artificial Sequence; identical to SEQ ID NO: 132305
  derived and/or modified CDS sequence (opt3) from hemagglutinin__InfluenzaA__ADM31978

SEQ ID NO: 133773 - RNA, 1701 nt, Artificial Sequence; identical to SEQ ID NO: 130897
  derived and/or modified CDS sequence (opt3) from hemagglutinin__InfluenzaA__ADM31998

SEQ ID NO: 133774 - RNA, 1701 nt, Artificial Sequence; identical to SEQ ID NO: 130897
  derived and/or modified CDS sequence (opt3) from hemagglutinin__InfluenzaA__ADM32008

SEQ ID NO: 133775 - RNA, 1701 nt, Artificial Sequence
  derived and/or modified CDS sequence (opt3) from hemagglutinin__InfluenzaA__ADM32018
augaaggccauccuggugguccuccuuuacaccuucgcuauugcaaacgccgacacacugugcauaggcuaucacgcgaauaacagcacugauacgguugacaccguguuggagaagaauguaacagugacucauuccgucaacuuacuggaagauaagcacaaugggaaacuauguaagcucagaggaguggcuccccugcaucuugguaaaugcgacaucgccggcuggauucuggggaacccugagugugaaucuuugucaaccgcaaguagcugguccuacaucguugagacaucuucgucagauaauggaaccugcuauccaggcgacuuuauugauuacgaggagcucagggagcagcugagcaguguguccucuuucgaacgguuugagaucuucccgaagacuagcuccuggcccaaccacgacucaaauaagggugucacagccgcuuguccucaugcaggggccaaaaguuuuuauaagaaccugauauggcucgugaaaaagggaaauagcuacccaaaauuaucuaaguccuauaucaacgauaagggcaaagaaguacugguucuuuggggcauucaccaccccucaaccagcgcugaccaacagaguuuguaccagaaugccgaugcguacguguucgucgggacgucucgcuauuccaagaaauuuaagccugagaucgcaauucgaccaaaagugcgugaccaggagggaagaaugaacuacuauuggacucugguggaacccggugauaagaucaccuucgaggccacaggcaaucuagucguuccuagguacgcuuuugccauggaacggaacgcagggagcggaauaauuaucucggacacuccagugcaugacugcaacaccacaugucaaaccccgaaaggcgcuauuaauacgucucuccccuuccagaacauccacccuaucacuauugguaagugcccaaaguauguaaaauccacaaagcugcgccuugccaccgggcugagaaaugugcccucaauacagaguaggggauuguuuggcgcgaucgccggcuucauugaagggggauggacugguauggucgauggcugguacggguaucaucaccagaacgaacaaggaagcggcuacgcagcugaccucaaauccacacagaaugccaucgaugagauaaccaacaagguaaauucuguuauugagaaaaugaacacgcaguuuaccgcuguggguaaggaguucaaucaccuggaaaagcggaucgaaaacuuaaauaaaaaggucgacgauggguuccuggacaucuggacauacaacgccgagcuccuugugcuguuggaaaaugagcgcacucuagauuaucaugacagcaacgugaaaaaucuguacgagaagguucgaucacagcucaaaaacaacgcaaaggaaauuggcaauggauguuuugaguucuaucacaagugcgauaacaccuguauggaaagugugaaaaauggcacauacgacuauccuaaguacuccgaggaagccaaacugaacagagaggagaucgauggggucaaacuugaaagcacuaggauuuaucaaauacuggcuaucuacucuaccguggcgucaaguuugguccucgugguuagccugggagcaauuuccuuuuggaugugcucuaaugguucguuacagugccggaucuguaucuga

SEQ ID NO: 133776 - RNA, 1701 nt, Artificial Sequence
  derived and/or modified CDS sequence (opt3) from hemagglutinin__InfluenzaA__ADM32028
augaaggccauccuggugguccuccuuuacaccuucgcuacagcaaacgccgacacucugugcauuggcuaucacgcgaauaacagcacggauaccguugacacaguguuggagaagaauguaacugugacccauuccgucgauuuacuggaagacaagcacaacgggaaacuauguaagcucagaggaguggcuccccugcaucuugguaaaugcaauauagccggcuggauccuggggaacccugagugugaaucuuugucaacagcaaguagcugguccuacauuguugagaccucuucgucagauaauggaacuugcuauccaggcgacuuuaucgauuacgaggagcucagggagcagcugagcaguguguccucuuucgaacgguuugagauuuucccgaagacaagcuccuggcccaaccacgacucaaauaagggugucaccgccgcuuguccucaugcaggggccaaaaguuuuuauaagaaccugaucuggcucgugaaaaagggaaauagcuacccaaaauuaucuaaguccuauauaaacgauaagggcaaagaaguacugguucuuuggggcauccaccaccccucaacgagcgcugaccaacagaguuuguaccagaaugccgaugcguacguguucgucgggacuucucgcuauuccaagaaauuuaagccugagauugcaauccgaccaaaagugcgugaccaggagggaagaaugaacuacuauuggacccugguggaacccggugauaagauuacauucgaggccacuggcaaucuagucguuccuagguacgcuuuugccauggaacggaacgcagggagcggaaucauaauuucggacaccccagugcaugacugcaacacaaccugucaaacgccgaaaggcgcuaucaauacuucucuccccuuccagaacguacacccuauuacaaucgguaagugcccaaaguaugugaaauccaccaagcugcgccuugccacugggcugagaaauguccccucaauccagaguaggggauuguuuggcgcgauugccggcuucauagaagggggauggacagguaugguggauggcugguacggguaucaucaccagaacgaacaaggaagcggcuacgcagcugaccucaaauccacccagaaugccaucgaugagauuacgaacaagguuaauucugugaucgagaaaaugaacacccaguuuacagcugucgguaaggaguucaaucaccuggaaaagcggauagaaaacuuaaauaaaaagguggacgauggguuccuggacauuuggacuuacaacgccgagcuccuuguacuguuggaaaaugagcgcacccuagauuaucaugacagcaacguuaaaaaucuguacgagaaggugcgaucacagcucaaaaacaacgcaaaggaaaucggcaauggauguuuugaguucuaucacaagugcgauaacacauguauggaaagugucaaaaauggcacuuacgacuauccuaaguacuccgaggaagccaaacugaacagagaggagaucgauggggugaaacuugaaagcaccaggauuuaucaaauccuggcuauuuacucuacagucgcgucaaguuuggugcucguugugagccugggagcaauauccuuuuggaugugcucuaaugguucguuacagugccggaucuguauuuga

SEQ ID NO: 133777 - RNA, 1701 nt, Artificial Sequence; identical to SEQ ID NO: 132489
  derived and/or modified CDS sequence (opt3) from hemagglutinin__InfluenzaA__ADM32038

SEQ ID NO: 133778 - RNA, 1701 nt, Artificial Sequence; identical to SEQ ID NO: 130897
  derived and/or modified CDS sequence (opt3) from hemagglutinin__InfluenzaA__ADM32048

SEQ ID NO: 133779 - RNA, 1701 nt, Artificial Sequence; identical to SEQ ID NO: 131881
  derived and/or modified CDS sequence (opt3) from hemagglutinin__InfluenzaA__ADM32058

SEQ ID NO: 133780 - RNA, 1701 nt, Artificial Sequence; identical to SEQ ID NO: 131881
  derived and/or modified CDS sequence (opt3) from hemagglutinin__InfluenzaA__ADM32068

SEQ ID NO: 133781 - RNA, 1701 nt, Artificial Sequence; identical to SEQ ID NO: 130717
  derived and/or modified CDS sequence (opt3) from hemagglutinin__InfluenzaA__ADM32078

SEQ ID NO: 133782 - RNA, 1701 nt, Artificial Sequence; identical to SEQ ID NO: 132305
  derived and/or modified CDS sequence (opt3) from hemagglutinin__InfluenzaA__ADM32088

SEQ ID NO: 133783 - RNA, 1701 nt, Artificial Sequence
  derived and/or modified CDS sequence (opt3) from hemagglutinin__InfluenzaA__ADM32098
augaaggccauccuggugguccuccuuuacaccuucgcuauugcaaacgccgacacacugugcauaggcuaucacgcgaauaacagcacugauacgguugacaccguguuggagaaaaauguaacagugacucauuccgucaacuuacuggaagauaagcacaaugggaaacuauguaagcucagaggaguggcuccccugcaucuugguaaaugcaacaucgccggcuggauucuggggaauccugagugugaaucuuugucaaccgcaaguagcugguccuacaucguugagacaucuucgucagacaacggaaccugcuauccaggcgauuuuauugacuacgaggagcucagggagcagcugagcaguguguccucuuucgaacgguuugagaucuucccgaagacuagcuccuggcccaaucacgauucaaacaagggugucacagccgcuuguccucaugcaggggccaaaaguuuuuauaagaaucugauauggcucgugaaaaagggaaacagcuacccaaaauuaucuaaguccuauaucaaugacaagggcaaagaaguacugguucuuuggggcauucaccaccccucaaccagcgcugaucaacagaguuuguaccagaacgccgacgcguacguguucgucgggacgucucgcuauuccaagaaauuuaagccugagaucgcaauucgaccaaaagugcgugaucaggagggaagaaugaauuacuauuggacucugguggaacccggugacaagaucaccuucgaggccacaggcaaccuagucguuccuagguacgcuuuugccauggaacggaacgcagggagcggaauaauuaucucggauacuccagugcaugacugcaauaccacaugucaaaccccgaaaggcgcuauuaacacgucucuccccuuccagaauauccacccuaucacuauugguaagugcccaaaguauguaaaauccacaaagcugcgccuugccaccgggcugagaaacgugcccucaauacagaguaggggauuguuuggcgcgaucgccggcuucauugaagggggauggacugguauggucgacggcugguacggguaucaucaccagaaugaacaaggaagcggcuacgcagcugaucucaaauccacacagaacgccaucgacgagauaaccaauaaggugaacucuguuauugagaaaaugaauacgcaguuuaccgcuguggguaaggaguucaaccaccuggaaaagcggaucgaaaauuuaaacaaaaaggucgaugacggguuccuggauaucuggacauacaaugccgagcuccuugugcuguuggaaaacgagcgcacucuagacuaucaugauagcaauguaaagaaccuguacgagaagguucgaucacagcucaaaaacaaugcaaaggaaauuggcaacggauguuuugaguucuaucacaagugcgacaauaccuguauggaaagugugaaaaacggcacauacgauuauccuaaguacuccgaggaagccaaacugaauagagaggagaucgacggggucaaacuugaaagcacuaggauuuaucaaauacuggcuaucuacucuaccguggcgucaaguuugguccucgugguuagccugggagcaauuuccuuuuggaugugcucuaacgguucguuacagugccggaucuguaucuga

SEQ ID NO: 133784 - RNA, 1701 nt, Artificial Sequence; identical to SEQ ID NO: 130717
  derived and/or modified CDS sequence (opt3) from hemagglutinin__InfluenzaA__ADM32108

SEQ ID NO: 133785 - RNA, 1701 nt, Artificial Sequence; identical to SEQ ID NO: 132489
  derived and/or modified CDS sequence (opt3) from hemagglutinin__InfluenzaA__ADM32551

SEQ ID NO: 133786 - RNA, 1701 nt, Artificial Sequence; identical to SEQ ID NO: 130897
  derived and/or modified CDS sequence (opt3) from hemagglutinin__InfluenzaA__ADM32561

SEQ ID NO: 133787 - RNA, 1701 nt, Artificial Sequence; identical to SEQ ID NO: 130897
  derived and/or modified CDS sequence (opt3) from hemagglutinin__InfluenzaA__ADM32571

SEQ ID NO: 133788 - RNA, 1701 nt, Artificial Sequence; identical to SEQ ID NO: 130717
  derived and/or modified CDS sequence (opt3) from hemagglutinin__InfluenzaA__ADM32581

SEQ ID NO: 133789 - RNA, 1701 nt, Artificial Sequence; identical to SEQ ID NO: 132489
  derived and/or modified CDS sequence (opt3) from hemagglutinin__InfluenzaA__ADM32591

SEQ ID NO: 133790 - RNA, 1701 nt, Artificial Sequence; identical to SEQ ID NO: 130717
  derived and/or modified CDS sequence (opt3) from hemagglutinin__InfluenzaA__ADM32601

SEQ ID NO: 133791 - RNA, 1701 nt, Artificial Sequence; identical to SEQ ID NO: 130717
  derived and/or modified CDS sequence (opt3) from hemagglutinin__InfluenzaA__ADM32611

SEQ ID NO: 133792 - RNA, 1701 nt, Artificial Sequence; identical to SEQ ID NO: 131881
  derived and/or modified CDS sequence (opt3) from hemagglutinin__InfluenzaA__ADM32621

SEQ ID NO: 133793 - RNA, 1701 nt, Artificial Sequence
  derived and/or modified CDS sequence (opt3) from hemagglutinin__InfluenzaA__ADM32631
augaaggccauccuggugguccuccuuuacaccuucgcuacagcaaacgccgacacucugugcauuggcuaucacgcgaauaacagcacggauaccguugacacaguguuggagaagaauguaacugugacccauuccgucaacauauuagaagauaagcacaaugggaaacuguguaagcuaaaaggaguggcuccccuccaucuggguaagugcaacaucgccggcuggauucuugggaauccugagugugaaucucugucaacagcaaguagcugguccuacaucguugagaccucuucgucagacaacggaacuugcuauccaggcgauuuuauugacuacgaagaguugagagagcagcucagcaguguguccucuuucgaaagguuugagaucuucccgaagacaagcuccuggcccaaucacgauucaaacaaaggugucaccgccgcuuguccucaugcaggggccaagaguuuuuauaaaaaucugauauggcuggugaagaaaggaaaccucuacccaaaguuaagcaagucuuauaucaaugacaaaggcaaggaaguacugguucuuuggggcauucaccaccccuccacgucagcugaucaacagagcuuguaccagaacgccgacgcguacguguucgucgggaguucuaaauauuccaagaaauuuaagccugagaucgcaauucggccaaaagugcgcgaucaggagggacgaaugaauuacuauuggacucugguggaacccggugacaagaucaccuucgaggccacaggcaaccuagucguuccucguuacgcuuuugccauggaaagaaacgcagggagcggaauaauuaucucggauacuccagugcauaauugcaacaccacaugucaaaccccgaagggcgcuauuaauacgucucuccccuuccagaacauccacccuaucacuauugguaaaugcccaaaguauguaaaauccacaaagcugaggcuugccaccgggcugcggaaugugcccucaauacagagucgcggauuguuuggcgcgaucgccggcuucauugaagggggauggacugguauggucgacggcugguacggguaucaucaccagaacgaacaaggaagcggcuacgcagcugaccucaaauccacacagaaugccaucgaugagauaaccaacaagguaaauucuguuauugagaagaugaacacgcaguuuaccgcuguggguaaagaguucaaucaccuggagaagagaaucgaaaacuuaaauaaaaaggucgacgauggguuccuggacaucuggacauacaacgccgagcuccuugugcuguuggaaaaugagaggacucuagauuaucaugacagcaacgugaaaaaccuguacgagaagguucggucacagcucaagaauaacgcaaaagaaauuggcaauggauguuuugaguucuaucacaagugcgauaacaccuguauggaaagugugaaaaauggcacauacgacuauccuaaguacuccgaggaagccaaacugaaccgcgaggagaucgauggggucaaacuugaaagcacucgaauuuaucaaauacuggcuaucuacucuaccguggcgucaaguuugguccucgugguuagccugggagcaauuuccuuuuggaugugcucuaaugguucguuacagugcagaaucuguaucuga

SEQ ID NO: 133794 - RNA, 1701 nt, Artificial Sequence; identical to SEQ ID NO: 131881
  derived and/or modified CDS sequence (opt3) from hemagglutinin__InfluenzaA__ADM32641

SEQ ID NO: 133795 - RNA, 1701 nt, Artificial Sequence; identical to SEQ ID NO: 130717
  derived and/or modified CDS sequence (opt3) from hemagglutinin__InfluenzaA__ADM32651

SEQ ID NO: 133796 - RNA, 1701 nt, Artificial Sequence
  derived and/or modified CDS sequence (opt3) from hemagglutinin__InfluenzaA__ADM32661
augaaggccauccuggugguccuccuuuacaccuucgcuauugcaaacgccgacacacugugcauaggcuaucacgcgaauaacagcacugauacgguugacaccguguuggagaagaauguaacagugacucauuccgucaacuuacuggaagauaagcacaaugggaaacuauguaagcucagaggaguggcuccccugcaucuugguaaaugcaacaucgccggcuggauucuggggaauccugagugugaaucuuugucaaccgcaaguagcugguccuacaucguugagacaucuucgucagacaacggaaccugcuauccaggcgauuuuaaugacuacgaggagcucagggagcagcugagcaguguguccucuuucgaacgguuugagauuuucccgaagacuagcuccuggcccaaccacgauucaaauaagggugucacagccgcuuguccucaugcaggggccaaaaguuuuuauaagaaccugaucuggcucgugaaaaagggaaauagcuacccaaaauuaucuaaguccuauauaaacgacaagggcaaagaaguacugguucuuuggggcauccaccaccccucaaccagcgcugaucaacagaguuuguaccagaaugccgacgcguacguguucgucgggacgucucgcuauuccaagaaauuuaagccugagauugcaauccgaccaaaagugcgugaucaggagggaagaaugaacuacuauuggacucugguggaacccggugacaagauuaccuucgaggccacaggcaaccuagucguuccuagguacgcuuuugccauggaacggaaugcagggagcggaaucauaauuucggauacuccagugcaugacugcaacaccacaugucaaaccccgaaaggcgcuaucaauacgucucuccccuuccagaacauucacccuaucacuaucgguaagugcccaaaguauguaaaauccacaaagcugcgccuugccaccgggcugagaaaugugcccucaauucagaguaggggauuguuuggcgcgauagccggcuucaucgaagggggauggacugguauggucgacggcugguacggguaucaucaccagaacgaacaaggaagcggcuacgcagcugaucucaaauccacacagaaugccauugacgagaucaccaacaagguaaauucuguuauagagaaaaugaacacgcaguuuaccgcuguggguaaggaguucaaucaccuggaaaagcggauugaaaacuuaaauaaaaaggucgaugacggguuccuggauaucuggacauacaacgccgagcuccuugugcuguuggaaaaugagcgcacucuagacuaucaugauagcaacgugaaaaaccuguacgagaagguucgaucacagcucaaaaauaacgcaaaggaaaucggcaauggauguuuugaguucuaucacaagugcgacaacaccuguauggaaagugugaaaaauggcacauacgauuauccuaaguacuccgaggaagccaaacugaacagagaggagauugacggggucaaacuugaaagcacuaggaucuaucaaauucuggcuauauacucuaccguggcgucaaguuugguccucgugguuagccugggagcaaucuccuuuuggaugugcucuaaugguucguuacagugccggauuuguaucuga

SEQ ID NO: 133797 - RNA, 1701 nt, Artificial Sequence; identical to SEQ ID NO: 132305
  derived and/or modified CDS sequence (opt3) from hemagglutinin__InfluenzaA__ADM32671

SEQ ID NO: 133798 - RNA, 1701 nt, Artificial Sequence; identical to SEQ ID NO: 130717
  derived and/or modified CDS sequence (opt3) from hemagglutinin__InfluenzaA__ADM32681

SEQ ID NO: 133799 - RNA, 1701 nt, Artificial Sequence; identical to SEQ ID NO: 130897
  derived and/or modified CDS sequence (opt3) from hemagglutinin__InfluenzaA__ADM32691

SEQ ID NO: 133800 - RNA, 1701 nt, Artificial Sequence; identical to SEQ ID NO: 130717
  derived and/or modified CDS sequence (opt3) from hemagglutinin__InfluenzaA__ADM32701

SEQ ID NO: 133801 - RNA, 1701 nt, Artificial Sequence; identical to SEQ ID NO: 130897
  derived and/or modified CDS sequence (opt3) from hemagglutinin__InfluenzaA__ADM32711

SEQ ID NO: 133802 - RNA, 1701 nt, Artificial Sequence; identical to SEQ ID NO: 130897
  derived and/or modified CDS sequence (opt3) from hemagglutinin__InfluenzaA__ADM32721

SEQ ID NO: 133803 - RNA, 1701 nt, Artificial Sequence; identical to SEQ ID NO: 130897
  derived and/or modified CDS sequence (opt3) from hemagglutinin__InfluenzaA__ADM32741

SEQ ID NO: 133804 - RNA, 1701 nt, Artificial Sequence; identical to SEQ ID NO: 130897
  derived and/or modified CDS sequence (opt3) from hemagglutinin__InfluenzaA__ADM32751

SEQ ID NO: 133805 - RNA, 1701 nt, Artificial Sequence; identical to SEQ ID NO: 132305
  derived and/or modified CDS sequence (opt3) from hemagglutinin__InfluenzaA__ADM32761

SEQ ID NO: 133806 - RNA, 1701 nt, Artificial Sequence
  derived and/or modified CDS sequence (opt3) from hemagglutinin__InfluenzaA__ADM32771
augaaggccauccuggugguccuccuuuacaccuucgcuacagcaaacgccgacacucugugcauuggcuaucacgcgaauaacagcacggauaccguugacacaguguuggagaaaaauguaacugugacccauuccgucaacuuacuggaagauaagcacaaugggaaacuauguaagcucagaggaguggcuccccugcaucuugguaaaugcaacauagccggcuggauccuggggaauccugagugugaaucuuugucaacagcaaguagcugguccuacauuguugagaccucuucgucagacaacggaacuugcuauccaggcgauuuuaucgacuacgaagaacucagggagcagcugagcaguguguccucuuucgaacgguuugagauuuucccgaagacaagcuccuggcccaaucacgauucaaacaagggugucaccgccgcuuguccucaugcaggggccaaaaguuuuuauaagaaucugaucuggcucgugaaaaagggaaacagcuacccaaaauuaucugaauccuauauaaaugacaagggcaaggagguacugguucuuuggggcauccaccaccccucaacgagcgcugaucaacagaguuuguaccagaacgccgacgcguacguguucgucgggacuucucgcuauuccaaaaaguuuaaaccugagauugcaauccgaccaaaggugcgugaucaggaaggaagaaugaauuacuauuggacccugguggagcccggugacaaaauuacauucgaagccacuggcaaccuagucguuccuagguacgcuuuugccauggagcggaacgcagggagcggaaucauaauuucggauaccccagugcaugacugcaauacaaccugucaaacgccgaagggcgcuaucaacacuucucuccccuuccagaauauucacccuaucacaaucgguaaaugcccaaaguauguaaaguccaccaaacugcgccuugccacugggcugagaaacgugcccucaauucagaguaagggauuguuuggcgcgauagccggcuucaucgaagggggauggacagguauggucgacggcugguacggguaucaucaccagaaugagcaaggaagcggcuacgcagcugaucucaaauccacccagaacgccauugacgagaucacgaauaaggugaacucuguuauagaaaagaugaauacccaguuuacagcuguggguaaggaguucaaccaccuggaaaagaggauugagaauuuaaacaaaaaggucgaugacggguuccuggauaucuggacuuacaaugccgaacuccuugugcuguuggagaacgagcggacccuagacuaucaugauagcaauguuaaaaaccuguacgaaaagguacgcucacagcucaaaaacaaugcaaaggagaucggcaacggauguuuugaguucuaucacaagugcgacaauacauguauggagagugugaaaaacggcacuuacgauuauccuaaguacuccgaagaggccaaacugaaucgagaggaaauugacggggucaaacuugagagcaccagaaucuaucaaauucuggcuauauacucuacaguggcgucaaguuugguccucgugguuagccugggagcaaucuccuuuuggaugugcucuaacgguucguuacagugcaggauuuguaucuga

SEQ ID NO: 133807 - RNA, 1701 nt, Artificial Sequence
  derived and/or modified CDS sequence (opt3) from hemagglutinin__InfluenzaA__ADM32781
augaaggccauccuggugguccuccuuuacaccuucgcuacagcaaacgccgacacucugugcauuggcuaucacgcgaauaacagcacggauaccguugacacaguguuggagaaaaauguaacugugacccauuccgucgauuuacuggaagacaagcacaacgggaaacuauguaagcucagaggaguggcuccccugcaucuugguaaaugcaauauagccggcuggauccuggggaacccugagugugaaucuuugucaacagcaaguagcugguccuacauuguugagaccucuucgucagauaauggaacuugcuauccaggcgacuuuaucgauuacgaggagcucagggagcagcugagcaguguguccucuuucgaacgguuugagauuuucccgaagacaagcuccuggcccaaccacgacucaaauaagggugucaccgccgcuuguccucaugcaggggccaaaaguuuuuauaagaaccugaucuggcucgugaaaaagggaaauagcuacccaaaauuaucuaaguccuauauaaacgauaagggcaaagaaguacugguucuuuggggcauccaccaccccucaacgagcgcugaccaacagaguuuguaccagaaugccgaugcguacguguucgucgggacuucucgcuauuccaagaaauuuaagccugagauugcaauccgaccaaaagugcgugaccaggagggaagaaugaacuacuauuggacccugguggaacccggugauaagauuacauucgaggccacuggcaaucuagucguuccuagguacgcuuuugccauggaacggaacgcagggagcggaaucauaauuucggacaccccagugcaugacugcaacacaaccugucaaacgccgaaaggcgcuaucaauacuucuuuccccuuucagaacauucacccuaucacaaucgguaagugcccaaaguauguaaaauccaccaagcuccgccuggccacugggcuuagaaaugugcccucaauucagaguaggggacuguucggcgcgauagccggcuuuaucgaagggggauggacagguauggucgauggcugguacggguaucaucaccagaacgaacaaggaagcggcuacgcagcugacuugaaauccacccagaaugccauugaugagaucacgaacaagguaaauucuguuauagagaaaaugaacacccaguucacagcuguggguaaggaguucaaucaccucgaaaagcggauugaaaaccugaauaaaaaggucgacgauggguuuuuagacaucuggacuuacaacgccgagcugcucgugcuucuggaaaaugagcgcaccuuggauuaucaugacagcaacgugaaaaaucuauacgagaagguucgaucacagcugaaaaacaacgcaaaggaaaucggcaauggauguuucgaguuuuaucacaagugcgauaacacauguauggaaagugugaaaaauggcacuuacgacuauccuaaguacuccgaggaagccaaacucaacagagaggagauugauggggucaagcuggaaagcaccaggaucuaucaaauucuugcuauauacucuacaguggcgucaagucuggucuuggugguuagccucggagcaaucuccuucuggaugugcucuaaugguucgcugcagugccggauuuguaucuga

SEQ ID NO: 133808 - RNA, 1701 nt, Artificial Sequence; identical to SEQ ID NO: 130897
  derived and/or modified CDS sequence (opt3) from hemagglutinin__InfluenzaA__ADM32791

SEQ ID NO: 133809 - RNA, 1701 nt, Artificial Sequence
  derived and/or modified CDS sequence (opt3) from hemagglutinin__InfluenzaA__ADM32801
augaaggccauccuggugguccuccuuuacaccuucgcuacagcaaacgccgacacucugugcauuggcuaucacgcgaauaacagcacggauaccguugacacaguguuggagaaaaauguaacugugacccauuccgucaacauauuagaaaauaagcacaacgggaaacuguguaagcuaagaggaguggcuccccuccaucuggguaaaugcaauaucgccggcuggauucuugggaacccugagugugaaucucugucaacagcaaguagcugguccuacaucguugagaccucuucgucagauaauggaacuugcuauccaggcgacuuuauugauuacgaagaguugagggagcagcucagcaguguguccucuuucgaacgguuugagaucuucccgaagacaagcuccuggcccaaccacgacucaaauaagggugucaccgccgcuuguccucaugcaggggccaaaaguuuuuauaagaaccugauauggcuggugaaaaagggaaauagcuacccaaaacucucuaaguccuauaucaacgauaagggcaaagaaguauuaguucuguggggcauucaccaccccucaacgagcgcugaccaacagagucuuuaccagaaugccgaugcguacguguucgucgggucuucccgcuauagcaagaaauuuaagccugagaucgcaauucgaccaaaagugcgugaccaggagggaagaaugaacuacuauuggacuuugguggaacccggugauaagaucaccuucgaggccacaggcaaccuggucguuccuagguacgcuuuugccauggaacggaaugcagggucgggaauaauuaucucugacacuccagugcaugauugcaacaccacaugucaaaccccgaaaggcgcuauuaauacgucccuacccuuccagaacauccacccuaucacuauugguaagugcccaaaguauguaaaaucaacaaagcuccgccuggccaccgggcuuagaaaugugcccaguauacagagcaggggacuguuuggcgcgaucgccggcuucauugaagggggauggacugguauggucgacggcugguacggguaucaucaccagaacgaacaaggauccggcuacgcagcugacuugaaaucuacacagaaugccaucgaugagauaaccaacaaggugaauagcguuauugagaaaaugaacacgcaguuuaccgcuguggguaaggaguucaaucaccucgagaagcggaucgaaaaccugaauaaaaaggucgacgauggguucuuagacaucuggacauacaacgccgagcugcucgugcuucuggaaaaugagcgcacuuuggauuaucaugacucaaacguuaaaaaccuauacgagaagguacgaagucagcugaaaaauaacgcaaaggaaauuggcaauggauguuuugaguucuaucacaagugcgauaacaccuguauggaauccgugaaaaauggcacauacgacuauccuaaguacagcgaggaagccaaacucaacagagaggagaucgauggggucaagcuggaaucuacuaggauuuaucaaauacuugcuaucuacucaaccguggcgaguagccuggucuuggugguuucccucggagcaauuucuuuuuggaugugcucgaaugguagccugcagugccggaucuguaucuga

SEQ ID NO: 133810 - RNA, 1701 nt, Artificial Sequence
  derived and/or modified CDS sequence (opt3) from hemagglutinin__InfluenzaA__ADM32811
augaaggccauccuggugguccuccuuuacaccuucgcuacagcaaacgccgacacucugugcauuggcuaucacgcgaauaacagcacggauaccguugacacaguguuggagaaaaauguaacugugacccauuccgucaacuuacuggaagauaagcacaaugggaaacuauguaagcucagaggaguggcuccccugcaucuugguaaaugcaacauagccggcuggauccuggggaauccugagugugaaucuuugucaacagcaaguagcugguccuacauuguugagaccucuucgucagacaacggaacuugcuauccaggcgauuuuaucgacuacgaggagcucagggagcagcugagcaguguguccucuuucgaacgguuugagauuuucccgaagacaagcuccuggcccaaucacgauucaaacaagggugucaccgccgcuuguccucaugcaggggccaaaaguuuuuauaagaaucugaucuggcucgugaaaaagggaaacagcuacccaaaauuaucuaaguccuauauaaaugacaagggcaaagaaguacugguucuuuggggcauccaccaccccucaacgagcgcugaucaacagaguuuguaccagaacgccgacgcguacguguucgucgggacuucucgcuauuccaagaaauuuaagccugagauugcaauccgaccaaaagugcgugaucaggagggaagaaugaauuacuauuggacccugguggaacccggugacaagauuacauucgaggccacuggcaaccuagucguuccuagguacgcuuuugccauggaacggaacgcagggagcggaaucauaauuucggauaccccagugcaugacugcaauacaaccugucaaacgccgaaaggcgcuaucaacacuucucuccccuuccacaauauucauccuaucacaaucgguaagugcccaaaguauguaaaauccaccaagcugcgccuugccacugggcugagaaacgugcccucaauucagaguaggggauuguuuggcgcgauagccggcuucaucgaagggggauggacagguauggucgacggcugguacggguaucaccaccagaaugaacagggaagcggcuacgcagcugaucucaaauccacccaaaacgccauugacgagaucacgaauaaggugaacucuguuauagagaaaaugaauacccaguuuacagcuguggguaaggaguucaaccaucuggaaaagcggauugaaaauuuaaacaaaaaggucgaugacggguuccuggauaucuggacuuacaaugccgagcuccuugugcuguuggaaaacgagcgcacccuagacuaucacgauagcaauguaaagaaccuguacgagaagguucgaucacagcucaaaaacaaugcaaaggaaaucggcaacggauguuuugaguucuaucauaagugcgacaauacauguauggaaagugugaaaaacggcacuuacgauuauccuaaguacuccgaggaagccaaacugaauagagaggagauugacggggucaaacuugaaagcaccaggaucuaucagauucuggcuauauacucuacaguggcgucaaguuugguccucgugguuagccugggagcaaucuccuuuuggaugugcucuaacgguucguuacaaugccggauuuguaucuga

SEQ ID NO: 133811 - RNA, 1701 nt, Artificial Sequence; identical to SEQ ID NO: 130717
  derived and/or modified CDS sequence (opt3) from hemagglutinin__InfluenzaA__ADM32821

SEQ ID NO: 133812 - RNA, 1701 nt, Artificial Sequence; identical to SEQ ID NO: 132305
  derived and/or modified CDS sequence (opt3) from hemagglutinin__InfluenzaA__ADM32831

SEQ ID NO: 133813 - RNA, 1701 nt, Artificial Sequence; identical to SEQ ID NO: 130897
  derived and/or modified CDS sequence (opt3) from hemagglutinin__InfluenzaA__ADM32841

SEQ ID NO: 133814 - RNA, 1701 nt, Artificial Sequence; identical to SEQ ID NO: 132305
  derived and/or modified CDS sequence (opt3) from hemagglutinin__InfluenzaA__ADM32851

SEQ ID NO: 133815 - RNA, 1701 nt, Artificial Sequence; identical to SEQ ID NO: 130897
  derived and/or modified CDS sequence (opt3) from hemagglutinin__InfluenzaA__ADM32861

SEQ ID NO: 133816 - RNA, 1701 nt, Artificial Sequence; identical to SEQ ID NO: 131881
  derived and/or modified CDS sequence (opt3) from hemagglutinin__InfluenzaA__ADM32871

SEQ ID NO: 133817 - RNA, 1701 nt, Artificial Sequence; identical to SEQ ID NO: 132884
  derived and/or modified CDS sequence (opt3) from hemagglutinin__InfluenzaA__ADM32881

SEQ ID NO: 133818 - RNA, 1701 nt, Artificial Sequence
  derived and/or modified CDS sequence (opt3) from hemagglutinin__InfluenzaA__ADM32929
augaaggccauccuggugguccuccuuuacaccuucgcuacagcaaacgccgacacucugugcauuggcuaucacgcgaauaacagcacggauaccguugacacaguguuggagaaaaauguaacugugacccauuccgucaacuuacuggaagauaagcacaaugggaaacuauguaagcucagaggaguggcuccccugcaucuugguaaaugcaacauagccggcuggauccuggggaauccugagugugaaucuuugucaacagcaaguagcugguccuacauuguugagaccucuucgucagacaacggaacuugcuauccaggcgauuuuaucgacuacgaggagcucagggagcagcugagcaguguguccucuuucgaacgguuugagauuuucccgaagacaagcuccuggcccaaucacgauucaaacaagggugucaccgccgcuuguccucaugcaggggccaaaaguuuuuauaagaaucugaucuggcucgugaaaaagggaaacagcuacccaaaauuaucuaaguccuauauaaaugacaagggcaaagaaguacugguucuuuggggcauccaccaccccucaacgagcgcugaucaacagaguuuguaccagaacgccgacgcguacguguucgucgggacuucucgcuauuccaagaaauuuaagccugagauugcaauccgaccaaaagugcgugaucaggagggaagaaugaauuacuauuggacccugguggaacccggugacaagauuacauucgaggccacuggcaaccuagucguuccuagguacgcuuuugccauggaacggaacgcagggagcggaaucauaauuucggauaccccagugcaugacugcaauacaaccugucaaacgccgaaaggcgcuaucaacacuucucuccccuuccagaauauucacccuaucacaaucgguaagugcccaaaguauguaaaauccaccaagcugcgccuugccacugggcugagaaacgugcccucaauucagaguaggggauuguuuggcgcgauagccggcuucaucgaagggggauggacagguauggucgacggcugguacggguaucaucaccagaaugaacaaggaagcggcuacgcagcugaucucaaauccacccagaacgccauugacaagaucacgaauaaagugaacucuguuauagagaagaugaauacccaguuuacagcuguggguaaggaguucaaccaccuggaaaaacggauugagaauuuaaacaagaaagucgaugacggguuccuggauaucuggacuuacaaugccgaacuccuugugcuguuggagaacgaacgcacccuagacuaucaugauagcaauguaaagaaccuguacgagaaaguucgaucacagcucaagaacaaugcaaaggagaucggcaacggauguuuugaguucuaucacaaaugcgacaauacauguauggaaagugugaagaacggcacuuacgauuauccuaaauacuccgaagaggccaagcugaauagagaagagauugacggggucaaacuugagagcaccaggaucuaucaaauucuggcuauauacucuacaguggcgucaaguuugguccucgugguuagccugggagcaaucuccuuuuggaugugcucuaacgguucguuacggugccguauuuguaucuga

SEQ ID NO: 133819 - RNA, 1701 nt, Artificial Sequence
  derived and/or modified CDS sequence (opt3) from hemagglutinin__InfluenzaA__ADM32939
auggaggccauccuggugguccuccuuuacaccuucgcuacagcaaacgccgacacucugugcauuggcuaucacgcgaauaacagcacggauaccguugacacaguguuggaaaagaauguaacugugacccauuccgucaacuuacuggaggauaaacacaaugggaagcuauguaaacucagaggaguggcuccccugcaucuugguaagugcaacauagccggcuggauccuggggaauccugaaugugagucuuugucaacagcaaguagcugguccuacauuguugaaaccucuucgucagacaacggaacuugcuauccaggcgauuuuaucgacuacgaggagcucagggaacagcugagcaguguguccucuuucgagcgguuugaaauuuucccgaaaacaagcuccuggcccaaucacgauucaaacaagggugucaccgccgcuuguccucaugcaggggccaagaguuuuuauaaaaaucugaucuggcucgugaagaaaggaaacagcuacccaaaguuaucuaaauccuauauaaaugacaagggcaaggagguacugguucuuuggggcauccaccaccccucaacgagcgcugaucaacagaguuuguaccagaacgccgacgcguacguguucgucgggucuucccgcuauagcaaaaaguuuaaaccugagauugcaauccgaccaaaggugcgugaucaggaaggaagaaugaauuacuauuggacucugguggagcccggugacaaaauuaccuucgaagccacaggcaaccuagucguuccuagguacgcuuuugccauggagcggaacgcagggucgggaaucauaauuucugauacuccagugcaugacugcaauaccacaugucaaaccccgaagggcgcuaucaacacgucccuccccuuccacaauauucauccuaucacuaucgguaaaugcccaaaguauguaaagucaacaaaacugcgccuugccaccgggcugagaaacauucccaguauacagagcaggggauuguuuggcgcgaucgccggcuucauugaagggggauggacugguaugguggacggcugguacggguaucaccaccagaaugagcagggauccggcuacgcagcugaucucaagucuacacaaaacgccaucgacgagauaaccaauaaagucaacagcgugauugaaaagaugaauacgcaguuuaccgcuguugguaaagaguucaaccaucuggaaaagcggaucgagaauuuaaacaagaaaguggaugacggguuccuggauaucuggacauacaaugccgaacuccuuguccuguuggagaacgagcgcacucuagacuaucacgauucaaaugugaagaaccuguacgaaaaaguacgaagucagcucaagaacaaugcaaaagagauuggcaacggauguuuugaguucuaucauaagugcgacaauaccuguauggaauccguuaagaacggcacauacgauuauccuaaauacagcgaagaggccaagcugaauagagaggaaaucgacggggugaaacuugagucuacuaggauuuaucagauacuggcuaucuacucaaccgucgcgaguagcuuggugcucgucgugucccugggagcaauuucuuuuuggaugugcucgaacgguagcuuacggugccguaucuguaucuga

SEQ ID NO: 133820 - RNA, 1701 nt, Artificial Sequence
  derived and/or modified CDS sequence (opt3) from hemagglutinin__InfluenzaA__ADM32949
augaaggccauccuggugguccuccuuuacaccuucgcuacagcaaacgccgacacucugugcauuggcuaucacgcgaauaacagcacggauaccguugacacaguguuggagaaaaauguaacugugacccauuccgucaacuuacuggaagauaagcacaaugggaaacuauguaagcucagaggaguggcuccccugcaucuugguaaaugcaacauagccggcuggauccuggggaauccugagugugaaucuuugucaacagcaaguagcugguccuacauuguugagaccucuucgucagacaacggaacuugcuauccaggcgauuuuaucgacuacgaggagcucagggagcagcugagcaguguguccucuuucgaacgguuugagauuuucccgaagacaagcuccuggcccaaucacgauucaaacaagggugucaccgccgcuuguccucaugcaggggccaaaaguuuuuauaagaaucugaucuggcucgugaaaaagggaaacagcuacccaaaauuaucuaaguccuauauaaaugacaagggcaaagaaguacugguucuuuggggcauccaccaccccucaacgagcgcugaucaacagaguuuguaccagaacgccgacgcguacguguucgucgggacuucucgcuauuccaagaaauuuaagccugagauugcaauccgaccaaaagugcgugaucaggagggaagaaugaauuacuauuggacccugguggaacccggugacaagauuacauucgaggccacuggcaaccuagucguuccuagguacgcuuuugccauggaacggaacgcagggagcggaaucauaauuucggauaccccagugcaugacugcaauacaaccugucaaacgccgaacggcgcuaucaauacuucucuccccuuccagaacauucacccuaucacaaucgguaaaugcccaaaguauguaaaguccaccaaacugcgccuugccacugggcugagaaauauucccucaauacagaguaggggauuguuuggcgcgaucgccggcuucauugaagggggauggacagguaugguggacggcugguacggguaucaucaccagaacgaacaaggaagcggcuacgcagcugaucucaaguccacccagaaugccaucgacgagauaacgaacaaagucaauucugugauugagaagaugaacacccaguuuacagcuguugguaaagaguucaaucaccuggaaaagcggaucgaaaacuuaaauaagaaaguggaugacggguuccuggauaucuggacuuacaacgccgagcuccuuguccuguuggaaaaugagcgcacccuagacuaucaugauagcaacgugaagaaccuguacgagaaaguacgaucacagcucaagaauaacgcaaaagaaauuggcaauggauguuuugaguucuaucacaagugcgacaacacauguauggaaaguguuaagaauggcacuuacgauuauccuaaauacuccgaggaagccaagcugaacagagaggagaucgacggggugaaacuugaaagcaccaggauuuaucaaauacuggcuaucuacucuacagucgcgucaaguuuggugcucgucgugagccugggagcaauuuccuuuuggaugugcucuaaugguucguuacggugccguaucuguaucuga

SEQ ID NO: 133821 - RNA, 1701 nt, Artificial Sequence
  derived and/or modified CDS sequence (opt3) from hemagglutinin__InfluenzaA__ADM32958
augaaggccauccugguguuccuccuuuacaccuuugcuacagcaaacgccgacacucugugcauuggauaucacgcgaauaacagcacggauaccgucgacacaguuuuggagaaaaaugugacuguaacccauuccgugaacauauuagaagauaagcacaaugggaaacuguguaagcuaagaggagucgcuccccuccaucuggguaaaugcaacaucgccggcuggauucuugggaauccugagugugaaucucugucaacagcaaguagcugguccuacaucguggagaccucuucgucagacaacggaacuugcuauccaggcgauuucauugacuacgaagaguugagggagcagcucagcaguguuuccucuuuugaacgguucgagaucuuuccgaagacaagcuccuggcccaaucacgauucaaacaagggugugaccgccgcuuguccucaugcaggggccaaaaguuucuauaagaaucugauauggcuggucaaaaagggaaacagcuacccaaaacucucuaaguccuauaucaaugacaagggcaaagaaguguuaguacuguggggcauucaccaccccucaacgagcgcugaucaacagagucuuuaccagaacgccgacgcguacguuuuuguggagucuucccgcuauagcaagaaauucaagccugagaucgcaauucgaccaaaaguccgugaucaggaagggagaaugaauuacuauuggacuuugguggagcccggagacaagaucaccuuugaagccacagguaaccugguggucccuagguacgcuuucgccauggagcggaacgcaggcucggggauaauuaucucugauacuccaguucaugacugcaauaccacaugucaaaccccgaaaggagcuauuaacacgucccuacccuuucagaauauccacccuaucacuauuggcaagugcccaaaguaugugaaaucaacaaagcuccgccuggccaccggucuuagaaacguacccaguauacagagcagggggcuguucggagcgaucgccggcuuuauugaaggcggguggacuggaaugguggacgguugguacggcuaucaucaccagaaugagcaaggguccggauacgcagcugauuugaaaucuacacagaacgccaucgacgagauaaccaauaaggucaacagcgugauugaaaagaugaauacgcaguucaccgcuguuggcaaggaguucaaccaccucgaaaagcggcuggagaauuuaaacaaaaagguggaugacgguuuucuggauaucuggacauacaaugccgaacuccuuguccuguuggagaacgagcgcacucuagacuaucaugauucaaaugugaaaaaccuguacgaaaagguacgaagucagcucaaaaacaaugcaaaggagguugggaacggcuguuucgaauuuuaucacaagugcgacaauaccuguauggaguccgugaaaaacggaacauacgauuauccuaaguacagcgaagaggccaaacugaauagagaggaaaucgacggcgucaaacuugagucuacuaggauuuaucaaauccuggcuauuuacucaaccgcggcaaguagcuuggugcucgucgugucccugggggccauaucuuucuggaugugcucgaacggcagcuuacggugccguaucuguauuuga

SEQ ID NO: 133822 - RNA, 1701 nt, Artificial Sequence
  derived and/or modified CDS sequence (opt3) from hemagglutinin__InfluenzaA__ADM32977
augaaggccauccuggugguccuccuuugcaccuucgcuacagcaaacgccgacacucuguguauuggcuaccacgcgaauaacagcacggauaccguugacacaguguuggagaaaaauguaacugugacccauuccgucaacuuacuggaagauaagcacaaugggaaacuaugcaagcucagaggaguggcuccccugcaucuugguaaauguaacauagccggcuggauccuggggaauccugagugcgaaucuuugucaacagcaaguagcugguccuauauuguugagaccucuucgucagacaacggaacuuguuacccaggcgauuuuaucgacuaugaagaacucagggagcagcugagcaguguguccucuuucgaacgguuugagauuuucccgaagacaagcuccuggcccaaucacgauucaaacaagggugucaccgccgcuugcccucaugcaggggccaaaaguuuuuacaagaaucugaucuggcucgugaaaaagggaaacagcuauccaaaauuaucuaaguccuacauaaaugacaagggcaaagaaguacugguucuuuggggcauccaccaccccucaacgagcgcugaucaacagaguuuguaucagaacgccgacgcguacguguucgucgggacuucuaaguacuccaaaaaguuuaaaccugagauugcaauccgcccaaaggugcgagaucaggagggacguaugaauuauuacuggacccugguggaacccggugacaaaauuacauucgaggccacuggcaaccuagucguuccuagauaugcuuuugccauggaaaggaacgcagggagcggaaucauaauuucggauaccccagugcaugacuguaauacaaccugccaaacgccgaagggcgcuaucaacacuucucuccccuuccagaauauucacccuaucacaaucgguaaguguccaaaauacguaaaguccaccaaacugcggcuugccacugggcugcgcaacgugcccucaauucagaguagaggauuguuuggcgcgauagccggcuucaucgaagggggauggacagguauggucgacggcugguauggguaccaucaccagaaugaacaaggaagcggcuaugcagcugaucucaaguccacccagaacgccauugacgguaucacgaauaaaauaaacucugugauugagaagaugaauacccaguuuacagcuguugggaaggaguucaaccaccuggagaaaaggaucgagaauuuaaacaagaaaguggaugacggcuuccuggauaucuggacuuacaaugccgaacuccuuguccuguuggagaacgaacggacccuagacuaccaugauagcaaugugaagaaccuguaugagaaaguacgcucacagcucaagaacaaugcaaaggagauuggaaacggcugcuuugaguucuaccacaaaugugacaauacaugcauggagaguguuaagaacgggacuuaugauuacccuaaauauuccgaagaggccaagcugaaucgagaagagaucgacggagugaaacuugagagcaccagaauuuaccaaauacuggcuaucuauucuacagucgcgucaaguuuggugcucgucgugagccugggugcaauuuccuuuuggaugugcucuaacggcucguuaaggugucggaucugcaucuga

SEQ ID NO: 133823 - RNA, 1701 nt, Artificial Sequence
  derived and/or modified CDS sequence (opt3) from hemagglutinin__InfluenzaA__ADM32986
augaaggccauccuggugguccuccuuuacaccuucgcuacagcaaacgccgacacucugugcauuggcuaucacgcgaauaacagcacggauaccguugacacaguguuggagaaaaauguaacugugacccauuccgucaacuuacuggaagauaagcacaaugggaaacuauguaagcucagaggaguggcuccccugcaucuugguaaaugcaacauagccggcuggauccuggggaauccugagugugaaucuuugucaacagcaaguagcugguccuacauuguugagaccucuucgucagacaacggaacuugcuauccaggcgauuuuaucgacuacgaagaacucagggagcagcugagcaguguguccucuuucgaacgguuugagauuuucccgaagacaaauagcuggcccaaccacgauuccaauaagggugucaccgccgcuuguccucaugcaggggccaaaucauuuuauaagaaccugaucuggcucgugaaaaagggaaauaguuacccaaaauuaagcaagucuuauauaaacgacaagggcaaagaaguacugguucuuuggggcauccaccaccccuccacgucagcugaucaacagagcuuguaccagaaugccgacgcguacguguucgucgggaccaguaaguauucuaaaaaguuuaaaccugagauugcaauccgcccaaaggugcgagaucaggagggacguaugaacuacuauuggacucugguggaacccggugacaaaauuacauucgaggccacuggcaaccuagucguuccuagauacgcuuuugccauggaaaggaaugcaggguccggaaucauaauuagcgauaccccagugcaugacugcaacacaaccugucaaacgccgaagggcgcuaucaauacuucgcuccccuuccagaacauucacccuaucacaaucgguaagugcccaaaauauguaaagucuaccaaacugcggcuugccacugggcugcgcaaugugcccuccauucagucaagaggauuguuuggcgcgauagccggcuucaucgaagggggauggacagguauggucgacggcugguacggguaucaucaccagaacgaacaaggaaguggcuacgcagcugaucucaagagcacccagaaugccauugacgguaucacgaacaaaauaaauuccgugauugagaagaugaacacccaguuuacagcuguugggaaggaguucaaucaccuggagaaaaggaucgagaacuuaaauaagaaaguggaugacggcuuccuggauaucuggacuuacaacgccgaacuccuuguccuguuggagaaugaacggacccuaaacuaucaugacucuaacgugaagaaucuguacgagaaaguacgcagccagcucaagaacaaugcaaaggagauuggaaacggcuguuuugaguucuaucacaaaugcgauaauacauguauggagucaguuaagaacgggacuuacgacuauccuaaauacagugaagaggccaagcugaaucgagaagagaucgauggagugaaacuugaguccaccagaauuuaucaaauacuggcuaucuacagcacagucgcgucuucauuggugcucgucgugagucugggugcaauuagcuuuuggaugugcuccaacggcucuuuaaggugccggaucuguaucuga

SEQ ID NO: 133824 - RNA, 1701 nt, Artificial Sequence
  derived and/or modified CDS sequence (opt3) from hemagglutinin__InfluenzaA__ADM32995
augaaggccauccuggugguccuccuuuacaccuucgcuacagcaaacgccgacacucugugcauuggcuaucacgcgaauaacagcacggauaccguugacacaguguuggagaaaaauguaacugugacccauuccgucaacuuacuggaagauaagcacaaugggaaacuauguaagcucagaggaguggcuccccugcaucuugguaaaugcaacauagccggcuggauccuggggaauccugagugugaaucuuugucaacagcaaguagcugguccuacauuguugagaccucuucgucagacaacggaacuugcuauccaggcgauuuuaucgacuacgaagaacucagggagcagcugagcaguguguccucuuucgaacgguuugagauuuucccgaagacaaauagcuggcccaaccacgauuccaauaagggugucaccgccgcuuguccucaugcaggggccaaaucauuuuauaagaaccugaucuggcucgugaaaaagggaaauaguuacccaaaauuaagcaagucuuauauaaacgacaagggcaaagaaguacugguucuuuggggcauccaccaccccuccacgucagcugaucaacagagcuuguaccagaaugccgacgcguacguguucgucgggaccaguaaguauucuaaaaaguuuaaaccugagauugcaauccgcccaaaggugcgagaucaggagggacguaugaacuacuauuggacucugguggaacccggugacaaaauuacauucgaggccacuggcaaccuagucguuccuagauacgcuuuugccauggaaaggaaugcaggguccggaaucauaauuagcgauaccccagugcaugacugcaacacaaccugucaaacgccgaagggcgcuaucaauacuucgcuccccuuccagaacauucacccuaucacaaucgguaagugcccaaaauauguaaagucuaccaaacugcggcuugccacugggcugcgcaaugugcccuccauucagucaagaggauuguuuggcgcgauagccggcuucaucgaagggggauggacagguauggucgacggcugguacggguaucaucaccagaacgaacaaggaaguggcuacgcagcugaucucaagagcacccagaaugccauugacgguaucacgaacaaaauaaauuccgugauugagaagaugaacacccaguuuacagcuguugggaaggaguucaaucaccuggagaaaaggaucgagaacuuaaauaagaaaguggaugacggcuuccuggauaucuggacuuacaacgccgaacuccuuguccuguuggagaaugaacggacccuagacuaucaugauucuaacgugaagaaccuguacgagaaaguacgcagccagcucaagaauaacgcaaaggagauuggaaauggcuguuuugaguucuaucacaaaugcgacaacacauguauggagucaguuaagaaugggacuuacgauuauccuaaauacagugaagaggccaagcugaaccgagaagagaucgacggagugaaacuugaguccaccagaauuuaucaaauacuggcuaucuacagcacagucgcgucuucauuggugcucgucgugagucugggugcaauuagcuuuuggaugugcuccaauggcucuuuaaggugccggaucuguaucuga

SEQ ID NO: 133825 - RNA, 1701 nt, Artificial Sequence; identical to SEQ ID NO: 131818
  derived and/or modified CDS sequence (opt3) from hemagglutinin__InfluenzaA__ADM33004

SEQ ID NO: 133826 - RNA, 1701 nt, Artificial Sequence; identical to SEQ ID NO: 130717
  derived and/or modified CDS sequence (opt3) from hemagglutinin__InfluenzaA__ADM33023

SEQ ID NO: 133827 - RNA, 1701 nt, Artificial Sequence
  derived and/or modified CDS sequence (opt3) from hemagglutinin__InfluenzaA__ADM33040
augaaggccauccuggugguccuccuuuacaccuucgcuacagcaaacgccgacacucugugcauuggcuaucacgcgaauaacagcacggauaccguugacacaguguuggagaaaaauguaacugugacccauuccgucaacuuacuggaagauaagcacaaugggaaacuauguaagcucagaggaguggcuccccugcaucuugguaaaugcaacauagccggcuggauccuggggaauccugagugugaaucuuugucaacagcaaguagcugguccuacauuguugagaccucuucgucagacaacggaacuugcuauccaggcgauuuuaucgacuacgaggagcucagggagcagcugagcaguguguccucuuucgaacgguuugagauuuucccgaagacaagcuccuggcccaaucacgauucaaacaagggugucaccgccgcuuguccucaugcaggggccaaaaguuuuuauaagaaucugaucuggcucgugaaaaagggaaacagcuacccaaaauuaucuaaguccuauauaaaugacaagggcaaagaaguacugguucuuuggggcauccaccaccccucaacgagcgcugaucaacagaguuuguaccagaacgccgacgcguacguguucgucgggucuucccgcuauagcaagaaauuuaagccugagauugcaauccgaccaaaagugcgugaucaggagggaagaaugaauuacuauuggacucugguggaacccggugacaagauuaccuucgaggccacaggcaaccuagucguuccuagguacgcuuuugccauggaacggaacgcagggucgggaaucauaauuucugauacuccagugcaugacugcaauaccacaugucaaaccccgaaaggcgcuaucaacacgucccuccccuuccagaauauucacccuaucacuaucgguaagugcccaaaguauguaaaaucaacaaagcugcgccuugccaccgggcugagaaacgugcccaguauucagagcaggggauuguuuggcgcgauagccggcuucaucgaagggggauggacugguauggucgacggcugguacggguaucaucaccagaaugaacaaggauccggcuacgcagcugaucucaaaucuacacagaacgccauugacgagaucaccaauaaggugaacagcguuauagagaaaaugaauacgcaguuuaccgcuguggguaaggaguucaaccaccuggaaaagcggauugaaaauuuaaacaaaaaggucgaugacggguuccuggauaucuggacauacaaugccgagcuccuugugcuguuggaaaacgagcgcacucuagacuaucaugauucaaauguaaagaaccuguacgagaagguucgaagucagcucaaaaacaaugcaaaggaaaucggcaacggauguuuugaguucuaucacaagugcgacaauaccuguauggaauccgugaaaaacggcacauacgauuauccuaaguacagcgaggaagccaaacugaauagagaggagauugacggggucaaacuugaaucuacuaggaucuaucaaauucuggcuauauacucaaccguggcgaguagcuugguccucgugguuucccugggagcaaucucuuuuuggaugugcucgaacgguagcuuacggugccguauuuguaucuga

SEQ ID NO: 133828 - RNA, 1701 nt, Artificial Sequence
  derived and/or modified CDS sequence (opt3) from hemagglutinin__InfluenzaA__ADM33050
augaaggccauccuggugguccuccuuuacaccuucgcuacagcaaacgccgacacucugugcauuggcuaucacgcgaauaacagcacggauaccguugacacaguguuggagaaaaauguaacugugacccauuccgucaacuuacuggaagauaagcacaaugggaaacuauguaagcucagaggaguggcuccccugcaucuugguaaaugcaacauagccggcuggauccuggggaauccugagugugaaucuuugucaacagcaaguagcugguccuacauuguugagaccucuucgucagacaacggaacuugcuauccaggcgauuuuaucgacuacgaggagcucagggagcagcugagcaguguguccucuuucgaacgguuugagauuuucccgaagacaagcuccuggcccaaucacgauucaaacaagggugucaccgccgcuuguccucaugcaggggccaaaaguuuuuauaagaaucugaucuggcucgugaaaaagggaaacagcuacccaaaauuaaauaagucuuauauaaacgacaagggcaaagaaguacugguucuuuggggcauccaccaccccuccacgucagcugaucaacagagcuuguaccagaaugccgacgcguacguguucgucgggaccagucgcuauucuaagaaauuuaagccugagauugcaauccgaccaaaagugcgugaucaggagggaagaaugaacuacuauuggacucugguggaacccggugacaagauuacauucgaggccacuggcaaccuacucgucccuagguacgcuuuugccauggaacggaaugcaggguccggaaucauaauuagcgauaccccaguucaugacugcaacacaaccugucaaacgccgaaaggcgcuaucaauacuucgcugcccuuccagaacauucacccuaucacaaucgguaagugcccaaaguaugugaaaucuaccaagcugcgccuugccacuggguugagaaauguacccuccauucagucaaggggacucuuuggcgcgauagccggcuucaucgaagggggauggacagguaugguggacggcugguacggguaucaucaccagaacgaacaaggaaguggcuacgcagcugaucugaaaagcacccagaaugccauugacgagaucacgaacaaggucaauuccgugauagagaaaaugaacacccaguuuacagcuguugguaaggaguucaaucacuuagaaaagcggauugaaaaccugaauaaaaagguggaugacggguuccucgauaucuggacuuacaacgccgagcuucuggucuugcuagaaaaugagcgcacccuggacuaucaugauucuaacgugaaaaaccucuacgagaagguacgaagccagcugaaaaauaacgcaaaggaaaucggcaauggauguuuugaguucuaucacaagugcgacaacacauguauggaaucaguuaaaaauggcacuuacgauuauccuaaguacagugaggaagccaaacuuaacagagaggagauugacggggugaagcuggaauccaccaggaucuaucaaauuuuggcuauauacagcacagucgcgucuucacucgugcuggucgugaguuuaggagcaaucagcuuuuggaugugcuccaaugguucucugcggugccguauuuguaucuga

SEQ ID NO: 133829 - RNA, 1701 nt, Artificial Sequence
  derived and/or modified CDS sequence (opt3) from hemagglutinin__InfluenzaA__ADM33069
augaaggccauccuggugguccuccuuuacaccuucgcuacagcaaacgccgacacucugugcauuggcuaucacgcgaauaacagcacggauaccguugacacaguguuggagaaaaauguaacugugacccauuccgucaacuuacuggaagauaagcacaaugggaaacuauguaagcucagaggaguggcuccccugcaucuugguaaaugcaacauagccggcuggauccuggggaauccugagugugaaucuuugucaacagcaaguagcugguccuacauuguugagaccucuucgucagacaacggaacuugcuauccaggcgauuuuaucgacuacgaagaacucagggagcagcugagcaguguguccucuuucgaacgguuugagauuuucccgaagacaagcuccuggcccaaucacgauucaaacaagggugucaccgccgcuuguccucaugcaggggccaaaaguuuuuauaagaaucugaucuggcucgugaaaaagggaaacagcuacccaaaauuaucuaaguccuauauaaaugacaagggcaaagaaguacugguucuuuggggcauccaccaccccucaacgagcgcugaucaacagaguuuguaccagaacgccgacgcguacguguucgucgggacuucucgcuauuccaagaaauuuaagccugagauugcaauccgaccaaaagugcgugaucaggagggaagaaugaauuacuauuggacccugguggaacccggugacaagauuacauucgaggccacuggcaaccuagucguuccuagguacgcuuuugccauggaacggaacgcagggagcggaaucauaauuucggauaccccagugcaugacugcaauacaaccugucaaacgccggagggcgcuaucaacacuucucuccccuuccagaauauucacccuaucacaaucgguaaaugcccaaaguauguaaaguccaccaaacugcgccuugccacugggcugagaaacgugcccucaauucagaguaggggauuguuuggcgcgauagccggcuucaucgaagggggauggacagguauggucgacggcugguacggguaucaucaccagaaugagcaaggaagcggcuacgcagcugaucucaaguccacccagaacgccauugacgagaucacgaauaaagugaacucuguuauagaaaagaugaauacccaguuuacagcuguggguaaagaguucaaccaccuggaaaagcggauugagaauuuaaacaagaaagucgaugacggguuccuggauaucuggacuuacaaugccgaacuccuugugcuguuggagaacgagcgcacccuagacuaucaugauagcaauguaaagaaccuguacgaaaaaguucgaucacagcucaagaacaaugcaaaagagaucggcaacggauguuuugaguucuaucacaagugcgacaauacauguauggagagugugaagaacggcacuuacgauuauccuaaauacuccgaagaggccaagcugaauagagaggaaauugacggggucaaacuugagagcaccaggaucuaucaaauucuggcuauauacucuacaguggcgucaaguuugguccucgugguuagccugggagcaaucuccuuuuggaugugcucuaacgguucguuacggugccguauuuguaucuga

SEQ ID NO: 133830 - RNA, 1701 nt, Artificial Sequence
  derived and/or modified CDS sequence (opt3) from hemagglutinin__InfluenzaA__ADM33079
augaaggccauccuggugguccuccuuuacaccuucgcuacagcaaacgccgacacucugugcauuggcuaucacgcgaauaacagcacggauaccguugacacaguguuggagaaaaauguaacugugacccauuccgucaacuuacuggaagauaagcacaaugggaaacuauguaagcucagaggaguggcuccccugcaucuugguaaaugcaacauagccggcuggauccuggggaauccugagugugaaucuuugucaacagcaaguagcugguccuacauuguugagaccucuucgucagacaacggaacuugcuauccaggcgauuuuaucgacuacgaggagcucagggagcagcugagcaguguguccucuuucgaacgguuugagauuuucccgaagacaagcuccuggcccaaucacgauucaaacaagggugucaccgccgcuuguccucaugcaggggccaaaaguuuuuauaagaaucugaucuggcucgugaaaaagggaaacagcuacccaaaauuaucuaaguccuauauaaaugacaagggcaaagaaguacugguucuuuggggcauccaccaccccucaacgagcgcugaucaacagaguuuguaccagaacgccgacgcguacguguucgucgggacuucucgcuauuccaagaaauuuaagccugagauugcaauccgaccaaaagugcgugaucaggagggaagaaugaauuacuauuggacccugguggaacccggugacaagauuacauucgaggccacuggcaaccuagucguuccuagguacgcuuuugccauggaacggaacgcagggagcggaaucauaauuucggauaccccagugcaugacugcaauacaaccugucaaacgccgaaaggcgcuaucaacacuucucuccccuuccagaauauucacccuaucacaaucgguaagugcccaaaguauguaaaauccaccaagcugcgccuugccacugggcugagaaacgugcccucaauucagaguaggggauuguuuggcgcgauagccggcuucaucgaagggggauggacagguauggucgacggcugguacggguaucaucaccagaaugaacaaggaagcggcuacgcagcugaucucaaauccacccagaacgccauugacgagaucacgaauaaggugaacucuguuauagagaaaaugaauacccaguuuacagcuguggguaaggaguucaaccaccuggaaaagcggauugaaaauuuaaacaaaaaggucgaugacggguuccuggauaucuggacuuacaaugccgagcuccuugugcuguuggaaaacgagcgcacccuagacuaucaugauagcaauguaaagaaccuguacgagaagguucgaucacagcucaaaaacaaugcaaaggaaaucggcaacggauguuuugaguucuaucacaagugcgacaauacauguauggaaagugugaaaaacggcacuuacgauuauccuaaguacuccgaggaagccaaacugaauagagaggagauugacggggucaaacuugaaagcaccaggaucuaucaaauucuggcuauauacucuacaguggcgucaaguuugguccucgugguuagccugggagcaaucuccuuuuggaugugcucuaacgguucguuacggugccguauuuguaucuga

SEQ ID NO: 133831 - RNA, 1701 nt, Artificial Sequence
  derived and/or modified CDS sequence (opt3) from hemagglutinin__InfluenzaA__ADM33099
augaaggccauccuggugguccuccuuuacaccuucgcuacagcaaacgccgacacucugugcauuggcuaucacgcgaauaacagcacggauaccguugacacaguguuggagaagaauguaacugugacccauuccgucaacuuacuggaagauaagcacaaugggaaacuauguaagcucagaggaguggcuccccugcaucuugguaaaugcaacauagccggcuggauccuggggaauccugagugugaaucuuugucaacagcaaguagcugguccuacauuguugagaccucuucgucagacaacggaacuugcuauccaggcgauuuuaucgacuacgaggagcucagggagcagcugagcaguguguccucuuucgaacgguuugagauuuucccgaagacaagcuccuggcccaaucacgauucaaacaagggugucaccgccgcuuguccucaugcaggggccaaaaguuuuuauaagaaucugaucuggcucgugaaaaagggaaacagcuacccaaaauuaucuaaguccuauauaaaugacaagggcaaagaaguacugguucuuuggggcauccaccaccccucaacgagcgcugaucaacagaguuuguaccagaacgccgacgcguacguguucgucgggacuucucgcuauuccaagaaauuuaagccugagauugcaauccgaccaaaagugcgugaucaggagggaagaaugaauuacuauuggacccugguggaacccggugacaagauuacauucgaggccacuggcaaccuaauggucccuagguacgcuuuugccauggaacggaacgcagggagcggaaucauaauuucggauaccccaguucaugacugcaauacaaccugucaaacgccgaaaggcgcuaucaacacuucucuccccuuccagaauauucacccuaucacaaucgguaagugcccaaaguaugugaaauccaccaagcugcgccuugccacugggcugagaaacguacccucaauucagaguaggggauuguuuggcgcgauagccggcuucaucgaagggggauggacagguaugguggacggcugguacggguaucaucaccagaaugaacaaggaagcggcuacgcagcugaucucaaauccacccagaacgccauugacgagaucacgaauaaggucaacucugugauagagaaaaugaauacccaguuuacagcuguugguaaggaguucaaccaccuggaaaagcggauugaaaauuuaaacaaaaagguggaugacggguuccuggauaucuggacuuacaaugccgagcuccuuguccuguuggaaaacgagcgcacccuagacuaucaugauagcaaugugaaaaaccuguacgagaagguacgaucacagcucaaaaacaaugcaaaggaaaucggcaacggauguuuugaguucuaucacaagugcgacaauacauguauggaaaguguuaaaaacggcacuuacgauuauccuaaguacuccgaggaagccaaacugaauagagaggagauugacggggugaaacuugaaagcaccaggaucuaucaaauucuggcuauauacucuacagucgcgucaaguuuggugcucgucgugagccugggagcaaucuccuuuuggaugugcucuaacgguucguuacggugccguauuuguaucuga

SEQ ID NO: 133832 - RNA, 1701 nt, Artificial Sequence; identical to SEQ ID NO: 133831
  derived and/or modified CDS sequence (opt3) from hemagglutinin__InfluenzaA__ADM33109

SEQ ID NO: 133833 - RNA, 1701 nt, Artificial Sequence
  derived and/or modified CDS sequence (opt3) from hemagglutinin__InfluenzaA__ADM33128
augaaggccauccuggugguccuccuuuacaccuucgcuacagcaaacgccgacacucugugcauuggcuaucacgcgaauaacagcacggauaccguugacacaguguuggagaaaaauguaacugugacccauuccgucaacuuacuggaagauaagcacaaugggaaacuauguaagcucagaggaguggcuccccugcaucuugguaaaugcaacauagccggcuggauccuggggaauccugagugugaaucuuugucaacagcaaguagcugguccuacauuguugagaccucuucgucagacaacggaacuugcuauccaggcgauuuuaucgacuacgaagaacucagggagcagcugagcaguguguccucuuucgaacgguuugagauuuucccgaagacaagcuccuggcccaaucacgauucaaacaagggugucaccgccgcuuguccucaugcaggggccaaaaguuuuuauaagaaucugaucuggcucgugaaaaagggaaacagcuacccaaaauuaucuaaguccuauauaaaugacaagggcaaagaaguacugguucuuuggggcauccaccaccccucaacgagcgcugaucaacagaguuuguaccagaacgccgacgcguacguguucgucgggacuucucgcuauuccaagaaauuuaagccugagauugcaauccgaccaaaagugcgugagcaggaaggaagaaugaauuacuauuggacccugguggagcccggugauaagauuacauucgaagccacuggcaaccuagucguuccuagguacgcuuuugccauggagcggaacgcagggagcggaaucauaauuucggacaccccagugcaugauugcaauacaaccugucaaacgccgaaaggcgcuaucaacacuucucuccccuuccagaauauucacccuaucacaaucgguaagugcccaaaguauguaaaauccaccaagcugcgccuugccacugggcugagaaacgugcccucaauucagaguaggggauuguuuggcgcgauagccggcuucaucgaagggggauggacagguauggucgacggcugguacggguaucaucaccagaaugagcaaggaagcggcuacgcagcugaccucaaauccacccagaacgccauugaugagaucacgaauaaggugaacucuguuauagaaaagaugaauacccaguuuacagcuguggguaaggaguucaaccaccuggaaaagcggauugagaauuuaaacaaaaaggucgacgauggguuccuggacaucuggacuuacaaugccgaacuccuugugcuguuggagaacgagcgcacccuagauuaucaugacagcaauguuaaaaaccuguacgaaaagguacgaucacagcucaaaaacaaugcaaaggagaucggcaacggauguuuugaguucuaucacaagugcgauaauacauguauggagagugugaaaaacggcacuuacgacuauccuaaguacuccgaagaggccaaacugaauagagaggaaauugauggggucaaacuugagagcaccaggaucuaucaaauucuggcuauauacucuacaguggcgucaaguuugguccucgugguuagccugggagcaaucuccuuuuggaugugcucuaacgguucguuacggugccguauuuguaucuga

SEQ ID NO: 133834 - RNA, 1701 nt, Artificial Sequence; identical to SEQ ID NO: 133833
  derived and/or modified CDS sequence (opt3) from hemagglutinin__InfluenzaA__ADM33137

SEQ ID NO: 133835 - RNA, 1701 nt, Artificial Sequence; identical to SEQ ID NO: 133833
  derived and/or modified CDS sequence (opt3) from hemagglutinin__InfluenzaA__ADM33147

SEQ ID NO: 133836 - RNA, 1701 nt, Artificial Sequence; identical to SEQ ID NO: 133833
  derived and/or modified CDS sequence (opt3) from hemagglutinin__InfluenzaA__ADM33157

SEQ ID NO: 133837 - RNA, 1701 nt, Artificial Sequence
  derived and/or modified CDS sequence (opt3) from hemagglutinin__InfluenzaA__ADM33167
augaaggccauccuggugguccuccuuuacaccuucgcuacagcaaacgccgacacucugugcauuggcuaucacgcgaauaacagcacggauaccguugacacaguguuggagaaaaauguaacugugacccauuccgucaacauauuagaagauaagcacaaugggaaacuguguaagcuaagaggaguggcuccccuccaucuggguaaaugcaacaucgccggcuggauucuugggaauccugagugugaaucucugucaacagcaaguagcugguccuacaucguugagaccucuucgucagacaacggaacuugcuauccaggcgauuuuauugacuacgaagaguugagggagcagcucagcaguguguccucuuucgaacgguuugagaucuucccgaagacaagcuccuggcccaaucacgauucaaacaagggugucaccgccgcuuguccucaugcaggggccaaaaguuuuuauaagaaucugauauggcuggugaaaaagggaaacagcuacccaaaacucucuaaguccuauaucaaugacaagggcaaagaaguauuaguucuguggggcauucaccaccccucaacgagcgcugaucaacagagucuuuaccagaacgccgacgcguacguguucgucgggacuucucgcuauuccaagaaauuuaagccugagaucgcaauucgaccaaaagugcgugaucaggagggaagaaugaauuacuauuggaccuugguggaacccggugacaagaucacauucgaggccacuggcaaccuggucguuccuagguacgcuuuugccauggaacggaacgcagggagcggaauaauuaucucggauaccccagugcaugacugcaauacaaccugucaaacgccgaaaggcgcuauuaacacuucucuacccuuccagaauauccacccuaucacaauugguaagugcccaaaguauguaaaauccaccaagcuccgccuggccacugggcuuagaaacgugcccucaauacagaguaggggacuguuuggcgcgaucgccggcuucauugaagggggauggacagguauggucgacggcugguacggguaucaucaccagaaugaacaaggaagcggcuacgcagcugauuugaaauccacccagaacgccaucgacgagauaacgaauaaggugaacucuguuauugagaaaaugaauacccaguuuacagcuguggguaaggaguucaaccaccucgagaagcggaucgaaaaucugaacaaaaaggucgaugacggguucuuagauaucuggacuuacaaugccgagcugcucgugcuucuggaaaacgagcgcaccuuggacuaucaugauagcaauguuaaaaaccuauacgagaagguacgaucacagcugaaaaacaaugcaaaggaaauuggcaacggauguuuugaguucuaucacaagugcgacaauacauguauggaaagugugaaaaacggcacuuacgauuauccuaaguacuccgaggaagccaaacucaauagagagaagaucgacggggucaaacuggagagcaccaggauuuaucaaauacuugcuaucuacucuacaguggcgucaagucuggucuuggugguuagccucggagcaauuuccuuuuggaugugcucuaacgguucgcugcggugccguaucuguaucuga

SEQ ID NO: 133838 - RNA, 1701 nt, Artificial Sequence; identical to SEQ ID NO: 132904
  derived and/or modified CDS sequence (opt3) from hemagglutinin__InfluenzaA__ADM33177

SEQ ID NO: 133839 - RNA, 1701 nt, Artificial Sequence; identical to SEQ ID NO: 133833
  derived and/or modified CDS sequence (opt3) from hemagglutinin__InfluenzaA__ADM33186

SEQ ID NO: 133840 - RNA, 1701 nt, Artificial Sequence; identical to SEQ ID NO: 133833
  derived and/or modified CDS sequence (opt3) from hemagglutinin__InfluenzaA__ADM33195

SEQ ID NO: 133841 - RNA, 1701 nt, Artificial Sequence; identical to SEQ ID NO: 133830
  derived and/or modified CDS sequence (opt3) from hemagglutinin__InfluenzaA__ADM33204

SEQ ID NO: 133842 - RNA, 1701 nt, Artificial Sequence
  derived and/or modified CDS sequence (opt3) from hemagglutinin__InfluenzaA__ADM33222
auggaggccauccuggugguccuccuuuacaccuucgcuacagcaaacgccgacacucugugcauuggcuaucacgcgaauaacagcacggauaccguugacacaguguuggaaaagaauguaacugugacccauuccgucaacuuacuggaggauaaacacaaugggaagcuauguaaacucagaggaguggcuccccugcaucuugguaagugcaacauagccggcuggauccuggggaauccugaaugugagucuuugucaacagcaaguagcugguccuacauuguugaaaccucuucgucagacaacggaacuugcuauccaggcgauuuuaucgacuacgaggagcucagggaacagcugagcaguguguccucuuucgagcgguuugaaauuuucccgaaaacaagcuccuggcccaaucacgauucaaacaagggugucaccgccgcuuguccucaugcaggggccaagaguuuuuauaaaaaucugaucuggcucgugaagaaaggaaacagcuacccaaaguuaucuaaauccuauauaaaugacaagggcaaggagguacugguucuuuggggcauccaccaccccucaacgagcgcugaucaacagaguuuguaccagaacgccgacgcguacguguucgucgggucuucccgcuauagcaaaaaguuuaaaccugagauugcaauccgaccaaaggugcgugaucaggaaggaagaaugaauuacuauuggacucugguggagcccggugacaaaauuaccuucgaagccacaggcaaccuagucguuccuagguacgcuuuugccauggagcggaacgcagggucgggaaucauaauuucugauacuccagugcaugacugcaauaccacaugucaaaccccgaagggcgcuaucaacacgucccuccccuuccacaauauucauccuaucacuaucgguaaaugcccaaaguauguaaagucaacaaaacugcgccuugccaccgggcugagaaacgugcccaguauucagagcaggggauuguuuggcgcgauagccggcuucaucgaagggggauggacugguauggucgacggcugguacggguaucaccaccagaaugagcagggauccggcuacgcagcugaucucaagucuacacaaaacgccauugacgagaucaccaauaaagugaacagcguuauagaaaagaugaauacgcaguuuaccgcuguggguaaagaguucaaccaucuggaaaagcggauugagaauuuaaacaagaaagucgaugacggguuccuggauaucuggacauacaaugccgaacuccuugugcuguuggagaacgagcgcacucuagacuaucacgauucaaauguaaagaaccuguacgaaaaaguucgaaaccagcucaagaauaacgcaaaagagaucggcaauggauguuuugaguucuaucauaagugcgacaacaccuguauggaaagugugaagaauggcacauacgauuauccuaaauacuccgaagaggccaagcugaacagagaggaaauugacggggucaaacuugagagcacuaggaucuaucagauucuggcuauauacucuaccguggcgucaaguuugguccucgugguuagccugggagcaaucuccuuuuggaugugcucuaaugguucguuacggugccguauuuguaucuga

SEQ ID NO: 133843 - RNA, 1701 nt, Artificial Sequence
  derived and/or modified CDS sequence (opt3) from hemagglutinin__InfluenzaA__ADM33232
auggaggccauccuggugguccuccuuuacaccuucgcuacagcaaacgccgacacucugugcauuggcuaucacgcgaauaacagcacggauaccguugacacaguguuggaaaagaauguaacugugacccauuccgucaacuuacuggaggauaaacacaaugggaagcuauguaaacucagaggaguggcuccccugcaucuugguaagugcaacauagccggcuggauccuggggaauccugaaugugagucuuugucaacagcaaguagcugguccuacauuguugaaaccucuucgucagacaacggaacuugcuauccaggcgauuuuaucgacuacgaggagcucagggaacagcugagcaguguguccucuuucgagcgguuugaaauuuucccgaaaacaagcuccuggcccaaucacgauucaaacaagggugucaccgccgcuuguccucaugcaggggccaagaguuuuuauaaaaaucugaucuggcucgugaagaaaggaaacagcuacccaaaguuaucuaaauccuauauaaaugacaagggcaaggagguacugguucuuuggggcauccaccaccccucaacgagcgcugaucaacagaguuuguaccagaacgccgacgcguacguguucgucgggucuucccgcuauagcaaaaaguuuaaaccugagauugcaauccgaccaaaggugcgugaucaggaaggaagaaugaauuacuauuggacucugguggagcccggugacaaaauuaccuucgaagccacaggcaaccuagucguuccuagguacgcuuuugccauggagcggaacgcagggucgggaaucauaauuucugauacuccagugcaugacugcaauaccacaugucaaaccccgaagggcgcuaucaacacgucccuccccuuccacaauauucauccuaucacuaucgguaaaugcccaaaguauguaaagucaacaaaacugcgccuugccaccgggcugagaaacgugcccaguauucagagcaggggauuguuuggcgcgauagccggcuucaucgaagggggauggacugguauggucgacggcugguacggguaucaccaccagaaugagcagggauccggcuacgcagcugaucucaagucuacacaaaacgccauugacgagaucaccaauaaagugaacagcguuauagaaaagacgaauacccaguuuacagcuguggguaaagaguucaaccaucuggaaaagcggauugagaauuuaaacaagaaagucgaugacggguuccuggauaucuggacuuacaaugccgaacuccuugugcuguuggagaacgagcgcacccuagacuaucacgauucaaauguaaagaaccuguacgaaaaaguucgaaaccagcucaagaauaacgcaaaagagaucggcaauggauguuuugaguucuaucauaagugcgacaacacauguauggaaagugugaagaauggcacuuacgauuauccuaaauacuccgaagaggccaagcugaacagagaggaaauugacggggucaaacuugagagcaccaggaucuaucagauucuggcuauauacucuacaguggcgucaaguuugguccucgugguuagccugggagcaaucuccuuuuggaugugcucuaaugguucguuacaaugccggauuuguaucuga

SEQ ID NO: 133844 - RNA, 1701 nt, Artificial Sequence
  derived and/or modified CDS sequence (opt3) from hemagglutinin__InfluenzaA__ADM33241
augaaggccauccuggugguccuccuuuacaccuucgcuacagcaaacgccgacacucugugcauuggcuaucacgcgaauaacagcacggauaccguugacacaguguuggagaaaaauguaacugugacccauuccgucaacauauuagaagauaagcacaaugggaaacuguguaagcuaagaggaguggcuccccuccaucuggguaaaugcaacaucgccggcuggauucuugggaauccugagugugaaucucugucaacagcaaguagcugguccuacaucguugagaccucuucgucagacaacggaacuugcuauccaggcgauuuuauugacuacgaagaguugagggagcagcucagcaguguguccucuuucgaacgguuugagaucuucccgaagacaagcuccuggcccaaucacgauucaaacaagggugucaccgccgcuuguccucaugcaggggccaaaaguuuuuauaagaaucugauauggcuggugaaaaaggaaaacagcuacccaaaacucucuaaguccuauaucaaugacaagggaaaagagguauuaguucuguggggcauucaccaccccucaacgagcgcugaucaacagagucuuuaccagaacgccgacgcguacguguucgucgggucuucccgcuauagcaagaaauuuaagccugagaucacuauucgaccaaaagugcgugaucaggaaggcagaaugaauuacuauuggaccuugguggagcccggagacaagaucacauucgaagcaacugguaaccuggucguuccuagguacgccuuugcuauggagcggaacgccggcucggggauaauuaucucugauaccccagugcaugacugcaauacaaccugucaaacgccgaaaggagcaauuaacacuucccuacccuuccagaauauccacccuaucacaauuggcaagugcccaaaguauguaaaaucaaccaagcuccgccuggcuacuggucuuagaaacgugcccaguauacagagcagggggcuguuuggagccaucgcgggcuucauugaaggcggguggacaggaauggucgacgguugguacggcuaucaucaccagaaugagcaaggguccggauacgccgcagauuugaaaucuacccagaacgcuaucgacgagauaacgaauaaggugaacagcguuauugaaaagaugaauacccaguuuacagccgugggcaaagaguucaaccaccucgaaaagcggaucgagaaucugaacaaaaaggucgaugacgguuucuuagauaucuggacuuacaaugcugaacugcucgugcuucuggagaacgagcgcaccuuggacuaucaugauucaaauguuaaaaaccuauacgaaaagguacgaagucagcugaaaaacaaugccaaggagauugggaacggcuguuuugaguucuaucacaagugcgacaauacauguauggaauccgugaaaaacggaacuuacgauuauccuaaguacagcgaagaggcaaaacucaauagagaggaaaucgacggcgucaagcuggagucuaccaggauuuaucaaauacuugccaucuacucaacaguggcuaguagccuggucuuggugguuucccucggggcgauuucuuuuuggaugugcucgaacggaagccugcggugccguaucuguaucuga

SEQ ID NO: 133845 - RNA, 1701 nt, Artificial Sequence; identical to SEQ ID NO: 133842
  derived and/or modified CDS sequence (opt3) from hemagglutinin__InfluenzaA__ADM33251

SEQ ID NO: 133846 - RNA, 1701 nt, Artificial Sequence
  derived and/or modified CDS sequence (opt3) from hemagglutinin__InfluenzaA__ADM33260
augaaggccauccuggugguccuccuuuacaccuucgcuacagcaaacgccgacacucugugcauuggcuaucacgcgaauaacagcacggauaccguugacacaguguuggagaaaaauguaacugugacccauuccgucaacauauuagaagauaagcacaaugggaaacuguguaagcuaagaggaguggcuccccuccaucuggguaaaugcaacaucgccggcuggauucuugggaauccugagugugaaucucugucaacagcaaguagcugguccuacaucguugagaccucuucgucagacaacggaacuugcuauccaggcgauuuuauugacuacgaagaguugagggagcagcucagcaguguguccucuuucgaacgguuugagaucuucccgaagacaagcuccuggcccaaucacgauucaaacaagggugucaccgccgcuuguccucaugcaggggccaaaaguuuuuauaagaaucugauauggcuggugaaaaagggagacagcuacccaaaacucucuaaguccuauaucaacgauaagggcaaagaaguauuaguucuguggggcauucaccaccccucaacgagcgcugaccaacagagucuuuaccagaaugccgaugcguacguguucgucgggucuucccgcuauagcaagaaauuuaagccugagaucgcaauucgaccaaaagugcgugaccaggagggaagaaugaacuacuauuggacuuugguggaacccggugauaagaucaccuucgaggccacaggcaaucuggucguuccuagguacgcuuuugccauggaacggaacgcagggucgggaauaauuaucucugacacuccagugcaugacugcaacaccacaugucaaaccccgaaaggcgcuauuaauacgucccuacccuuccagaacauccacccuaucacuauugguaagugcccaaaguauguaaaaucaacaaagcuccgccuggccaccgggcuuagaaaugugcccaguauacagagcaggggacuguuuggcgcgaucgccggcuucauugaagggggauggacugguauggucgauggcugguacggguaucaucaccagaacgaacaaggauccggcuacgcagcugacuugaaaucuacacagaaugccaucgaugagauaaccaacaaggugaauagcguuauugagaaaaugaacacgcaguuuaccgcuguggguaaggaguucaaucaccucgagaagcggaucgaaaaccugaauaaaaaggucgacgauggguucuuagacaucuggacauacaacacugagcugcucgugcuucuggaaaaugagcgcaccuuggauuaucaugacucaaacguuaaaaaucuauacgagaagguacgaagucagcugaaaaacaacgccaaggaaauuggcaauggauguuuugaguucuaucacaagugcgauaacacauguauggaauccgugaaaaauggcacuuacgacuauccuaaguacagcgaggaagcaaaacucaacagagaggagaucgauggggucaagcuggaaucuaccaggauuuaucaaauacuugccaucuacucaacaguggcuaguagccuggucuuggugguuucccucggagcgauuucuuuuuggaugugcucgaaugguagccugcggugccguaucuguaucuga

SEQ ID NO: 133847 - RNA, 1701 nt, Artificial Sequence
  derived and/or modified CDS sequence (opt3) from hemagglutinin__InfluenzaA__ADM33280
augaaggccauccuggugguccuccuuuacaccuucgcuacagcaaacgccgacacucugugcauuggcuaucacgcgaauaacagcacggauaccguugacacaguguuggagaaaaauguaacugugacccauuccgucaacauauuagaagauaagcacaaugggaaacuguguaagcuaagaggaguggcuccccuccaucuggguaaaugcaacaucgccggcuggauucuugggaauccugagugugaaucucugucaacaguuaguagcugguccuacaucguggagaccucuucgucagacaacggaacuugcuauccaggcgauuuuauugacuacgaagaguugagggagcagcucagcagugucuccucuuucgaacgguuugagaucuucccgaagacaagcuccuggcccaaucacgauucaaacaagggugugaccgcagccuguccucaugcuggggcaaaaaguuuuuauaagaaucugauauggcugguuaaaaagggaaacagcuacccaaaacucucuaaguccuauaucaaugacaagggcaaagaaguauuagugcuguggggcauucaccaccccucaacgagcgccgaucaacagagucuuuaccagaacgcugacgccuacgucuucguggggucuucccgcuauagcaagaaauuuaagccugagaucgcgauucgaccaaaagugcgugaucaggagggaagaaugaauuacuauuggacuuuggucgaacccggugacaagaucaccuucgaggcaacaggcaaccugguugugccuagguacgccuuugcuauggaacggaacgccgggucgggaauaauuaucucugauacuccaguacaugacugcaauaccacaugucaaaccccgcgcggcgcaauuaacacgucccuacccuuccagaauauccacccuaucacuauugguaaaugcccaaaguaugugaagucaacaaaacucagacuggcuaccgggcuuaggaacguccccaguauacagagccggggacuguuuggcgccaucgcgggcuucauugaagggggauggacugguaugguggacggcugguacggguaucaucaccagaaugaacaaggauccggcuacgccgcagauuugaagucuacacagaacgcuaucgacgagauaaccaauaaaguuaacagcgugauugagaagaugaauacgcaguuuaccgccgucgguaaagaguucaaccaccucgagaagcgcaucgaaaaucugaacaagaaaguggaugacggguucuuagauaucuggacauacaaugcugagcugcucguacuucuggaaaacgagcgaacuuuggacuaucaugauucaaauguuaagaaccuauacgagaaagugagaagucagcugaagaacaaugccaaagaaauuggcaacggauguuuugaguucuaucacaagugcgacaauaccuguauggaauccgucaagaacggcacauacgauuauccuaaauacagcgaggaagcaaagcucaauagggaggagaucgacggggugaaacuggaaucuacucggauuuaucaaauacuugccaucuacucaaccgucgcuaguagccugguguugguugugucccucggagcgauuucuuuuuggaugugcucgaacgguagccugcagugccguaucuguaucuga

SEQ ID NO: 133848 - RNA, 1701 nt, Artificial Sequence; identical to SEQ ID NO: 131164
  derived and/or modified CDS sequence (opt3) from hemagglutinin__InfluenzaA__ADM33290

SEQ ID NO: 133849 - RNA, 1701 nt, Artificial Sequence; identical to SEQ ID NO: 130717
  derived and/or modified CDS sequence (opt3) from hemagglutinin__InfluenzaA__ADM33300

SEQ ID NO: 133850 - RNA, 1701 nt, Artificial Sequence; identical to SEQ ID NO: 130704
  derived and/or modified CDS sequence (opt3) from hemagglutinin__InfluenzaA__ADM33310

SEQ ID NO: 133851 - RNA, 1701 nt, Artificial Sequence
  derived and/or modified CDS sequence (opt3) from hemagglutinin__InfluenzaA__ADM33320
augaaggccauccugguggucaugcucuacaccuucgcuacagcaaacgccgacacucuuugcauuggcuaucacgcgaauaacagcacggauaccguugacacagugcuggagaaaaauguaacugugacccauuccgucaacuuguuagaagauaagcacaaugggaaacuguguaagcuaagaggaguggcuccccuccaucuggguaaaugcaacauagccggcuggauccuugggaauccugagugugaaucucugucaacagcaaguagcugguccuacauuguugagaccuuuucuucggacaacggaacuugcuauccaggcgauuucaucgacuacgaagaguugagggagcagcucucaagcgugaguuccuuugaacgguucgagauuuuuccgaagacaucuagcuggcccaaucacgauuccaacaagggugucaccgccgcuuguccucaugcaggggccaaaucauucuauaagaaucugaucuggcuggugaaaaagggaaacaguuacccaaaacucagcaagucuuauauaaaugacaagggcaaagaaguauuaguucuguggggcauccaccaccccuccacgucagcugaucaacagagccuuuaccagaacgccgacgcguacguguuugucgggaguucucgcuauuccaagaaauucaagccugagauugcaauccgaccaaaagugcgugaucaggagggaagaaugaauuacuauuggacuuugguggaacccggugacaagauuaccuuugaggccacaggcaaccuggucguuccuagguacgcuuucgccauggaacggaacgcagggagcggaaucauaauuucggauacuccagugcaugacugcaauaccacaugucaaaccccgaaaggcgcuaucaacacgucucuacccuuucagaauauucacccuaucacuaucgguaagugcccaaaguauguaaaauccacaaagcuccgccuggccaccgggcuuagaaacgugcccucaauucagaguaggggacuguucggcgcgauagccggcuuuaucgaagggggauggacugguauggucgacggcugguacggguaucaucaccagaaugaacaaggaagcggcuacgcagcugauuugaaauccacacagaacgccauugacgagaucaccaauaaggugaacucuguuauagagaaaaugaauacgcaguucaccgcuguggguaaggaguucaaccaccucgagaagcggauugaaaaucugaacaaaaaggucgaugacggguuuuuagauaucuggacauacaaugccgagcugcucgugcuucuggaaaacgagcgcacuuuggacuaucaugauagcaauguuaaaaaccuauacgagaagguacgaucacagcugaaaaacaaugcaaaggaaaucggcaacggauguuucgaguuuuaucacaagugcgacaauaccuguauggaaagugugaaaaacggcacauacgauuauccuaaguacuccgaggaagccaaacucaauagagaggagauugacggggucaagcuggaaagcacuaggaucuaucaaauucuugcuauauacucuaccguggcgucaagucuggucuuggugguuagccucggagcaaucuccuucuggaugugcucuaacgguucgcugcagugccggauuuguaucuga

SEQ ID NO: 133852 - RNA, 1701 nt, Artificial Sequence; identical to SEQ ID NO: 130743
  derived and/or modified CDS sequence (opt3) from hemagglutinin__InfluenzaA__ADM33340

SEQ ID NO: 133853 - RNA, 1701 nt, Artificial Sequence
  derived and/or modified CDS sequence (opt3) from hemagglutinin__InfluenzaA__ADM33355
augaaggccauccugguggucaugcucuacaccuucgcuacagcaaacgccgacacucuuugcauuggcuaucacgcgaauaacagcacggauaccguugacacagugcuggagaaaaauguaacugugacccauuccgucaacuuguuagaagauaagcacaaugggaaacuguguaagcuaagaggaguggcuccccuccaucuggguaaaugcaacauagccggcuggauccuugggaauccugagugugaaucucugucaacagcaaguagcugguccuacauuguugagaccucuucgucagacaacggaacuugcuauccaggcgauuuuaucgacuacgaagaguugagggagcagcucagcaguguguccucuuucgaacgguuugagauuuucccgaagacaagcuccuggcccaaucacgauucaaacaagggugucaccgccgcuuguccucaugcaggggccaaaaguuuuuauaagaaucugaucuggcuggugaaaaagggaaacagcuacccaaaacucucuaaguccuauauaaaugacaagggcaaagaaguauuaguucuguggggcauccaccaccccucaacgagcgcugaucaacagagucuuuaccagaacgccgacgcguacguguucgucgggucuucccgcuauagcaagaaauuuaagccugagauugcaauccgaccaaaagugcgugaucaggagggaagaaugaauuacuauuggacuuugguggaacccggugacaagauuaccuucgaggccacaggcaaccuggucguuccuagguacgcuuuugccauggaacggaacgcagggucgggaaucauaauuucugauacuccagugcauaauugcaacaccacaugucaaaccccgaaaggcgcuaucaauacgucccuacccuuccagaacauucacccuaucacuaucgguaagugcccaaaguauguaaaaucaacaaagcuccgccuggccaccgggcuuagaaaugugcccaguauucagagcaggggacuguuuggcgcgauagccggcuucaucgaagggggauggacugguauggucgacggcugguacggguaucaucaccagaacgaacaaggauccggcuacgcagcugacuugaaaucuacacagaaugccauugaugagaucaccaacaaggugaauagcguuauagagaaaaugaacacgcaguuuaccgcuguggguaaggaguucaaucaccucgagaagcggauugaaaaccugaauaaaaaggucgacgauggguucuuagacaucuggacauacaacgccgagcugcucgugcuucuggaaaaugagcgcacuuuggauuaucaugacucaaacguuaaaaaccuauacgagaagguacgaagucagcugaaaaauaacgcaaaggaaaucggcaauggauguuuugaguucuaucacaagugcgauaacaccuguauggaauccgugaaaaauggcacauacgacuauccuaaguacagcgaggaagccaaacucaacagagaggagauugauggggucaagcuggaaucuacuaggaucuaucaaauucuugcuauauacucaaccguggcgaguagccuggucuuggugguuucccucggagcaaucucuuuuuggaugugcucgaaugguagccugcagugccggauuuguaucuga

SEQ ID NO: 133854 - RNA, 1701 nt, Artificial Sequence; identical to SEQ ID NO: 133853
  derived and/or modified CDS sequence (opt3) from hemagglutinin__InfluenzaA__ADM33365

SEQ ID NO: 133855 - RNA, 1701 nt, Artificial Sequence; identical to SEQ ID NO: 130743
  derived and/or modified CDS sequence (opt3) from hemagglutinin__InfluenzaA__ADM33375

SEQ ID NO: 133856 - RNA, 1701 nt, Artificial Sequence
  derived and/or modified CDS sequence (opt3) from hemagglutinin__InfluenzaA__ADM33385
augaaggccauccugguggucaugcucuacaccuucgcuacagcaaacgccgacacucuuugcauuggcuaucacgcgaauaacagcacggauaccguugacacagugcuggagaaaaauguaacugugacccauuccgucaacuuguuagaagauaagcacaaugggaaacuguguaagcuaagaggaguggcuccccuccaucuggguaaaugcaacauagccggcuggauccuugggaauccugagugugaaucucugucaacagcaaguagcugguccuacauuguugagaccucuucgucagacaacggaacuugcuauccaggcgauuuuaucgacuacgaagaguugagggagcagcucagcaguguguccucuuucgaacgguuugagauuuucccgaagacaagcuccuggcccaaucacgauucaaacaagggugucaccgccgcuuguccucaugcaggggccaaaaguuuuuauaagaaucugaucuggcuggugaaaaagggaaacagcuacccaaaacucucuaaguccuauauaaaugacaagggcaaagaaguauuaguucuguggggcauccaccaccccucaacgagcgcugaucaacagagucuuuaccagaacgccgacgcguacguguucgucgggucuucccgcuauagcaagaaauuuaagccugagauugcaauccgaccaaaagugcgugaucaggagggaagaaugaauuacuauuggacuuugguggaacccggugacaagauuaccuucgaggccacaggcaaccuggucguuccuagguacgcuuuugccauggaacggaacgcagggucgggaaucauaauuucugauacuccagugcaugacugcaauaccacaugucaaaccuccaaaggcgcuaucaacacgucacuaccguuccagaauauucaccccaucacuaucgguaagugcccuaaguauguaaaaaguacaaagcuccgccuggccaccgggcuuagaaacgugccaagcauucaguccaggggacuguuuggcgcgauagccggcuucaucgaagggggauggacugguauggucgacggcugguacggguaucaucaccagaaugaacaaggaucuggcuacgcagcugauuugaaaagcacacagaacgccauugacgagaucaccaauaaggugaacucaguuauagagaaaaugaauacgcaguuuaccgcuguggguaaggaguucaaccaccucgagaagcggauugaaaaucugaacaaaaaggucgaugacggguucuuagauaucuggacauacaaugccgagcugcucgugcuucuggaaaacgagcgcacuuuggacuaucaugauaguaauguuaaaaaccuauacgagaagguacgaucccagcugaaaaacaaugcaaaggaaaucggcaacggauguuuugaguucuaucacaagugcgacaauaccuguauggaaagcgugaaaaacggcacauacgauuaucccaaguacucugaggaagccaaacucaauagagaggagauugacggggucaagcuggaaucaacuaggaucuaucaaauucuugcuauauacaguaccguggcgagcucccuggucuuggugguuucucucggagcaaucucguuuuggaugugcagcaacgguucccugcagugccggauuuguaucuga

SEQ ID NO: 133857 - RNA, 1701 nt, Artificial Sequence; identical to SEQ ID NO: 131164
  derived and/or modified CDS sequence (opt3) from hemagglutinin__InfluenzaA__ADM33395

SEQ ID NO: 133858 - RNA, 1701 nt, Artificial Sequence; identical to SEQ ID NO: 131164
  derived and/or modified CDS sequence (opt3) from hemagglutinin__InfluenzaA__ADM33405

SEQ ID NO: 133859 - RNA, 1701 nt, Artificial Sequence; identical to SEQ ID NO: 133853
  derived and/or modified CDS sequence (opt3) from hemagglutinin__InfluenzaA__ADM33415

SEQ ID NO: 133860 - RNA, 1701 nt, Artificial Sequence; identical to SEQ ID NO: 131560
  derived and/or modified CDS sequence (opt3) from hemagglutinin__InfluenzaA__ADM33425

SEQ ID NO: 133861 - RNA, 1701 nt, Artificial Sequence
  derived and/or modified CDS sequence (opt3) from hemagglutinin__InfluenzaA__ADM34007
augaaggccauccuggugguccuccuuuacaccuucgcuacagcaaacgccgacacucugugcauuggcuaucacgcgaauaacagcacggauaccguugacacaguguuggagaaaaauguaacugugacccauuccgucaacuuacuggaagauaagcacaaugggaaacuauguaagcucagaggaguggcuccccugcaucuugguaaaugcaacauagccggcuggauccuggggaauccugagugugaaucuuugucaacagcaaguagcugguccuacauuguugagaccucuucgucagacaacggaacuugcuauccaggcgauuuuaucgacuacgaagaacucagggagcagcugagcaguguguccucuuucgaacgguuugagauuuucccgaagacaagcuccuggcccaaucacgauucaaacaagggugucaccgccgcuuguccucaugcaggggccaaaaguuuuuauaagaaucugaucuggcucgugaaaaagggaaacagcuacccaaaauuaucuaaguccuauauaaaugacaagggcaaagaaguacugguucuuuggggcauccaccaccccucaacgagcgcugaucaacagaguuuguaccagaacgccgacgcguacguguucgucgggacuucucgcuauuccaagaaauuuaagccugagauugcaauccgaccaaaagugcgugaucaggagggaagaaugaauuacuauuggacccuggaggagcccggugacaagauuacauucgaagccacuggcaaccuaguggucccuagguacgcuuuugccauggagcggaacgcagggagcggaaucauaauuucggauaccccaguucaugacugcaauacaaccugucaaacgccgaaaggcgcuaucaacacuucucuccccuuccagaauauucacccuaucacaaucgguaagugcccaaaguaugugaaauccaccaagcugcgccuugccacugggcugagaaacguacccucaauucagaguaggggauuguuuggcgcgauagccggcuucaucgaagggggauggacagguaugguggacggcugguacggguaucaucaccagaaugagcaaggaagcggcuacgcagcugaucucaaauccacccagaacgccauugacgagaucacgaauaaggucaacucugugauagaaaagaugaauacccaguuuacagcuguugguaaggaguucaaccaccuggaaaagcggauugagaauuuaaacaaaaagguggaugacggguuccuggauaucuggacuuacaaugccgaacuccuuguccuguuggagaacgagcgcacccuagacuaucaugauagcaaugugaaaaaccuguacgaaaagguacgaucacagcucaaaaacaaugcaaaggagaucggcaacggauguuuugaguucuaucacaagugcgacaauacauguauggaaaguguuaaaaacggcacuuacgauuauccuaaguacuccgaagaggccaaacugaauagagaggaaauugacggggugaaacuugagagcaccaggaucuaucaaauucuggcuauauacucuacagucgcgucaaguuuggugcucgucgugagccugggagcaaucuccuuuuggaugugcucuaacgguucguuacagugccggauuuguaucuga

SEQ ID NO: 133862 - RNA, 1701 nt, Artificial Sequence; identical to SEQ ID NO: 130717
  derived and/or modified CDS sequence (opt3) from hemagglutinin__InfluenzaA__ADM52443

SEQ ID NO: 133863 - RNA, 1701 nt, Artificial Sequence
  derived and/or modified CDS sequence (opt3) from hemagglutinin__InfluenzaA__ADM52453
augaaggccauccuggugguccuccuuuacaccuucgcuacagcaaacgccgacacucugugcauuggcuaucacgcgaauaacagcacggauaccguugacacaguguuggagaaaaauguaacugugacccauuccgucaacauauuagaagauaagcacaaugggaaacuguguaagcuaagaggaguggcuccccuccaucuggguaaaugcaacaucgccggcuggauucuugggaauccugagugugaaucucugucaacagcaaguagcugguccuacaucguugagaccucuucgucagacaacggaacuugcuauccaggcgauuuuauugacuacgaagaguugagggagcagcucagcaguguguccucuuucgaacgguuugagaucuucccgaagacaagcuccuggcccaaucacgauucaaacaagggugucaccgccgcuuguccucaugcaggggccaaaaguuuuuauaagaaucugauauggcuggugaaaaagggaaacagcuacccaaaacucucuaaguccuauaucaaugacaagggcaaagaaguauuaguucuguggggcauucaccaccccucaacgagcgcugaucaacagagucuuuaccagaacgccgacgcguacguguucgucgggucuucccgcuauagcaagaaauuuaagccugagaucgcaauucgaccaaaagugcgugaucaggagggaagaaugaauuacuauuggacuuugguggaacccggugacaagaucaccuucgaggccacaggcaaccuggucguuccuagguacgcuuuugccauggaacggaacgcagggucgggaauaauuaucucugauacuccaauucaugacugcaauaccacaugucaaaccccgaaaggcgcuaucaacacgucccuacccuuccagaaugugcacccuaucacuauugguaagugcccaaaguauguaaaaucaacaaagcuccgccuggccaccgggcuuagaaacgugcccaguauacagagcaggggacuguuuggcgcgaucgccggcuucauugaagggggauggacugguauggucgacggcugguacggguaucaucaccagaaugaacaaggauccggcuacgcagcugauuugaaaucuacacagaacgccaucgacgagauaaccaauaaggugaacagcguuauugagaaaaugaauacgcaguuuaccgcuguggguaaggaguucaaccaccucgagaagcggaucgaaaaucugaacaaaaaggucgaugacggguucuuagauaucuggacauacaaugccgagcugcucgugcuucuggaaaacgagcgcacuuuggacuaucaugauucaaauguuaaaaaccuauacgagaagguacgaagucagcugaaaaacaaugcaaaggaaauuggcaacggauguuuugaguucuaucacaagugcgacaauaccuguauggaauccgugaaaaacggcacauacgauuauccuaaguacagcgaggaagccaaacucaauagagaggagaucgacggggucaagcuggaaucuacuaggauuuaucaaauacuugcuaucuacucaaccguggcgaguagccuggucuuggugguuucccucggagcaauuucuuuuuggaugugcucgaacgguagccugcagugccggaucuguaucuga

SEQ ID NO: 133864 - RNA, 1701 nt, Artificial Sequence
  derived and/or modified CDS sequence (opt3) from hemagglutinin__InfluenzaA__ADM52473
augaaggccauccuggcugugcuccuuuacaccuucgcaacagccaacgcggacacucugugcauuggcuaucacgcuaauaacagcacggauaccgucgacacaguuuuggagaaaaaugugacuguaacccauuccgugaacuuacuggaagauaagcacaaugggaaacuauguaagcucagaggagucgcaccccugcaucuugguaaaugcaacauagccggcuggauccuggggaauccugagugugaaucuuugucaacagccaguagcugguccuacauuguggagaccucuucgucaggaaacggcacuugcuauccaggugacuuuaucgauuacgaagaacucagggagcagcugagcaguguuuccucuuucgaacgguuugagauuuucccgaagacaagcuccuggcccaaucacgacucaaacaagggggugaccgcugcauguccucaugccggagcuaaaaguuuuuauaagaaucugcucugguuagucaaaaagggcaacagcuacccaaaacugucuaaguccuauaucaaugauaagggcaaagaagugcuuguauugugggggauacaccaccccucaacgagcgccgaccaacagagucuguaccagaacgcggaugcauacguuuucgugggaacuucucgcuauuccaagaaauuuaagccugagaucgccauucgaccaaaaguccgugaccaggaggguagaaugaauuacuauuggacccuagugggccccggggauaagaucacauucgaagcuacuggaaaccucguggucccuagguacgccuuugcaauggagcggaacgcuggcagcgguauuaucauaucggacaccccaguucaugauugcaauacaaccugucaaacgccgaaaggggccauuaacacuucucugcccuuccagaauauccacccuauuacaaucggaaagugcccaaaguaugugaaauccaccaaacuucgccuggcgacuggcuugagaaacguacccucaauccagaguaggggccucuuuggggccauugcaggauucauagaagguggcuggacagggaugguggacggaugguacggcuaucaucaccagaaugagcaagguagcggguacgcugccgaccugaaguccacccagaacgcuaucgaugaaauuacgaauaaggucaacucugugaucgagaaaaugaauacccaguuuacagccguuggcaaggaguucaaccacuuagaaaagcggauagagaaucugaacaaaaagguggacgauggauuccucgacauuuggacuuacaaugcagaacuucuggucuugcuagagaacgaacgcacccuggauuaucaugacagcaaugugaaaaaccucuacgagaagguacgaucacagcugaaaaacaaugccaaggagaucggcaacggguguuuugaguucuaucacaagugcgauaauacauguauggagaguguuaaaaacggaacuuacgacuauccuaaguacuccgaagaggcuaaacuuaauagagaagagaucgauggugugaagcuggagagcaccaggauuuaucaaaucuuggcgauuuacucuacagucgcaucaagucucgugcuggucgugagcuuaggcgccauauccuuuuggaugugcucuaacgggucgcugcagugccggaucuguauuuga

SEQ ID NO: 133865 - RNA, 1701 nt, Artificial Sequence; identical to SEQ ID NO: 131881
  derived and/or modified CDS sequence (opt3) from hemagglutinin__InfluenzaA__ADM52483

SEQ ID NO: 133866 - RNA, 1701 nt, Artificial Sequence; identical to SEQ ID NO: 130897
  derived and/or modified CDS sequence (opt3) from hemagglutinin__InfluenzaA__ADM52493

SEQ ID NO: 133867 - RNA, 1701 nt, Artificial Sequence; identical to SEQ ID NO: 130897
  derived and/or modified CDS sequence (opt3) from hemagglutinin__InfluenzaA__ADM52513

SEQ ID NO: 133868 - RNA, 1701 nt, Artificial Sequence; identical to SEQ ID NO: 130897
  derived and/or modified CDS sequence (opt3) from hemagglutinin__InfluenzaA__ADM52524

SEQ ID NO: 133869 - RNA, 1701 nt, Artificial Sequence; identical to SEQ ID NO: 130897
  derived and/or modified CDS sequence (opt3) from hemagglutinin__InfluenzaA__ADM52534

SEQ ID NO: 133870 - RNA, 1701 nt, Artificial Sequence; identical to SEQ ID NO: 130897
  derived and/or modified CDS sequence (opt3) from hemagglutinin__InfluenzaA__ADM52554

SEQ ID NO: 133871 - RNA, 1701 nt, Artificial Sequence; identical to SEQ ID NO: 130897
  derived and/or modified CDS sequence (opt3) from hemagglutinin__InfluenzaA__ADM52564

SEQ ID NO: 133872 - RNA, 1701 nt, Artificial Sequence; identical to SEQ ID NO: 130704
  derived and/or modified CDS sequence (opt3) from hemagglutinin__InfluenzaA__ADM52574

SEQ ID NO: 133873 - RNA, 1701 nt, Artificial Sequence; identical to SEQ ID NO: 130717
  derived and/or modified CDS sequence (opt3) from hemagglutinin__InfluenzaA__ADM52584

SEQ ID NO: 133874 - RNA, 1701 nt, Artificial Sequence
  derived and/or modified CDS sequence (opt3) from hemagglutinin__InfluenzaA__ADM52594
augaaggccauccuggugguccuccuuuacaccuucgcuacagcaaacgccgacacucugugcauuggcuaucacgcgaauaacagcacggauaccguugacacaguguuggagaaaaauguaacugugacccauuccgucaacuuacuggaagauaagcacaaugggaaacuauguaagcucagaggaguggcuccccugcaucuugguaaaugcaacauagccggcuggauccuggggaauccugagugugaaucuuugucaacagcaaguagcugguccuacauuguugagaccucuucgucagacaacggaacuugcuauccaggcgauuuuaucgacuacgaggagcucagggagcagcugagcaguguguccucuuucgaacgguuugagauuuucccgaagacaagcuccuggcccaaucacgauucaaacaagggugucaccgccgcuuguccucaugcaggggccaaaaguuuuuauaagaaucugaucuggcucgugaaaaagggaaacagcuacccaaaauuaucuaaguccuauauaaaugacaagggcaaagaaguacugguucuuuggggcauccaccaccccucaacgagcgcugaucaacagaguuuguaccagaacgccgacgcguacguguucgucgggacuucuaaguauuccaaaaaguuuaaaccugagauugcaauccgcccaaaggugcgagaucaggagggacguaugaauuacuauuggacccugguggaacccggugacaaaauuacauucgaggccacuggcaaccuagucguuccuagauacgcuuuugccauggaaaggaacgcagggagcggaaucauaauuucggauaccccagugcaugacugcaauacaaccugucaaacgccgaagggcgcuaucaacacuucucuccccuuccagaauauucacccuaucacaaucgguaagugcccaaaauauguaaaguccaccaaacugcggcuugccacugggcugcgcaacgugcccucaauucagaguagaggauuguuuggcgcgauagccggcuucaucgaagggggauggacagguauggucgacggcugguacggguaucaucaccagaaugaacaaggaagcggcuacgcagcugaucucaaguccacccagaacgccauugacaaaaucacgaauaaggugaacucuguuauagagaagaugaauacccaguuuacagcuguggguaaagaguucaaccaccuggaaaagaggauugagaauuuaaacaaaaaggucgaugacggguuccuggauaucuggacuuacaaugccgaacuccuugugcuguuggagaacgaacggacccuagacuaucaugauagcaauguaaagaaccuguacgagaagguucgcucacagcucaagaacaaugcaaaagagaucggcaacggauguuuugaguucuaucacaagugcgacaauacauguauggaaagugugaaaaacggcacuuacgauuauccuaaguacuccgaagaggccaaacugaaucgagaagagauugacggggucaaacuugagagcaccagaaucuaucaaauucuggcuauauacucuacaguggcgucaaguuugguccucgugguuagccugggagcaaucuccuuuuggaugugcucuaacgguucguuacagugcaggauuuguaucuga

SEQ ID NO: 133875 - RNA, 1701 nt, Artificial Sequence; identical to SEQ ID NO: 130897
  derived and/or modified CDS sequence (opt3) from hemagglutinin__InfluenzaA__ADM52604

SEQ ID NO: 133876 - RNA, 1701 nt, Artificial Sequence; identical to SEQ ID NO: 130897
  derived and/or modified CDS sequence (opt3) from hemagglutinin__InfluenzaA__ADM52614

SEQ ID NO: 133877 - RNA, 1701 nt, Artificial Sequence; identical to SEQ ID NO: 132489
  derived and/or modified CDS sequence (opt3) from hemagglutinin__InfluenzaA__ADM52624

SEQ ID NO: 133878 - RNA, 1701 nt, Artificial Sequence; identical to SEQ ID NO: 130897
  derived and/or modified CDS sequence (opt3) from hemagglutinin__InfluenzaA__ADM52634

SEQ ID NO: 133879 - RNA, 1701 nt, Artificial Sequence; identical to SEQ ID NO: 130897
  derived and/or modified CDS sequence (opt3) from hemagglutinin__InfluenzaA__ADM52644

SEQ ID NO: 133880 - RNA, 1701 nt, Artificial Sequence; identical to SEQ ID NO: 130897
  derived and/or modified CDS sequence (opt3) from hemagglutinin__InfluenzaA__ADM52654

SEQ ID NO: 133881 - RNA, 1701 nt, Artificial Sequence; identical to SEQ ID NO: 132305
  derived and/or modified CDS sequence (opt3) from hemagglutinin__InfluenzaA__ADM52664

SEQ ID NO: 133882 - RNA, 1701 nt, Artificial Sequence; identical to SEQ ID NO: 132489
  derived and/or modified CDS sequence (opt3) from hemagglutinin__InfluenzaA__ADM52674

SEQ ID NO: 133883 - RNA, 1701 nt, Artificial Sequence; identical to SEQ ID NO: 130897
  derived and/or modified CDS sequence (opt3) from hemagglutinin__InfluenzaA__ADM52684

SEQ ID NO: 133884 - RNA, 1701 nt, Artificial Sequence; identical to SEQ ID NO: 132489
  derived and/or modified CDS sequence (opt3) from hemagglutinin__InfluenzaA__ADM52704

SEQ ID NO: 133885 - RNA, 1701 nt, Artificial Sequence; identical to SEQ ID NO: 132305
  derived and/or modified CDS sequence (opt3) from hemagglutinin__InfluenzaA__ADM52714

SEQ ID NO: 133886 - RNA, 1701 nt, Artificial Sequence
  derived and/or modified CDS sequence (opt3) from hemagglutinin__InfluenzaA__ADM86399
augaaggccauccuggugguccuccuuuacaccuucgcuacagcaaacgccgacacucugugcauuggcuaucacgcgaauaacagcacggauaccguugacacaguguuggagaaaaauguaacugugacccauuccgucaacauauuagaagauaagcacaaugggaaacuguguaagcuaagaggaguggcuccccuccaucuggguaaaugcaacaucgccggcuggauucuugggaauccugagugugaaucucugucaacagcaaguagcugguccuacaucguugagaccucuucgucagacaacggaacuugcuauccaggcgauuuuauugacuacgaagaguugagggagcagcucagcaguguguccucuuucgaacgguuugagaucuucccgaagacaagcuccuggcccaaucacgauucaaacaagggugucaccgccgcuuguccucaugcaggggccaaaaguuuuuauaagaaucugauauggcuggugaaaaagggaaacagcuacccaaaacucucuaaguccuauaucaaugacaagggcaaagaaguauuaguucuguggggcauucaccaccccucaacgagcgcugaucaacagagucuuuaccagaacgccgacgcguacguguucgucgggucuucccgcuauagcaagaaauuuaagccugagaucgcaauucgaccaaaagugcgugaucaggagggaagaaugaauuacuauuggacuuugguggaacccggugacaagaucaccuucgaggccacaggcaaccuggucguuccuagguacgcuuuugccauggaacggaacgcagggucgggaauaauuaucucugauacuccagugcaugacugcaauaccacaugucaaaccccgaaaggcgcuguaaacacgucccuacccuuccagaauauucacccuaucacuaucgguaagugcccaaaguaugugaaaucaacaaagcuccgccuggccaccgggcuuagaaacguccccaguauucagagcaggggacuguuuggcgcgauagccggcuucaucgaagggggauggacugguaugguggacggcugguacggguaucaucaccagaaugaacaaggauccggcuacgcagcugauuugaaaucuacacagaacgccauugacgagaucaccaauaagguuaacagcgugauagagaaaaugaauacgcaguuuaccgcugucgguaaggaguucaaccaccucgagaagcggauugaaaaucugaacaaaaagguggaugacggguucuuagauaucuggacauacaaugccgagcugcucguacuucuggaaaacgagcgcacuuuggacuaucaugauucaaauguuaaaaaccuauacgagaaggugcgaagucagcugaaaaacaaugcaaaggaagucggcaacggauguuuugaguucuaucacaagugcgacaauaccuguauggaauccgugaaaaacggcacauacgauuauccuaaguacagcgaggaagccaaacucaauagagaggagaucgacggggucaagcuggaaucuacuaggauuuaucaaauccuugcuauuuacucaaccgcggcaaguagccugguguugguugugucccucggagccauaucuuuuuggaugugcucgaacgguagccugcagugccggaucuguauuuga

SEQ ID NO: 133887 - RNA, 1701 nt, Artificial Sequence; identical to SEQ ID NO: 130717
  derived and/or modified CDS sequence (opt3) from hemagglutinin__InfluenzaA__ADM86409

SEQ ID NO: 133888 - RNA, 1701 nt, Artificial Sequence; identical to SEQ ID NO: 130717
  derived and/or modified CDS sequence (opt3) from hemagglutinin__InfluenzaA__ADM86419

SEQ ID NO: 133889 - RNA, 1701 nt, Artificial Sequence; identical to SEQ ID NO: 132366
  derived and/or modified CDS sequence (opt3) from hemagglutinin__InfluenzaA__ADM86440

SEQ ID NO: 133890 - RNA, 1701 nt, Artificial Sequence; identical to SEQ ID NO: 130717
  derived and/or modified CDS sequence (opt3) from hemagglutinin__InfluenzaA__ADM86450

SEQ ID NO: 133891 - RNA, 1707 nt, Artificial Sequence
  derived and/or modified CDS sequence (opt3) from hemagglutinin__InfluenzaA__ADM95450
auggagaagaucgugcuccuguucgccauugucagccuuguuaaauccgaccagauaugcaucggcuaccacgcuaacaauucuaccgaacaaguggauacaauuauggagaagaacguaacugugacgcaugcacaggacauccuggaaaagacccacaaugggaaguugugugauuuagacggagucaaaccccugauucuaagagauugcucaguggccgguuggcuccugggcaacccuaugugugacgaguuuaucaauguuccagaauggaguuauauaguggagaaggcgaacccggucaaugaucuuugcuaccccggggacuucaacgauuaugaggaacugaagcauuugcucagcaggaucaaucacuuugagaaaauucagaucauuccuaaguccucuuggccaucgcaugaggcuucacugggagugagcgccgcaugucccuaccagggcaaaaguuccuucuuucggaacguaguuuggcugaucaagaaaaauaacacauauccuacuauaaagcgcucuuacaauaacaccaaucaagaagaccucuuagugaugugggguauucaccacccaaacgaugccgcugagcagacaaaccuguaucagaaucccaccacuuacaucagcgucgggacauccacccuuaaccagcgauugacgccucguauugcaacuagaucaaaggugaauggacaaaguggcaggauggaguucuuuuggaccauccugaaaccaaacgacgccaucaauuucgaaagcaacggcaauuuuauugcuccggaauacgccuauaagauagugaaaaagggggauucuacaaucaugaaauccgagcuagaauacggaaacugcaauacuaagugucagacccccaugggugcgauuaacucaagcaugccuuuccauaauauccacccacucacaauaggcgagugccccaaauaugucaagaguaaccggcugguucuugcaaccgggcugcgcaauucuccucagagagagggaaggcggaagaaacgcggcuuguuuggugccauugcuggguucaucgaaggaggcuggcagggcaugguggacgggugguacggauaucaucacuccaacgagcaagguagcggcuacgccgcagacaaggaaucgacgcagaaagcuaucgaugggguaacuaauaaggugaacucuauuaucgacaaaaugaacacacaguuugaggccgucggacgagaguucaauaaccucgaaagaaggauugagaaucugaacaagaagauggaagauggcuucuuagacguguggaccuauaaugcggagcugcucguucuuauggaaaacgagcggacucuggauuuucacgacuccaaugugaaaaacuuguacgauaagguccgucuacaacugcgcgacaaugccaaagaacucgguaacggguguuucgaguuuuaccauaagugcgauaaugaguguauggaaucagugagaaacggcacauaugacuacccacaguauagugaggaagcaaggcugaaacgggaggagauaagcggaguaaaacuugaauccaucggcauuuaccagauccugucuaucuauagcaccguugcuucaaguuuggcccucgcuauuaugguggccgggcuguccuuauggaugugcagcaauggaucucugcagugccgaauauguaucuga

SEQ ID NO: 133892 - RNA, 1701 nt, Artificial Sequence; identical to SEQ ID NO: 130717
  derived and/or modified CDS sequence (opt3) from hemagglutinin__InfluenzaA__ADM95745

SEQ ID NO: 133893 - RNA, 1701 nt, Artificial Sequence; identical to SEQ ID NO: 130717
  derived and/or modified CDS sequence (opt3) from hemagglutinin__InfluenzaA__ADM95746

SEQ ID NO: 133894 - RNA, 1701 nt, Artificial Sequence; identical to SEQ ID NO: 130717
  derived and/or modified CDS sequence (opt3) from hemagglutinin__InfluenzaA__ADM95747

SEQ ID NO: 133895 - RNA, 1701 nt, Artificial Sequence; identical to SEQ ID NO: 130717
  derived and/or modified CDS sequence (opt3) from hemagglutinin__InfluenzaA__ADM95749

SEQ ID NO: 133896 - RNA, 1701 nt, Artificial Sequence
  derived and/or modified CDS sequence (opt3) from hemagglutinin__InfluenzaA__ADM95750
augaaggccauccuggugguccuccuuuacaccuucgcuacagcaaacgccgacacucugugcauuggcuaucacgcgaauaacagcacggauaccguugacacaguguuggagaagaauguaacugugacccauuccuuuaacuuacuggaagauaagcacaaugggaaacuauguaagcucagaggagucgcuccccugcaucuugguaaaugcaacauagccggcuggauccuggggaauccugagugugaaucuuugucaacagcaaguagcugguccuacauuguggagaccucuucgucagacaacggaacuugcuauccaggcgauuucaucgacuacgaggagcucagggagcagcugagcaguguuuccucuuuugaacgguucgagauuuuuccgaagacaagcuccuggcccaaucacgauucaaacaagggugugaccgccgcuuguccucaugcaggggccaaaaguuucuauaagaaucugaucuggcucgucaaaaagggaagcucuuacccaaaauuauccaagucauauauaaacgacaagggcaaagaagugcugguacuuuggggcauccaccaccccagcacgagugcugaucaacagucuuuguaccagaaugccgacgcguacguuuuugugggguccagccgcuauucgaagaaauucaagccugagauugcaauccgaccaaaaguccgugaucaggagggaagaaugaacuacuauuggacucugguggaacccggugacaagauuaccuuugaggccacaggcaaucuaguggucccuagguacgcuuucgccauggaacggaacgcagggucuggaaucauaauuuccgauacuccaguucaugacugcaacaccacaugucaaaccccgaaaggcgcuaucaauacgucacuccccuuucagaacauucacccuaucacuaucgguaagugcccaaaguaugugaaaaguacaaagcugcgccuugccaccgggcugagaaauguacccagcauucaguccaggggauuguucggcgcgauagccggcuuuaucgaagggggauggacugguaugguggacggcugguacggguaucaucaccagaacgaacaaggaucuggcuacgcagcugaucucaaaagcacacagaaugccauugacgagaucaccaacaaggucaauucagugauagagaaaaugaacacgcaguucaccgcuguugguaaggaguucaaucaccuggaaaagcggauugaaaacuuaaauaaaaagguggaugacggguuucuggauaucuggacauacaacgccgagcuccuuguccuguuggaaaaugagcgcacucuagacuaucaugauaguaacgugaaaaaucuguacgagaagguacgaucccagcucaaaaacaacgcaaaggaaaucggcaauggauguuucgaguuuuaucacaagugcgacaacaccuguauggaaagcguuaaaaauggcacauacgauuauccuaaguacucugaggaagccaaacugaacagagaggagauugacggggugaaacuugaaucaacuaggaucuaucaaauucuggcuauauacaguaccgucgcgagcuccuuggugcucgucgugucucugggagcaaucucguucuggaugugcagcaaugguuccuuacagugccggauuuguaucuga

SEQ ID NO: 133897 - RNA, 1701 nt, Artificial Sequence; identical to SEQ ID NO: 130717
  derived and/or modified CDS sequence (opt3) from hemagglutinin__InfluenzaA__ADM95751

SEQ ID NO: 133898 - RNA, 1701 nt, Artificial Sequence; identical to SEQ ID NO: 130717
  derived and/or modified CDS sequence (opt3) from hemagglutinin__InfluenzaA__ADM95752

SEQ ID NO: 133899 - RNA, 1701 nt, Artificial Sequence; identical to SEQ ID NO: 130717
  derived and/or modified CDS sequence (opt3) from hemagglutinin__InfluenzaA__ADM95753

SEQ ID NO: 133900 - RNA, 1701 nt, Artificial Sequence; identical to SEQ ID NO: 130717
  derived and/or modified CDS sequence (opt3) from hemagglutinin__InfluenzaA__ADM95754

SEQ ID NO: 133901 - RNA, 1701 nt, Artificial Sequence; identical to SEQ ID NO: 130717
  derived and/or modified CDS sequence (opt3) from hemagglutinin__InfluenzaA__ADM95755

SEQ ID NO: 133902 - RNA, 1701 nt, Artificial Sequence; identical to SEQ ID NO: 130897
  derived and/or modified CDS sequence (opt3) from hemagglutinin__InfluenzaA__ADM95757

SEQ ID NO: 133903 - RNA, 1701 nt, Artificial Sequence; identical to SEQ ID NO: 130717
  derived and/or modified CDS sequence (opt3) from hemagglutinin__InfluenzaA__ADM95758

SEQ ID NO: 133904 - RNA, 1701 nt, Artificial Sequence
  derived and/or modified CDS sequence (opt3) from hemagglutinin__InfluenzaA__ADM95759
augaaggccauccuggugguccuccuuuacaccuucgcuacagcaaacgccgacacucugugcauuggcuaucacgcgaauaacagcacggauaccguugacacaguguuggagaagaauguaacugugacccauuccgucaacuuacuggaagauaagcacaaugggaaacuauguaagcucagaggaguggcuccccugcaucuugguaaaugcaacauagccggcuggauccuggggaauccugagugugaaucuuugucaacagcaaguagcugguccuacauuguugagaccucuucgucagacuauggaacuugcuacccaggcgauuuuaucgacuaugaggagcucagggagcagcugagcaguguguccucuuucgaacgguuugagauuuucccgaagacaagcuccuggcccaaccacgauucaaauaagggugucaccgccgcuuguccucaugcaggggccaaaaguuuuuacaagaaccugaucuggcucgugaaaaagggaaauagcuauccaaaauuaucuaaguccuacauaaacgacaagggcaaagaaguacugguucuuuggggcauccaccaccccucaacgagcgcugaucaacagaguuuguaccagaaugccgacgcguauguguucgucgggacuucucgcuacuccaagaaauuuaagccugagauugcaauccgaccaaaagugcgugaucaggagggaagaaugaacuauuacuggacccugguggaacccggugacaagauuacauucgaggccacuggcaaucuagucguuccuagguaugcuuuugccauggaacggaacgcagggagcggaaucauaauuucggauaccccagugcaugacugcaacacaaccugucaaacgccgaaaggcgcuaucaauacuucucuccccuuccagaacauucacccuaucacaaucgguaagugcccaaaguacguaaaauccaccaagcugcgccuugccacugggcugagaaaugugcccucaauucagaguaggggauuguuuggcgcgauagccggcuucaucgaagggggauggacagguauggucgacggcugguauggguaccaucaccagaacgaacaaggaagcggcuacgcagcugaucucaaauccacccagaaugccauugacgagaucacgaacaagguaaauucuguuauagagaaaaugaacacccaguuuacagcuguggguaaggaguucaaucaccuggaaaagcggauugaaaacuuaaauaaaaaggucgaugacggguuccuggauaucuggacuuauaacgccgagcuccuugugcuguuggaaaaugagcgcacccuagacuaccaugauagcaacgugaaaaaucuguaugagaagguucgaucacagcucaaaaacaacgcaaaggaaaucggcaauggauguuuugaguucuaccacaagugcgacaacacauguauggaaagugugaaaaauggcacuuaugauuacccuaaguauuccgaggaagccaaacugaacagagaggagauugacggggucaaacuugaaagcaccaggaucuaccaaauucuggcuauauacucuacaguggcgucaaguuugguccucgugguuagccugggagcaaucuccuuuuggaugugcucuaaugguucguuacagugccggauuuguaucuga

SEQ ID NO: 133905 - RNA, 1701 nt, Artificial Sequence; identical to SEQ ID NO: 130704
  derived and/or modified CDS sequence (opt3) from hemagglutinin__InfluenzaA__ADM95760

SEQ ID NO: 133906 - RNA, 1701 nt, Artificial Sequence; identical to SEQ ID NO: 130717
  derived and/or modified CDS sequence (opt3) from hemagglutinin__InfluenzaA__ADM95761

SEQ ID NO: 133907 - RNA, 1701 nt, Artificial Sequence
  derived and/or modified CDS sequence (opt3) from hemagglutinin__InfluenzaA__ADM95763
augaaggccauccuggugguccuccuuuacaccuucgcuacagcaaacgccgacacucugugcauuggcuaucacgcgaauaacagcacggauaccguugacacaguguuggagaaaaauguaacugugacccauuccgucaacuuacuggaagauaagaauaacgggaaacuauguaagcucagaggaguggcuccccugcaccuugguaaaugcaauauagccggcuggauccuggggaacccugagugugaaucuuugucaacagcaaguagcugguccuacauuguugagaccucuucgucagacaauggaacuugcuauccaggcgauuuuaucgacuacgaggagcucagggagcagcugagcaguguguccucuuucgaacgguuugagauuuucccgaagacaagcuccuggcccaaccaugauucaaauaagggugucaccgccgcuuguccucacgcaggggccaaaaguuuuuauaagaaccugaucuggcucgugaaaaagggaaauagcuacccaaaauuaucuaaguccuauauaaacgacaagggcaaagaaguacugguucuuuggggcauccaucaccccucaacgagcgcugaucaacagaguuuguaccagaaugccgacgcguacguguucgucgggucuucccgcuauagcaagaaauuuaagccugagauugcaauccgaccaaaagugcgugaucaggagggaagaaugaacuacuauuggacucugguggaacccggugacaagauuaccuucgaggccacaggcaaccuagucguuccuagguacgcuuuugccauggaacggaaugcagggucgggaaucauaauuucugauacuccagugcacgacugcaacaccacaugucaaaccccgaaaggcgcuaucaauacgucccuccccuuccagaacauucauccuaucacuaucgguaagugcccaaaguauguaaaaucaacaaagcugcgccuugccaccgggcugagaaaugugcccaguauucagagcaggggauuguuuggcgcgauagccggcuucaucgaagggggauggacugguauggucgacggcugguacggguaucaccaucagaacgaacaaggauccggcuacgcagcugaucucaaaucuacacagaaugccauugacgagaucaccaacaaggugaauagcguuauagagaaaaugaacacgcaguuuaccgcuguggguaaggaguucaaucaccuggaaaagcggauugaaaacuuaaauaaaaaggucgaugacggguuccuggauaucuggacauacaacgccgagcuccuugugcuguuggaaaaugagcgcacucuagacuaucacgauucaaacguaaagaaccuguacgagaagguucgaagucagcucaaaaauaacgcaaaggaaaucggcaauggauguuuugaguucuaucauaagugcgacaacaccuguauggaauccgugaaaaauggcacauacgauuauccuaaguacagcgaggaagccaaacugaacagagaggagauugacggggucaaacuugaaucuacuaggaucuaucaaauucuggcuauauacucaaccguggcgaguagcuugguccucgugguuucccugggagcaaucucuuuuuggaugugcucgaaugguagcuuacagugccggauuuguaucuga

SEQ ID NO: 133908 - RNA, 1701 nt, Artificial Sequence; identical to SEQ ID NO: 130717
  derived and/or modified CDS sequence (opt3) from hemagglutinin__InfluenzaA__ADM95764

SEQ ID NO: 133909 - RNA, 1701 nt, Artificial Sequence; identical to SEQ ID NO: 130717
  derived and/or modified CDS sequence (opt3) from hemagglutinin__InfluenzaA__ADM95765

SEQ ID NO: 133910 - RNA, 1701 nt, Artificial Sequence; identical to SEQ ID NO: 130717
  derived and/or modified CDS sequence (opt3) from hemagglutinin__InfluenzaA__ADM95767

SEQ ID NO: 133911 - RNA, 1701 nt, Artificial Sequence; identical to SEQ ID NO: 131560
  derived and/or modified CDS sequence (opt3) from hemagglutinin__InfluenzaA__ADM95768

SEQ ID NO: 133912 - RNA, 1701 nt, Artificial Sequence; identical to SEQ ID NO: 131070
  derived and/or modified CDS sequence (opt3) from hemagglutinin__InfluenzaA__ADM95769

SEQ ID NO: 133913 - RNA, 1701 nt, Artificial Sequence; identical to SEQ ID NO: 132833
  derived and/or modified CDS sequence (opt3) from hemagglutinin__InfluenzaA__ADM95771

SEQ ID NO: 133914 - RNA, 1701 nt, Artificial Sequence; identical to SEQ ID NO: 130717
  derived and/or modified CDS sequence (opt3) from hemagglutinin__InfluenzaA__ADM95772

SEQ ID NO: 133915 - RNA, 1701 nt, Artificial Sequence; identical to SEQ ID NO: 130717
  derived and/or modified CDS sequence (opt3) from hemagglutinin__InfluenzaA__ADM95774

SEQ ID NO: 133916 - RNA, 1701 nt, Artificial Sequence; identical to SEQ ID NO: 130717
  derived and/or modified CDS sequence (opt3) from hemagglutinin__InfluenzaA__ADM95775

SEQ ID NO: 133917 - RNA, 1701 nt, Artificial Sequence; identical to SEQ ID NO: 131070
  derived and/or modified CDS sequence (opt3) from hemagglutinin__InfluenzaA__ADM95776

SEQ ID NO: 133918 - RNA, 1701 nt, Artificial Sequence; identical to SEQ ID NO: 131070
  derived and/or modified CDS sequence (opt3) from hemagglutinin__InfluenzaA__ADM95778

SEQ ID NO: 133919 - RNA, 1701 nt, Artificial Sequence
  derived and/or modified CDS sequence (opt3) from hemagglutinin__InfluenzaA__ADM95779
augaaggccauccuggugguccuccuuuacaccuucgcuacagcaaacgccgacacucugugcauuggcuaucacgcgaauaacagcacggauaccguugacacaguguuggagaagaauguaacugugacccauuccgucaacuuacuggaagauaagcacaaugggaaacuauguaagcucagaggaguggcuccccugcaucuugguaaaugcaacauagccggcuggauccuggggaauccugagugugaaucuuugucaacagcaaguagcugguccuacauuguugagaccucuucgucagacaacggaacuugcuauccaggcgauuuuaucgacuacgaggagcucagggagcagcugagcaguguguccucuuucgaacgguuugagauuuucccgaagacaagcuccuggcccaaucacgauucaaacaagggugucaccgccgcuuguccucaugcaggggccaaaaguuuuuauaagaaucugaucuggcucgugaaaaagggaaacagcuacccaaaauuaucuaaguccuauauaaaugacaagggcaaagaaguacugguucuuuggggcauccaccaccccucaacgagcgcugaucaacagaguuuguaccagaacgccgacgcguacguguucgucgggacuucucgcuauuccaagaaauuuaagccugagauugcaauccgaccaaaagugcgugaucaggagggaagaaugaauuacuauuggacccugguggaacccggugacaagauuacauucgaggccacuggcaaccuagucguuccuagguacgcuuuugccauggaacggaacgcagggagcggaaucauaauuucggauaccccagugcaugacugcaauacaaccugucaaacgccgaaaggcgcuaucaacacuucucuccccuuccagaauauucacccuaucacaaucgguaagugcccaaaguauguaaaauccaccaagcugcgccuugccacugggcugagaaacauucccucaauacagaguaggggauuguuuggcgcgaucgccggcuucauugaagggggauggacagguaugguggacggcugguacggguaucaucaccagaaugaacaaggaagcggcuacgcagcugaucucaaauccacccagaacgccaucgacgagauaacgaauaaggucaacucugugauugagaaaaugaauacccaguuuacagcuguugguaaggaguucaaccaccuggaaaagcggaucgaaaauuuaaacaaaaagguggaugacggguuccuggauaucuggacuuacaaugccgagcuccuuguccuguuggaaaacgagcgcacccuagacuaucaugauagcaaugugaaaaaccuguacgagaagguacgaucacagcucaaaaacaaugcaaaggaaauuggcaacggauguuuugaguucuaucacaagugcgacaauacauguauggaaaguguuaaaaacggcacuuacgauuauccuaaguacuccgaggaagccaaacugaauagagaggagaucgacggggugaaacuugaaccaaccaggauuuaucaaauacuggcuaucuacagcacagucgcgucuucauuggugcucgucgugagucugggagcaauuagcuuuuggaugugcuccaacgguucuuuacagugccggaucuguaucuga

SEQ ID NO: 133920 - RNA, 1701 nt, Artificial Sequence; identical to SEQ ID NO: 131070
  derived and/or modified CDS sequence (opt3) from hemagglutinin__InfluenzaA__ADM95780

SEQ ID NO: 133921 - RNA, 1701 nt, Artificial Sequence; identical to SEQ ID NO: 131560
  derived and/or modified CDS sequence (opt3) from hemagglutinin__InfluenzaA__ADM95783

SEQ ID NO: 133922 - RNA, 1701 nt, Artificial Sequence; identical to SEQ ID NO: 130717
  derived and/or modified CDS sequence (opt3) from hemagglutinin__InfluenzaA__ADM95784

SEQ ID NO: 133923 - RNA, 1701 nt, Artificial Sequence; identical to SEQ ID NO: 130717
  derived and/or modified CDS sequence (opt3) from hemagglutinin__InfluenzaA__ADM95785

SEQ ID NO: 133924 - RNA, 1701 nt, Artificial Sequence
  derived and/or modified CDS sequence (opt3) from hemagglutinin__InfluenzaA__ADM95786
augaaggccauccuggugguccuccuuuacaccuucgcuacagcaaacgccgacacucugugcauuggcuaucacgcgaauaacagcacggauaccguugacacaguguuggagaaaaauguaacugugacccauuccgucaacuuacuggaagauaagcacaaugggaaacuauguaagcucagaggaguggcuccccugcaucuugguaaaugcaacauagccggcuggauccuggggaauccugagugugaaucuuugucaacagcaaguagcugguccuacauuguugagaccucuucgucagacaacggaacuugcuauccaggcgauuuuaucgacuacgaagaacucagggagcagcugagcaguguguccucuuucgaacgguuugagauuuucccgaagacaagcuccuggcccaaucacgauucaaacaagggugucaccgccgcuuguagucaugcaggggccaagagcuuuuauaagaaucugaucuggcucgugaaaaagggaaacucuuacccuaaauuauccaagucauauauaaaugacaagggcaaagaaguacugguucuuuggggcauccaccacccaagcacgagugcugaucaacagucuuuguaccagaacgccgacgcguacguguucgucgggacuucccgcuauagcaagaaauuuaagcccgagauugcaauccgaccuaaagugcgugagcaggaaggaagaaugaauuacuauuggacccugguggagccaggugauaagauuacauucgaagccacuggcaaccuagucguucccagguacgcuuuugccauggagcggaacgcagggucgggaaucauaauuucugacaccccugugcaugauugcaauacaaccugucaaacgccaaaaggcgcuaucaacacuucccucccguuccagaauauucaccccaucacaaucgguaagugcccuaaguauguaaaaucaaccaagcugcgccuugccacugggcugagaaacgugccaaguauucagagcaggggauuguuuggcgcgauagccggcuucaucgaagggggauggacagguauggucgacggcugguacggguaucaucaccagaaugagcaaggauccggcuacgcagcugaccucaaaucuacccagaacgccauugaugagaucacgaauaaggugaacagcguuauagagaaaaugaauacccaguuuacagcuguggguaaggaguucaaccaccuggaaaagcggauugagaauuuaaacaaaaaggucgacgauggguuccuggacaucuggacuuacaaugccgaacuccuugugcuguuggagaacgagcgcacccuagauuaucaugacucaaauguuaaaaaccuguacgaaaagguacgaagucagcucaaaaacaaugcaaaggagaucggcaacggauguuuugaguucuaucacaagugcgauaauacauguauggaauccgugaaaaacggcacuuacgacuaucccaaguacagcgaagaggccaaacugaauagagaggaaauugauggggucaaacuugagucuaccaggaucuaucaaauucuggcuauauacucaacaguggcgaguagcuugguccucgugguuucccugggagcaaucucuuuuuggaugugcucgaacgguagcuuacagugccggauuuguaucuga

SEQ ID NO: 133925 - RNA, 1701 nt, Artificial Sequence; identical to SEQ ID NO: 131070
  derived and/or modified CDS sequence (opt3) from hemagglutinin__InfluenzaA__ADM95788

SEQ ID NO: 133926 - RNA, 1701 nt, Artificial Sequence; identical to SEQ ID NO: 131070
  derived and/or modified CDS sequence (opt3) from hemagglutinin__InfluenzaA__ADM95789

SEQ ID NO: 133927 - RNA, 1701 nt, Artificial Sequence
  derived and/or modified CDS sequence (opt3) from hemagglutinin__InfluenzaA__ADM95790
augaaggccauccuggugguccuccuuuacaccuucgcuacagcaaacgccgacacucugugcauuggcuaucacgcgaauaacagcacggauaccguugacacaguguuggagaagaauguaacugugacccauuccgucaacuuacuggaagauaagcacaaugggaaacuauguaagcucagaggaguggcuccccugcaucuugguaaaugcaacauagccggcuggauccuggggaauccugagugugaaucuuugucaacagcaaguagcugguccuacauuguugagaccucuucgucagacaacggaacuugcuauccaggcgauuuuaucgacuacgaggagcucagggagcagcugagcaguguguccucuuucgaacgguuugagauuuucccgaagacaagcuccuggcccaaucacgauucaaacaagggugucaccgccgcuuguccucaugcaggggccaaaaguuuuuauaagaaucugaucuggcucgugaaaaagggaaacagcuacccaaaauuacgcaagucuuauauaaaugacaagggcaaagaaguacugguucuuuggggcauccaccaccccuccacgucagcugaucaacagagcuuguaccagaacgccgacgcguacguguucgucgggaccagucgauauucuaagaaauuuaagccugagauugcaauccguccaaaagugagagaucaggagggaaggaugaauuacuauuggacucugguggaacccggugacaagauuacauucgaggccacuggcaaccuagucguuccucgguacgcuuuugccauggaacgcaacgcaggguccggaaucauaauuagcgauaccccagugcaugacugcaauacaaccugucaaacgccgaaaggcgcuaucaacacuucgcuccccuuccagaauauucacccuaucacaaucgguaagugcccaaaguauguaaaaucuaccaagcugagacuugccacugggcugaggaacauucccuccauacagucacggggauuguuuggcgcgaucgccggcuucauugaagggggauggacagguaugguggacggcugguacggguaucaucaccagaaugaacaaggaaguggcuacgcagcugaucucaaaagcacccagaacgccaucgacgagauaacgaauaaggucaacuccgugauugagaaaaugaauacccaguuuacagcuguugguaaggaguucaaccaccuggaaaagcgcaucgaaaauuuaaacaaaaagguggaugacggguuccuggauaucuggacuuacaaugccgagcuccuuguccuguuggaaaacgagcgaacccuagacuaucaugauucuaaugugaaaaaccuguacgagaagguaagaagccagcucaaaaacaaugcaaaggaaauuggcaacggauguuuugaguucuaucacaagugcgacaauacauguauggaaucaguuaaaaacggcacuuacgauuauccuaaguacagugaggaagccaaacugaauagggaggagaucgacggggugaaacuugaauccacccggauuuaucaaauacuggcuaucuacagcacagucgcgucuucauuggugcucgucgugagucugggagcaauuagcuuuuggaugugcuccaacgguucuuuacagugccguaucuguaucuga

SEQ ID NO: 133928 - RNA, 1701 nt, Artificial Sequence; identical to SEQ ID NO: 133927
  derived and/or modified CDS sequence (opt3) from hemagglutinin__InfluenzaA__ADM95791

SEQ ID NO: 133929 - RNA, 1701 nt, Artificial Sequence; identical to SEQ ID NO: 133927
  derived and/or modified CDS sequence (opt3) from hemagglutinin__InfluenzaA__ADM95792

SEQ ID NO: 133930 - RNA, 1701 nt, Artificial Sequence; identical to SEQ ID NO: 133314
  derived and/or modified CDS sequence (opt3) from hemagglutinin__InfluenzaA__ADM95793

SEQ ID NO: 133931 - RNA, 1701 nt, Artificial Sequence; identical to SEQ ID NO: 131070
  derived and/or modified CDS sequence (opt3) from hemagglutinin__InfluenzaA__ADM95794

SEQ ID NO: 133932 - RNA, 1701 nt, Artificial Sequence; identical to SEQ ID NO: 130717
  derived and/or modified CDS sequence (opt3) from hemagglutinin__InfluenzaA__ADM95795

SEQ ID NO: 133933 - RNA, 1701 nt, Artificial Sequence; identical to SEQ ID NO: 131819
  derived and/or modified CDS sequence (opt3) from hemagglutinin__InfluenzaA__ADM95798

SEQ ID NO: 133934 - RNA, 1701 nt, Artificial Sequence
  derived and/or modified CDS sequence (opt3) from hemagglutinin__InfluenzaA__ADM95799
augaaggccauccuggugguccuccuuuacaccuucgcuacagcaaacgccgacacucugugcauuggcuaucacgcgaauaacagcacggauaccguugacacaguguuggagaaaaauguaacugugacccauuccgucaacuuacuggaagauaagcacaaugggaaacuauguaagcucagaggaguggcuccccugcaucuugguaaaugcaacauagccggcuggauccuggggaauccugagugugaaucuuugucaacagcaaguagcugguccuacauuguugagaccucuucgucagacaacggaacuugcuauccaggcgauuuuaucgacuacgaagaacucagggagcagcugagcaguguguccucuuucgaacgguuugagauuuucccgaagacaagcuccuggcccaaucacgauucaaacaagggugucaccgccgcuuguccucaugcaggggccaaaaguuuuuauaagaaucugaucuggcucgugaaaaagggaaacagcuacccaaaauuaucuaaguccuauauaaaugacaagggcaaagaaguacugguucuuuggggcauccaccaccccucaacgagcgcugaucaacagaguuuguaccagaacgccgacgcguacguguucgucgggacuucucgcuauuccaagaaauuuaagccugagauugcaauccgaccaaaagugcgugaucaggagggaagaaugaauuacuauuggacccugguggaacccggugacaagauuacauucgaggccacuggcaaccuagucguuccuagguacgcuuuugccauggaacggaacgcagggagcggaaucauaauuucggauaccccagugcaugacugcaauacaaccugucaaacgccgaaaggcgcuaucaacacuucucuccccuuccagaauauucacccuaucacaaucgguaagugcccaaaguauguaaaauccaccaagcugcgccuugccacugggcugagaaacgugcccucaauucagaguaggggauuguuuggcgcgauagccggcuucaucgaagggggauggacagguauggucgacggcugguacggguaucaucaccagaaugaacaaggaagcggcuacgcagcugaucucaaauccacccagaacgccauugacgagaucacgaauaaggugaacucuguuauagagaaaaugaauacccaguuuacagcuguggguaaggaguucaaccaccuggagaagcggauugaaaauuuaaacaaaaaggucgaugacggguuccuggauaucuggacuuacaaugccgagcuccuugugcuguuggaaaacgagcgcacccuagacuaucaugauagcaauguaaagaaccuguacgagaagguucgaucacagcucaaaaacaaugcaaaggaaaucgagaacggcuguuuugaguucuaucacaagugcgacaauacauguauggagagugugaaaaacggaacuuacgauuauccuaaguacuccgaagaggccaaacugaauagagaggaaauugacggcgucaaacuugagagcaccaggaucuaucaaauucuggcuauauacucuacaguggcgucaaguuugguccucgugguuagccugggggcaaucuccuuuuggaugugcucuaacggaucguuacagugccggauuuguaucuga

SEQ ID NO: 133935 - RNA, 1701 nt, Artificial Sequence
  derived and/or modified CDS sequence (opt3) from hemagglutinin__InfluenzaA__ADM95800
augaaggccauccuggugguccuccuuuacaccuucgcuacagcaaacgccgacacucugugcauuggcuaucacgcgaauaacagcacggauaccguugacacaguguuggagaaaaauguaacugugacccauuccgucaacuuacuggaagauaagcacaaugggaaacuauguaagcucagaggaguggcuccccugcaucuugguaaaugcaacauagccggcuggauccuggggaauccugagugugaaucuuugucaacagcaaguagcugguccuacauuguugagaccucuucgucagacaacggaacuugcuauccaggcgauuuuaucgacuacgaagaacucagggagcagcugagcaguguguccucuuucgaacgguuugagauuuucccgaagacaagcuccuggcccaaucacgauucaaacaagggugucaccgccgcuuguccucaugcaggggccaaaaguuuuuauaagaaucugaucuggcucgugaaaaagggaaacagcuacccaaaauuaucuaaguccuauauaaaugacaagggcaaagaaguacugguucuuuggggcauccaccaccccucaacgagcgcugaucaacagaguuuguaccagaacgccgacgcguacguguucgucgggacuucucgcuauuccaagaaauuuaagccugagauugcaauccgaccaaaagugcgugaucaggagggaagaaugaauuacuauuggacccugguggcccccggugacaagauuacauucgaagcuacuggcaaccuagucguuccuagguacgccuuugcaauggagcggaacgcugggagcggaaucauaauuucggauaccccagugcaugacugcaauacaaccugucaaacgccgaaaggcgccaucaacacuucucuccccuuccagaauauucacccuaucacaaucgguaagugcccaaaguauguaaaauccaccaagcugcgccuugcgacugggcugagaaacgugcccucaauucagaguaggggauuguuuggcgccauagcaggcuucaucgaagggggauggacagguauggucgacggcugguacggguaucaucaccagaaugagcaaggaagcggcuacgcugccgaucucaaauccacccagaacgcuauugacgaaaucacgaauaaggugaacucuguuauagagaaaaugaauacccaguuuacagccguggguaaggaguucaaccaccuggaaaagcggauugagaauuuaaacaaaaaggucgaugacggguuccuggauaucuggacuuacaaugcagaacuccuugugcuguuggagaacgaacgcacccuagacuaucaugauagcaauguaaagaaccuguacgagaagguucgaucacagcucaaaaacaaugccaaggagaucggcaacggauguuuugaguucuaucacaagugcgacaauacauguauggagagugugaaaaacggcacuuacgauuauccuaaguacuccgaagaggcuaaacugaauagagaagagauugacggggucaaacuugagagcaccaggaucuaucaaauucuggcgauauacucuacaguggcaucaaguuugguccucgugguuagccugggagccaucuccuuuuggaugugcucuaacgguucguuacagugccggauuuguaucuga

SEQ ID NO: 133936 - RNA, 1701 nt, Artificial Sequence; identical to SEQ ID NO: 131070
  derived and/or modified CDS sequence (opt3) from hemagglutinin__InfluenzaA__ADM95801

SEQ ID NO: 133937 - RNA, 1701 nt, Artificial Sequence; identical to SEQ ID NO: 131070
  derived and/or modified CDS sequence (opt3) from hemagglutinin__InfluenzaA__ADM95802

SEQ ID NO: 133938 - RNA, 1701 nt, Artificial Sequence; identical to SEQ ID NO: 133924
  derived and/or modified CDS sequence (opt3) from hemagglutinin__InfluenzaA__ADM95803

SEQ ID NO: 133939 - RNA, 1701 nt, Artificial Sequence
  derived and/or modified CDS sequence (opt3) from hemagglutinin__InfluenzaA__ADM95804
augaaggccauccuggugguccuccuuuacaccuucgcuacagcaaacgccgacacucugugcauuggcuaucacgcgaauaacagcacggauaccguugacacaguguuggagaaaaauguaacugugacccauuccgucaacuuacuggaagauaagcacaaugggaaacuauguaagcucagaggaguggcuccccugcaucuugguaaaugcaacauagccggcuggauccuggggaauccugagugugaaucuuugucaacagcaaguagcugguccuacauuguugagaccucuucgucagacaacggaacuugcuauccaggcgauuuuaucgacuacgaggagcucagggagcagcugagcaguguguccucuuucgaacgguuugagauuuucccgaagacaagcuccuggcccaaucacgauucaaacaagggugucaccgccgcuuguccucaugcaggggccaaaaauuuuuauaagaaccugaucuggcucgugaaaaagggaaauaguuacccaaaauuaagcaagucuuauauaaacgacaagggcaaagaaguacugguucuuuggggcauccaccaccccuccacgucagcugaucaacagagcuuguaccagaaugccgacgcguacguguucgucgggaccagucgcuauucuaagaaauuuaagccugagauugcaauccgaccaaaagugcgugaucaggagggaagaaugaacuacuauuggacucugguggaacccggugacaagauuacauucgaggccacuggcaaccuagucguuccuagguacgcuuuugccauggaacggaaugcaggguccggaaucauaauuagcgauaccccagugcaugacugcaacacaaccugucaaacgccgaaaggcgcuaucaauacuucgcuccccuuccagaacauucacccuaucacaaucgguaagugcccaaaguauguaaaaucuaccaagcugcgccuugccacugggcugagaaaugugcccuccauucagucaaggggauuguuuggcgcgauagccggcuucaucgaagggggauggacagguauggucgacggcugguacggguaucaucaccagaacgaacaaggaaguggcuacgcagcugaucucaaaagcacccagaaugccauugacgagaucacgaacaagguaaauuccguuauagagaaaaugaacacccaguuuacagcuguggguaaggaguucaaucaccuggaaaagcggauugaaaacuuaaauaaaaaggucgaugacggguuccuggauaucuggacuuacaacgccgagcuccuugugcuguuggaaaaugagcgcacccuagacuaucaugauucuaacgugaaaaagcuguacgagaaaguucgaagccagcucaagaacaaugcaaaggaaaucggcaacggauguuuugaguucuaucacaaaugcgacaauacauguauggaaucagugaagaacggcacuuacgauuauccuaaauacagugaggaagccaagcugaauagagaggagauugacggggucaaacuugaauccaccaggaucuaucaaauucuggcuauauacagcacaguggcgucuucauugguccucgugguuagucugggagcaaucagcuuuuggaugugcuccaacgguucuuuacagugccggauuuguaucuga

SEQ ID NO: 133940 - RNA, 1701 nt, Artificial Sequence; identical to SEQ ID NO: 132399
  derived and/or modified CDS sequence (opt3) from hemagglutinin__InfluenzaA__ADM95805

SEQ ID NO: 133941 - RNA, 1701 nt, Artificial Sequence; identical to SEQ ID NO: 131818
  derived and/or modified CDS sequence (opt3) from hemagglutinin__InfluenzaA__ADM95808

SEQ ID NO: 133942 - RNA, 1701 nt, Artificial Sequence; identical to SEQ ID NO: 131818
  derived and/or modified CDS sequence (opt3) from hemagglutinin__InfluenzaA__ADM95809

SEQ ID NO: 133943 - RNA, 1701 nt, Artificial Sequence; identical to SEQ ID NO: 131818
  derived and/or modified CDS sequence (opt3) from hemagglutinin__InfluenzaA__ADM95810

SEQ ID NO: 133944 - RNA, 1701 nt, Artificial Sequence
  derived and/or modified CDS sequence (opt3) from hemagglutinin__InfluenzaA__ADM95812
augaaggccauccuggugguccuccuuuacaccuucgcuacagcaaacgccgacacucugugcauuggcuaucacgcgaauaacagcacggauaccguugacacaguguuggagaaaaauguaacugugacccauuccgucaacuuacuggaagauaagcacaaugggaaacuauguaagcucagaggaguggcuccccugcaucuugguaaaugcaacauagccggcuggauccuggggaauccugagugugaauugcucucuacagcaucaaguuggagcuacauuguugagaccuccucuucggacaacggaacuugcuauccaggcgauuuuaucgacuacgaggagcugagggagcagcugucaagcgugaguuccuucgaacgguuugagauuuucccgaagacaucuagcuggcccaaucacgauuccaacaagggugucaccgccgcuuguccucaugcaggggccaaaucauuuuauaagaaucucaucugguuagugaaaaagggaaacaguuacccaaaacugagcaagucuuauauaaaugacaagggcaaagaaguacuuguuuuguggggcauccaccaccccuccacgucagcugaucaacagagccuguaccagaacgccgacgcguacguguucgucgggaccagucgcuauucuaagaaauuuaagccugagauugcaauccgaccaaaagugcgugaucaggagggaagaaugaauuacuauuggacucuaguggaacccggugacaagauuacauucgaggccacuggcaaccucgucguuccuagguacgcuuuugccauggaacggaacgcaggguccggaaucauaauuagcgauaccccagugcaugacugcaauacaaccugucaaacgccgaaaggcgcuaucaacacuucgcugcccuuccagaauauucacccuaucacaaucgguaagugcccaaaguauguaaaaucuaccaaacuucgccuggccacuggguugagaaacgugcccuccauucagucaaggggacucuuuggcgcgauagccggcuucaucgaagggggauggacagguauggucgacggcugguacggguaucaucaccagaaugaacaaggaaguggcuacgcagcugaucugaaaagcacccagaacgccauugacgagaucacgaauaaggugaacuccguuauagagaaaaugaauacccaguuuacagcuguggguaaggaguucaaccacuuagaaaagcggauugaaaaucugaacaaaaaggucgaugacggguuccucgauaucuggacuuacaaugccgagcuucugguguugcuagaaaacgagcgcacccuggacuaucaugauucuaauguaaagaaccucuacgagaagguucgaagccagcugaaaaacaaugcaaaggaaaucggcaacggauguuuugaguucuaucacaagugcgacaauacauguauggaaucagugaaaaacggcacuuacgauuauccuaaguacagugaggaagccaaacuuaauagagaggagauugacggggucaagcuggaauccaccaggaucuaucaaauuuuggcuauauacagcacaguggcgucuucacucguccuggugguuaguuuaggagcaaucagcuuuuggaugugcuccaacgguucucugcagugccggauuuguaucuga

SEQ ID NO: 133945 - RNA, 1701 nt, Artificial Sequence; identical to SEQ ID NO: 133314
  derived and/or modified CDS sequence (opt3) from hemagglutinin__InfluenzaA__ADM95816

SEQ ID NO: 133946 - RNA, 1701 nt, Artificial Sequence; identical to SEQ ID NO: 133314
  derived and/or modified CDS sequence (opt3) from hemagglutinin__InfluenzaA__ADM95819

SEQ ID NO: 133947 - RNA, 1701 nt, Artificial Sequence; identical to SEQ ID NO: 132399
  derived and/or modified CDS sequence (opt3) from hemagglutinin__InfluenzaA__ADM95820

SEQ ID NO: 133948 - RNA, 1701 nt, Artificial Sequence; identical to SEQ ID NO: 133314
  derived and/or modified CDS sequence (opt3) from hemagglutinin__InfluenzaA__ADM95821

SEQ ID NO: 133949 - RNA, 1701 nt, Artificial Sequence; identical to SEQ ID NO: 131818
  derived and/or modified CDS sequence (opt3) from hemagglutinin__InfluenzaA__ADM95822

SEQ ID NO: 133950 - RNA, 1701 nt, Artificial Sequence; identical to SEQ ID NO: 131818
  derived and/or modified CDS sequence (opt3) from hemagglutinin__InfluenzaA__ADM95823

SEQ ID NO: 133951 - RNA, 1701 nt, Artificial Sequence
  derived and/or modified CDS sequence (opt3) from hemagglutinin__InfluenzaA__ADM95824
augaaggccauccuggugguccuccuuuacaccuucgcuacagcaaacgccgacacucugugcauuggcuaucacgcgaauaacagcacggauaccguugacacaguguuggagaaaaauguaacugugacccauuccgucaacuuacuggaagauaagcacaaugggaaacuauguaagcucagaggaguggcuccccugcaucuugguaaaugcaacauagccggcuggauccuggggaauccugagugugaaucuuugucaacagcaaguagcugguccuacauuguugagaccucuucgucagacaacggaacuugcuauccaggcgauuuuaucgacuacgaggagcucagggagcagcugagcaguguguccucuuucgaacgguuugagauuuucccgaagacaagcuccuggcccaaucacgauucaaacaagggugucaccgccgcuuguccucaugcaggggccaaaaguuuuuauaagaaucugaucuggcucgugaaaaagggaaacagcuacccaaaauuaucuaaguccuauauaaaugacaagggcaaagaaguacugguucuuuggggcauccaccaccccucaacgagcgcugaucaacagaguuuguaccagaacgccgacgcguacguguucgucgggacuucucgcuauuccaagaaauuuaagccugagauugcaauccgaccaaaagugcgugaucaggagggaagaaugaauuaccauuggacccugguggaacccggugacaagauuacauucgaggccacuggcaaccuagucguuccuagguaugcuuuugccauggaacggaacgcagggagcggaaucauaauuucggauaccccagugcacgacugcaauacaaccugucaaacgccgaaaggcgcuaucaacacuucucuccccuuccagaauauucauccuaucacaaucgguaagugcccaaaguacguaaaauccaccaagcugcgcauggccacugggcuuagaaacgugcccucaauucagaguaggggacuguuuggcgcgauagccggcuucaucgaagggggauggacagguauggucgacggcugguauggguaccaccaccagaaugaacaaggaagcggcuaugcagcugauuugaaauccacccagaacgccauugacgagaucacgaauaaggugaacucuguuauagagaaaaugaauacccaguuuacagcuguggguaaggaguucaaccaucucgaaaagcggauugaaaaucugaacaaaaaggucgaugacggguucuuagauaucuggacuuacaaugccgagcugcucgugcuucuggaaaacgagcgcaccuuggacuaccacgauagcaauguuaaaaaccuauaugagaagguacgaucacagcugaaaaacaaugcaaaggaaaucggcaacggauguuuugaguucuaccauaagugcgacaauacauguauggaaagugugaaaaacggcacuuaugauuacccuaaguauuccgaggaagccaaacucaauagagaggagauugacggggucaagcuggaaagcaccaggaucuaccaaauucuugcuauauauucuacaguggcgucaagucuggucuuggugguuagccucggagcaaucuccuuuuggaugugcucuaacgguucgcugcagugccggauuuguaucuga

SEQ ID NO: 133952 - RNA, 1701 nt, Artificial Sequence; identical to SEQ ID NO: 133314
  derived and/or modified CDS sequence (opt3) from hemagglutinin__InfluenzaA__ADM95825

SEQ ID NO: 133953 - RNA, 1701 nt, Artificial Sequence; identical to SEQ ID NO: 133314
  derived and/or modified CDS sequence (opt3) from hemagglutinin__InfluenzaA__ADM95826

SEQ ID NO: 133954 - RNA, 1701 nt, Artificial Sequence
  derived and/or modified CDS sequence (opt3) from hemagglutinin__InfluenzaA__ADM95827
augaaggccauccuggugguccuccuuuacaccuucgcuacagcaaacgccgacacucugugcauuggcuaucacgcgaauaacagcacggauaccguugacacaguguuggagaaaaauguaacugugacccauuccgucaacuuacuggaagauaagcacaaugggaaacuauguaagcucaaaggaguggcuccccugcaucuugguaagugcaacauagccggcuggauccuggggaauccugagugugaaucuuugucaacagcaaguagcugguccuacauuguugagaccucuucgucagacaacggaacuugcuauccaggcgauuuuaucgacuacgaggagcucagagagcagcugagcaguguguccucuuucgaaagguuugagauuuucccgaagacaagcuccuggcccaaucacgauucaaacaaaggugucaccgccgcuuguccucaugcaggggccaagaguuuuuauaaaaaucugaucuggcucgugaagaaaggaaacagcuacccaaaguuaucuaaguccuauauaaaugacaaaggcaaggaaguacugguucuuuggggcauccaccaccccucaacgagcgcugaucaacagaguuuguaccagaacgccgacgcguacguguucgucgggacuucucgguauuccaaaaaguuuaaaccugagauugcaauccgcccaaaggugcgagaucaggagggacguaugaauuacuauuggacccugguggaacccggugacaaaauuacauucgaggccacuggcaaccuagucguuccuagauacgcuuuugccauggaaaggaacgcagggagcggaaucauaauuucggauaccccagugcaugacugcaauacaaccugucaaacgccgaagggcgcuaucaacacuucucuccccuuccagaauauucacccuaucacaaucgguaagugcccaaaauauguaaaguccaccaaacugcggcuugccacugggcugcgcaacgugcccucaauucagaguagaggauuguuuggcgcgauagccggcuucaucgaagggggauggacagguauggucgacggcugguacggguaucaucaccagaaugaacaaggaagcggcuacgcagcugaucucaaguccacccagcacgccauugacgagaucacgaacaaaguuaauucugugauagagaagaugaacacccaguuuacagcuguggguaaggaauuuaaucaucuggagaaaaggauugaaaacuuaaauaagaaagucgaugacggguuccuggauaucuggacuuacaacgccgagcuccuugugcuguuggaaaaugagcggacccuagacuaucacgauagcaacguaaagaaucuguacgagaaaguucgcucacagcucaagaacaacgcaaaggaaaucggcaauggauguuucgaguucuaucauaaaugcgacaacacauguauggaaagugugaagaauggcacuuacgauuauccuaaauacuccgaggaagccaagcugaaccgagaggagauugacggggucaaacuugaaagcaccagaaucuaucaaauucuggcuauauacucuacaguggcgucaaguuugguccucgugguuagccugggagcaaucuccuuuuggaugugcucuaaugguucguuacagugcaggauuuguaucuga

SEQ ID NO: 133955 - RNA, 1701 nt, Artificial Sequence
  derived and/or modified CDS sequence (opt3) from hemagglutinin__InfluenzaA__ADM95828
augaaggccauccuggugguccuccuuuacaccuucgcuacagcaaacgccgacacucugugcauuggcuaucacgcgaauaacagcacggauaccguugacacaguguuggagaaaaauguaacugugacccauuccgucaacuuacuggaagauaagcacaaugggaaacuauguaagcucagaggaguggcuccccugcaucuugguaaaugcaacauagccggcuggauccuggggaauccugagugugaaucuuugucaacagcaaguagcugguccuacauuguugagaccucuucgucagacaacggaacuugcuauccaggcgauuuuaucgacuacgaggagcucagggagcagcugagcaguguguccucuuucgaacgguuugagauuuucccgaagacaagcuccuggcccaaucacgauucaaacaagggugucaccgccgcuuguccucaugcaggggccaaaaguuuuuauaagaaucugaucuggcucgugaaaaagggaaacagcuacccaaaauuaucuaaguccuauauaaaugacaagggcaaagaaguacugguucuuuggggcauccaccaccccucaacgagcgcugaucaacagaguuuguaccagaacgccgacgcguacguguucgucgggacuucucgcuauuccaagaaauuuaagccugagauugcaauccgaccaaaagugcgugaucaggagggaagaaugaauuacuauuggacccugguggaacccggugacaagauuacauucgaggccacuggcaaccuagucguuccuagguacgcuuuugccauggaacggaacgcagggagcggaaucauaauuucggauaccccagcucaugacugcaauacaaccugucaaacgccgaaaggcgccaucaacacuucucuccccuuccagaauauucacccuaucacaaucgguaagugcccaaaguaugugaaauccaccaagcugcgcauggcgacugggcuuagaaacguacccucaauucagaguaggggacuguuuggcgccauagcaggcuucaucgaagggggauggacagguaugguggacggcugguacggguaucaucaccagaaugaacaaggaagcggcuacgcugccgauuugaaauccacccagaacgcuauugacgagaucacgaauaaggucaacucugugauagagaaaaugaauacccaguuuacagccguugguaaggaguucaaccaccucgaaaagcggauugaaaaucugaacaaaaagguggaugacggguucuuagauaucuggacuuacaaugcagagcugcucguccuucuggaaaacgagcgcaccuuggacuaucaugauagcaaugugaaaaaccuauacgagaagguacgaucacagcugaaaaacaaugccaaggaaaucggcaacggauguuuugaguucuaucacaagugcgacaauacauguauggaaaguguuaaaaacggcacuuacgauuauccuaaguacuccgaggaagcuaaacucaauagagaggagauugacggggugaagcuggaaagcaccaggaucuaucaaauucuugcgauauacucuacagucgcaucaagucugguguuggucgugagccucggagccaucuccuuuuggaugugcucuaacgguucgcugcagugccggauuuguaucuga

SEQ ID NO: 133956 - RNA, 1701 nt, Artificial Sequence
  derived and/or modified CDS sequence (opt3) from hemagglutinin__InfluenzaA__ADM95829
augaaggccauccuggugguccuccuuuacaccuucgcuacagcaaacgccgacacucugugcauuggcuaucacgcgaauaacagcacggauaccguugacacaguguuggagaaaaauguaacugugacccauuccgucaacuuacuggaagauaagcacaaugggaaacuauguaagcucagaggaguggcuccccugcaucuugguaaaugcaacauagccggcuggauccuggggaauccugagugugaaucuuugucaacagcaaguagcugguccuacauuguugagaccucuucgucagacaacggaacuugcuauccaggcgauuuuaucgacuacgaggagcucagggagcagcugagcaguguguccucuuucgaacgguuugagauuuucccgaagacaagcuccuggcccaaucacgauucaaacaagggugucaccgccgcuuguccucaugcaggggccaaaaguuuuuauaagaaucugaucuggcucgugaaaaagggaaacagcuacccaaaauuaucuaaguccuauauaaaugacaagggcaaagaaguacugguucuuuggggcauccaccaccccucaacgagcgcugaucaacagaguuuguaccagaacgccgacgcguacguguucgucgggacuucucgcuauuccaagaaauuuaagccugagauugcaauccgaccaaaagugcgugaucaggagggaagaaugaauuacuauuggacccugguggaacccggugacaagauuacauucgaggccacuggcaaccuagucguuccuagguacgcuuuugccauggaacggaacgcagggagcggaaucauaauuucggauaccccagugcaugacugcaauacaaccugucaaacgccgaaaggcgcuaucaacacuucucuccccuuccagaauauucacccuaucacaaucgguaagugcccaaaguauguaaaauccaccaagcugcgccuugccacugggcugagaaacgugcccucaauucagaguaggggauuguuuggcgcgauagccggcuucaucgaagggggauggacagguauggucgacggcugguacggguaucaucaccagaaugaacaaggaagcggcuacgcagcugaucucaaauccacccagaacgccauugacgagaucacgaauaaggugaacucuguuauagagaaaaugaauacccaguuuacagcuguggguaaggaguucaaccaccuggaaaagcggauugaaaauuuaaacaaaaaggucgaugacggguuccuggauaucuggacuuacaaugccgagcuccuugugcuguuggaaaacgagcgcacccuagacuaucaugauagcaauguuaaaaagcuguacgagaaaguacgaucacagcucaagaacaacgcaaaggaaaucggcaauggauguuuugaguucuaucacaaaugcgacaacauguguauggaaagugugaagaauggcacauacgauuauccuaaauacuccgaggaagccaagcugaacagagaggagauugacggggucaaacuugaaagcacuaggaucuaucaaauucuggcuauauacucuaccguggcgucaaguuugguccucgugguuagccugggagcaaucuccuuuuggaugugcucuaaugguucguuacagugccggauuuguaucuga

SEQ ID NO: 133957 - RNA, 1701 nt, Artificial Sequence
  derived and/or modified CDS sequence (opt3) from hemagglutinin__InfluenzaA__ADM95831
augaaggccauccuggugguccuccuuuacaccuucguuacagcuaacgcagacacucugugcauuggcuaucacgccaauaacagcacggauaccguggacacaguauuggagaaaaaugugacugucacccauuccgugaacuuacuggaagauaagcacaaugggaaacuauguaagcucagaggaguugcgccccugcaucuugguaaaugcaacauagcuggcuggauccuggggaauccugagugugaaucuuugucaacagccaguagcugguccuacauuguggagaccucuucgucagacaacggaacuugcuauccaggcgauuuuaucgacuacgaagaacucagggagcagcugagcagugucuccucuuucgaacgguuugagauuuucccgaagacaagcuccuggcccaaucacgauucaaacaagggugugaccgcagccuguccucaugcuggggcaaaaaguuuuuauaagaaucugaucuggcucguuaaaaagggaaacagcuacccaaaauuaucuaaguccuauauaaaugacaagggcaaagaaguacuggugcuuuggggcauccaccaccccucaacgagcgccgaucaacagaguuuguaccagaacgcugacgccuacgucuucguggggacuucucgcuauuccaagaaauuuaagccugagauugcgauccgaccaaaagugcgugaucaggagggaagaaugaauuacuauuggacccuggucgaacccggugacaagauuacauucgaggcaacuggcaaccuaguugugccuagguacgccuuugcuauggagaaaaacgccgggagcggaaucauaauuucggauaccccaguacaugacugcaauacaaccugucaaacgccgaagggcgcaaucaacacuucucuccccuuccagaauauucacccuaucacaaucgguaagugcccaaaauaugugaaguccaccaaacugcggcuugcuacugggcugcgcaacguccccucaauucagaguagaggauuguuuggcgccauagcgggcuucaucgaagggggauggacagguaugguggacggcugguacggguaucaucaccagaaugaacaaggaagcggcuacgccgcagaucucaaguccacccagcacgcuauugacgagaucacgaacaaaguuaauucugugauagagaagaugaacacccaguuuacagccgucgguaaggaguucaaucaucuggagaaaaggauugaaaacuuaaauaagaaaguggaugacggguuccuggauaucuggacuuacaacgcugagcuccuuguacuguuggaaaaugagcggacccuagacuaucacgauagcaacguuaagaaucuguacgagaaagugcgcucacagcucaagaacaacgccaaggaaaucggcaauggauguuuugaguucuaucauaaaugcgacaacacauguauggaaagugucaagaauggcacuuacgauuauccuaaauacuccgaggaagcaaagcugaaccgagaggagauugacggggugaaacuugaaagcaccagaaucuaucaaauucuggccauauacucuacagucgcuucaaguuuggugcucguugugagccugggagcgaucuccuuuuggaugugcucuaaugguucguuacagugcaggauuuguaucuga

SEQ ID NO: 133958 - RNA, 1701 nt, Artificial Sequence; identical to SEQ ID NO: 131818
  derived and/or modified CDS sequence (opt3) from hemagglutinin__InfluenzaA__ADM95832

SEQ ID NO: 133959 - RNA, 1701 nt, Artificial Sequence; identical to SEQ ID NO: 132399
  derived and/or modified CDS sequence (opt3) from hemagglutinin__InfluenzaA__ADM95833

SEQ ID NO: 133960 - RNA, 1701 nt, Artificial Sequence; identical to SEQ ID NO: 133944
  derived and/or modified CDS sequence (opt3) from hemagglutinin__InfluenzaA__ADM95834

SEQ ID NO: 133961 - RNA, 1701 nt, Artificial Sequence; identical to SEQ ID NO: 132399
  derived and/or modified CDS sequence (opt3) from hemagglutinin__InfluenzaA__ADM95836

SEQ ID NO: 133962 - RNA, 1701 nt, Artificial Sequence; identical to SEQ ID NO: 133314
  derived and/or modified CDS sequence (opt3) from hemagglutinin__InfluenzaA__ADM95837

SEQ ID NO: 133963 - RNA, 1701 nt, Artificial Sequence
  derived and/or modified CDS sequence (opt3) from hemagglutinin__InfluenzaA__ADM95838
augaaggccauccuggugguccuccuuuacaccuucgcuacagcaaacgccgacacucugugcauuggcuaucacgcgaauaacagcacggauaccguugacacaguguuggagaaaaauguaacugugacccauuccgucaacuuacuggaagauaagcacaaugggaaacuauguaagcucagaggaguggcuccccugcaucuugguaaaugcaacauagccggcuggauccuggggaauccugagugugaaucuuugucaacagcaaguagcugguccuacauuguugagaccucuucgucagacaacggaacuugcuauccaggcgauuuuaucgacuacgaggagcucagggagcagcugagcaguguguccucuuucgaacgguuugagauuuucccgaagacaagcuccuggcccaaucacgauucaaacaagggugucaccgccgcuugucugcaugcaggggccaaaaguuuuuauaagaaucucaucugguuagugaaaaagggaaacagcuacccuaaacugucuaaguccuauauaaaugacaagggcaaagaaguacuuguuuuguggggcauccaccacccaucaacgagcgcugaucaacagagucuguaccagaacgccgacgcguacguguucgucgggacuucucgcuauuccaagaaauuuaagcccgagauugcaauccgaccuaaagugcgugaucaggagggaagaaugaauuacuauuggacccuaguggaaccaggugacaagauuacauucgaggccacuggcaaccucgucguucccagguacgcuuuugccauggaacggaacgcagggagcggaaucauaauuucggauaccccugugcaugacugcaauacaaccugucaaacgccaaaaggcgcuaucaacacuucucugccguuccagaauauucaccccaucacaaucgguaagugcccuaaguauguaaaauccaccaaacuucgccuggccacuggguugagaaacgugccaucaauucagaguaggggacucuuuggcgcgauagccggcuucaucgaagggggauggacagguauggucgacggcugguacggguaucaucaccagaaugaacaaggaagcggcuacgcagcugaucugaaguccacccagaacgccauugacaagaucacgaauaaagugaacucuguuauagagaagaugaauacccaguuuacagcuguggguaaggaguucaaccacuuagaaaaacggauugagaaucugaacaagaaagucgaugacggguuccucgauaucuggacuuacaaugccgaacuucugguguugcuagagaacgaacgcacccuggacuaucaugauagcaauguaaagaaccucuacgagaaaguucgaucacagcugaagaacaaugcaaaggagaucggcaacggauguuuugaguucuaucacaaaugcgacaauacauguauggaaagugugaagaacggcacuuacgauuaucccaaauacuccgaagaggccaaacuuaauagagaagagauugacggggucaagcuggagagcaccaggaucuaucaaauuuuggcuauauacucuacaguggcgucaagucucguccuggugguuagcuuaggagcaaucuccuuuuggaugugcucuaacgguucgcugcagugccggauuuguaucuga

SEQ ID NO: 133964 - RNA, 1701 nt, Artificial Sequence; identical to SEQ ID NO: 132399
  derived and/or modified CDS sequence (opt3) from hemagglutinin__InfluenzaA__ADM95839

SEQ ID NO: 133965 - RNA, 1701 nt, Artificial Sequence; identical to SEQ ID NO: 133924
  derived and/or modified CDS sequence (opt3) from hemagglutinin__InfluenzaA__ADM95840

SEQ ID NO: 133966 - RNA, 1701 nt, Artificial Sequence; identical to SEQ ID NO: 133924
  derived and/or modified CDS sequence (opt3) from hemagglutinin__InfluenzaA__ADM95842

SEQ ID NO: 133967 - RNA, 1701 nt, Artificial Sequence; identical to SEQ ID NO: 133314
  derived and/or modified CDS sequence (opt3) from hemagglutinin__InfluenzaA__ADM95843

SEQ ID NO: 133968 - RNA, 1701 nt, Artificial Sequence; identical to SEQ ID NO: 133314
  derived and/or modified CDS sequence (opt3) from hemagglutinin__InfluenzaA__ADM95844

SEQ ID NO: 133969 - RNA, 1701 nt, Artificial Sequence
  derived and/or modified CDS sequence (opt3) from hemagglutinin__InfluenzaA__ADM95845
augaaggccauccuggugguccuccuuuacaccuucgcuacagcaaacgccgacacucugugcauuggcuaucacgcgaauaacagcacggauaccguugacacaguguuggagaaaaauguaacugugacccauuccgucaacuuacuggaagauaagcacaaugggaaacuauguaagcucagaggaguggcuccccugcaucuugguaaaugcaacauagccggcuggauccuggggaauccugagugugaaucuuugucaacagcaaguagcugguccuacauuguugagaccucuucgucagacaacggaacuugcuauccaggcgauuuuaucgacuacgaggagcucagggagcagcugagcaguguguccucuuucgaacgguuugagauuuucccgaagacaagcuccuggcccaaucacgauucaaacaagggugucaccgccgcuuguccucaugcaggggccaaaaguuuuuauaagaaucugaucuggcucgugaaaaagggaaacagcuacccaaaauuaucuaaguccuauauaaaugacaagggcaaagaaguacugguucuuuggggcauccaccaccccucaacgagcgcugaucaacagaguuuguaccagaacgccgacgcguacguguucgucgggacuucucgcuauuccaagaaauuuaagccugagauugcaauccgaccaaaagugcgugaucaggagggaagaaugaauuacuauuggacccugguggaacccggugacaagauuacauucgaggccacuggcaaccuagucguuccuagguacgcuuuugccauggaacggaacgcagggagcggaaucauaauuucggauaccccagugcaugacugcaauacaaccugucaaacgccgaaaggcgcuaucaacacuucucuccccuuccagaauauucacccuaucacaaucgguaagugcccaaaguauguaaaauccaccaagcugcgcauggccacugggcuuagaaacgugcccucaauucagaguaggggacuguuuggcgcgauagccggcuucaucgaagggggauggacagguauggucgacggcugguacggguaucaucaccagaaugaacaaggaagcggcuacgcagcugauuugaaauccacccagaacgccauugacgagaucacgaauaaggugaacucuguuauagagaaaaugaauacccaguuuacagcuguggguaaggaguucaaccaccucgaaaagcggauugaaaaucugaacaaaaaggucgaugacggguucuuagauaucuggacuuacaaugccgagcugcucgugcuucuggaaaacgagcgcaccuuggacuaucaugauagcaauguuaaaaaccuauacgagaagguacgaucacagcugaaaaacaaugcaaaggaaaucggcaacggauguuuugaguucuaucacaagugcgacaauacauguauggaaagugugaaaaacggcacuuacgauuauccuaaguacuccgaggaaaccaaacucaauagagaggagauugacggggucaagcuggaaagcacaaggaucuaucaaauucuugccauauacucuaccguggcuucaagucuggucuuggugguuagccucggagcgaucuccuuuuggaugugcucuaacgguucgcugcagugccggauuuguaucuga

SEQ ID NO: 133970 - RNA, 1701 nt, Artificial Sequence
  derived and/or modified CDS sequence (opt3) from hemagglutinin__InfluenzaA__ADM95846
augaaggccauccuggugguccuccuuuacaccuucgcuacagcaaacgccgacacucugugcauuggcuaucacgcgaauaacagcacggauaccguugacacaguguuggagaagaauguaacugugacccauuccgucaacuuacuggaagauaagcacaaugggaaacuauguaagcucagaggaguggcuccccugcaucuugguaaaugcaacauagccggcuggauccuggggaauccugagugugaaucuuugucaacagcaaguagcugguccuacauuguugaggccucuucgucagacaacggaaccugcuauccaggcgauuuuaucgacuacgaggagcucagggagcagcugagcaguguguccucuuucgaacgguuugagauuuucccgaagacuagcuccuggcccaaucacgauucaaacaagggugucacagcugcauguccucaugccggggcuaaaaguuuuuauaagaaucugaucuggcucgugaaaaagggaaacagcuacccaaaauuaucuaaguccuauauaaaugacaagggcaaagaaguacugguucuuuggggcauccaccaccccucaaccagcgccgaucaacagaguuuguaccagaacgcggacgcauacguguucgucgggacgucucgcuauuccaagaaauuuaagccugagauugccauccgaccaaaagugcgugaucaggagggaagaaugaauuacuauuggacucugguggaacccggugacaagauuaccuucgaggcuacaggcaaccuagucguuccuagguacgccuuugcaauggaacggaacgcugggagcggaaucauaauuucggauacuccagugcaugacugcaauaccacaugucaaaccccgaaaggcgccaucaacacgucucuccccuuccagaauauucacccuaucacuaucgguaagugcccaaaguauguaaaauccacaaagcugcgccuugcgaccgggcugagaaacauucccucaauacagaguaggggauuguuuggcgccaucgcaggcuucauugaagggggauggacugguaugguggacggcugguacggguaucaucaccagaaugaacaaggaagcggcuacgcugccgaucucaaauccacacagaacgcuaucgacgagauaaccaauaaggucaacucugugauugagaaaaugaauacgcaguuuaccgccguugguaaggaguucaaccaccuggaaaagcggaucgaaaauuuaaacaaaaagguggaugacggguuccuggauaucuggacauacaaugcagagcuccuuguccuguuggaaaacgagcgcacucuagacuaucaugauagcaaugugaaaaaccuguacgagaagguacgaucacagcucaaaaacaaugccaaggaaauuggcaacggauguuuugaguucuaucacaagugcgacaauaccuguauggaaaguguuaaaaacggcacauacgauuauccuaaguacuccgaggaagcuaaacugaauagagaggagaucgacggggugaaacuugaaagcacuaggauuuaucaaauacuggcgaucuacucuaccgucgcaucaaguuuggugcucgucgugagccugggagccauuuccuuuuggaugugcucuaacgguucguuacagugccggaucuguaucuga

SEQ ID NO: 133971 - RNA, 1701 nt, Artificial Sequence; identical to SEQ ID NO: 131818
  derived and/or modified CDS sequence (opt3) from hemagglutinin__InfluenzaA__ADM95847

SEQ ID NO: 133972 - RNA, 1701 nt, Artificial Sequence; identical to SEQ ID NO: 131818
  derived and/or modified CDS sequence (opt3) from hemagglutinin__InfluenzaA__ADM95848

SEQ ID NO: 133973 - RNA, 1701 nt, Artificial Sequence
  derived and/or modified CDS sequence (opt3) from hemagglutinin__InfluenzaA__ADM95849
augaaggccauccuggugguccuccuuuacaccuucgcuacagcaaacgccgacacucugugcauuggcuaucacgcgaauaacagcacggauaccguugacacaguguuggagaaaaauguaacugugacccauuccgucaacuuacuggaagauaagcacaaugggaaacuauguaagcucagaggaguggcuccccugcaucuugguaaaugcaacauagccggcuggauccuggggaauccugagugugaaucuuugucaacagcaaguagcugguccuacauuguugagaccucuucgucagacaacggaacuugcuauccaggcgauuuuaucgacuacgaggagcucagggagcagcugagcaguguguccucuuucgaacgguuugagauuuucccgaagacaagcuccuggcccaaucacgauucaaacaagggugucaccgccgcuuguccucaugcaggggccaaaaguuuuuauaagaaucugaucuggcucgugaaaaagggaaacagcuacccaaaauuaucuaaguccuauauaaaugacaagggcaaagaaguacugguucuuuggggcauccaccaccccucaacgagcgcugaucaacagaguuuguaccagaacgccgacgcguacguguucgucgggacuucucgcuauuccaagaaauuuaagccugagauugcaauccgaccaaaagugcgugaucaggagggaagaaugaauuacuauuggacccugguggaacccggugacaagauuacauucgaggccacuggcaaccuagucguuccuagguacgcuuuugccauggaacggaacgcagggagcggaaucauaauuucggauaccccagugcaugacugcaauacaaccugucaaacgccgaaaggcgcuaucaacacuucucuccccuuccagaauauucacccuaucacaaucgguaagugcccaaaguauguaaaauccaccaagcugcgccuugccacugggcugagaaacgugcccucaauucagaguaggggauuguuuggcgcgauagccggcuucaucgaagggggauggacagguauggucgacggcugguacggguaucaucaccagaaugaacaaggaagcggcuacgcagcugaucucaaauccacccagaacgccauugacgagaucacgaauaaggugaacucuguuauagagaaaaugaauacccaguuuacagcuguggguaaggaguucaaccaccuggaaaagcggauugaaaauuuaaacaaaaaggucgaugacggguuccuggauaucuggacuuacaaugccgagcuccuugugcuguuggaaaacgagcgcacccuagacuaucaugauagcaauguuaaaaagcuguacgagaaaguacgaucacagcucaagaacaacgcaaaggaaaucggcaauggauguuuugaguucuaucacaaaugcgacaacacauguauggaaagugugaagaauggcacuuacgauuauccuaaauacuccgaggaagccaagcugaacagagaggagauugacggggucaaacuugaaagcaccaggaucuaucaaauucuggcuauauacucuacaguggcgucaaguuugguccucgugaucagccugggagcaauuuccuuuuggaugugcucuaaugguucguuacagugccggaucuguaucuga

SEQ ID NO: 133974 - RNA, 1701 nt, Artificial Sequence; identical to SEQ ID NO: 133314
  derived and/or modified CDS sequence (opt3) from hemagglutinin__InfluenzaA__ADM95850

SEQ ID NO: 133975 - RNA, 1701 nt, Artificial Sequence
  derived and/or modified CDS sequence (opt3) from hemagglutinin__InfluenzaA__ADM95851
augaaggccauccuggugguccuccuuuacaccuucgcuacagcaaacgccgacacucugugcauuggcuaucacgcgaauaacagcacggauaccguugacacaguguuggagaagaauguaacugugacccauuccgucaacuuacuggaagauaagcacaaugggaaacuauguaagcucagaggaguggcuccccugcaucuugguaaaugcaacauagccggcuggauccuggggaauccugagugugaaucuuugucaacaaccaguagcugguccuacauuguugagacuucuucgucagacaacggaacaugcuauccaggcgauuuuaucgacuacgaggagcucagggagcagcugagcaguguguccucuuucgaacgguuugagauuuucccgaagaccagcuccuggcccaaucacgauucaaacaagggugucacggcagccuguccucaugcuggggcaaaaaguuuuuauaagaaucugaucuggcucgugaaaaagggaaacagcuacccaaaauuaucuaaguccuauauaaaugacaagggcaaagaaguacugguucuuuggggcauccaccaccccucaacuagcgccgaucaacagaguuuguaccagaacgcugacgccuacguguucgucgggaccucucgcuauuccaagaaauuuaagccugagauugcgauccgaccaaaagugcgugaucaggagggaagaaugaauuacuauuggacacugguggaacccggugacaagauuacuuucgaggcaaccggcaaccuagucguuccuagguacgccuuugcuauggaacggaacgccgggagcggaaucauaauuucggauacaccagugcaugacugcaauaccacgugucaaacuccgaaaggcgcaaucaacacaucucuccccuuccagaauauucacccuaucaccaucgguaagugcccaaaguauguaaaauccacuaagcugcgccuugcuacagggcugagaaacauucccucaauacagaguaggggauuguuuggcgccaucgcgggcuucauugaagggggauggaccgguaugguggacggcugguacggguaucaucaccagaaugaacaaggaagcggcuacgccgcagaucucaaauccacgcagaacgcuaucgacgagauaaccaauaaggucaacucugugauugagaaaaugaauacacaguuuacugccguugguaaggaguucaaccaccuggaaaagcggaucgaaaauuuaaacaaaaagguggaugacggguuccuggauaucuggaccuacaaugcugagcuccuuguccuguuggaaaacgagcgcacacuagacuaucaugauagcaaugugaaaaaccuguacgagaagguacgaucacagcucaaaaacaaugccaaggaaauuggcaacggauguuuugaguucuaucacaagugcgacaauacuuguauggaaaguguuaaaaacggcaccuacgauuauccuaaguacuccgaggaagcaaaacugaauagagaggagaucgacggggugaaacuugaaagcacaaggauuuaucaaauacuggccaucuacucuaccgucgcuucaaguuuggugcucgucgugagccugggagcgauuuccuuuuggaugugcucuaacgguucguuacagugccggaucuguaucuga

SEQ ID NO: 133976 - RNA, 1701 nt, Artificial Sequence
  derived and/or modified CDS sequence (opt3) from hemagglutinin__InfluenzaA__ADM95852
augaaggccauccuggugguccuccuuuacaccuucgcuacagcaaacgccgacacucugugcauuggcuaucacgcgaauaacagcacggauaccguugacacaguguuggagaaaaauguaacugugacccauuccgucaacuuacuggaagauaagcacaaugggaaacuauguaagcucagaggaguggcuccccugcaucuugguaaaugcaacauagccggcuggauccuggggaauccugagugugaaucuuugucaacagcaaguagcugguccuacauuguugagaccucuucgucagacaacggaacuugcuauccaggcgauuuuaucgacuacgaggagcucagggagcagcugagcaguguguccucuuucgaacgguuugagauuuucccgaagacaagcuccuggcccaaucacgauucaaacaagggugucaccgccgcuuguccucaugcaggggccaaaaguuuuuauaagaaucugaucuggcucgugaaaaagggaaacagcuacccaaaauuaucuaaguccuauauaaaugacaagggcaaagaaguacugguucuuuggggcauccaccaccccucaacgagcgcugaucaacagaguuuguaccagaacgccgacgcguacguguucgucgggacuucucgcuauuccaagaaauuuaagccugagauugcaauccgaccaaaagugcgugaucaggagggaagaaugaauuacuauuggacccugguggaacccggugacaagauuacauucgaggccacuggcaaccuagucguuccuagguacgcuuuugccauggaacggaacgcagggagcggaaucauaauuucggauaccccagugcaugacugcaauacaaccugucaaacgccgaaaggcgcuaucaacacuucucuccccuuccagaauauucacccuaucacaaucgguaagugcccaaaguauguaaaauccaccaagcugcgccuugccacugggcugagaaacgugcccucaauucagaguaggggauuguuuggcgcgauagccggcuucaucgaagggggauggacagguauggucgacggcugguacggguaucaucaccagaaugaacaaggaagcggcuacgcagcugaucucaaauccacccagaacgccauugacgagaucacgaauaaggugaacucuguuauagagaaaaugaauacccaguuuacagcuguggguaaggaguucaaccaccuggaaaagcggauugaaaauuuaaacaaaaaggucgaugacggguuccuggauaucuggacuuacaaugccgagcuccuugugcuguuggaaaacgagcgcacccuagacuaucaugauagcaauguuaaaaagcuguacgagaaaauccgaucacagcucaagaacaacgcaaaggaaauuggcaauggauguuuugaguucuaucacaaaugcgacaacacauguauggaaaguguaaagaauggcacuuacgauuauccuaaauacuccgaggaagccaagcugaacagagaggagaucgacggggugaaacuugaaagcaccaggauuuaucaaauacuggcuaucuacucuacagucgcgucaaguuuggugcucgucgugagccugggagcaauuuccuuuuggaugugcucuaaugguucguuacagugccggaucuguaucuga

SEQ ID NO: 133977 - RNA, 1701 nt, Artificial Sequence; identical to SEQ ID NO: 132137
  derived and/or modified CDS sequence (opt3) from hemagglutinin__InfluenzaA__ADM95854

SEQ ID NO: 133978 - RNA, 1701 nt, Artificial Sequence
  derived and/or modified CDS sequence (opt3) from hemagglutinin__InfluenzaA__ADM95855
augaaggccauccuggugguccuccuuuacaccuucgcuacaacuaacgcagacacgcugugcauuggcuaucacgccaauaacagcaccgauacaguugacacuguguuggagaaaaauguaaccgugacacauuccgucaacuuacuggaagauaagcacaaugggaaacuauguaagcucagaggaguggcgccccugcaucuugguaaaugcaacauagcuggcuggauccuggggaauccugagugugaaucuuugucaaccgccaguagcugguccuacauuguugagacuucuucgucagacaacggaacaugcuauccaggcgauuuuaucgacuacgaggagcucagggagcagcugagcaguguguccucuuucgaacgguuugagauuuucccgaagaccagcuccuggcccaaucacgauucaaacaagggugucacggcagccuguccucaugcuggggcaaaaaguuuuuauaagaaucugaucuggcucgugaaaaagggaaacagcuacccaaaauuaucuaaguccuauauaaaugacaagggcaaagaaguacugguucuuuggggcauccaccaccccucaacuagcgccgaucaacagaguuuguaccagaacgcugacgccuacguguucgucgggaccucucgcuauuccaagaaauuuaagccugagauugcgauccgaccaaaagugcgugaucaggagggaagaaugaauuacuauuggacacugguggaacccggugacaagauuacuuucgaggcaaccggcaaccuagucguuccuagguacgccuuugcuauggaacggaacgccgggagcggaaucauaauuucggauacaccagugcaugacugcaauaccacgugucaaacuccgaaaggcgcaaucaacacaucucuccccuuccagaauauucacccuaucaccaucgguaagugcccaaaguauguaaaauccacuaagcugcgccuugcuacagggcugagaaacgugcccucaauucagaguaggggauuguuuggcgccauagcgggcuucaucgaagggggauggaccgguauggucgacggcugguacggguaucaucaccagaaugaacaaggaagcggcuacgccgcagaucucaaauccacgcagaacgcuauugacgagaucaccaauaaggugaacucuguuauagagaaaaugaauacacaguuuacugccguggguaaggaguucaaccaccuggaaaagcggauugaaaauuuaaacaaaaaggucgaugacggguuccuggauaucuggaccuacaaugcugagcuccuugugcuguuggaaaacgagcgcacacuagacuaucaugauagcaauguuaaaaagcuguacgagaaaguacgaucacagcucaagaacaacgccaaggaaaucggcaauggauguuuugaguucuaucacaaaugcgacaacacuuguauggaaagugugaagaauggcaccuacgauuauccuaaauacuccgaggaagcaaagcugaacagagaggagauugacggggucaaacuugaaagcacaaggaucuaucaaauucuggccauauacucuaccguggcuucaaguuugguccucgugguuagccugggagcgaucuccuuuuggaugugcucuaaugguucguuacagugccggauuuguaucuga

SEQ ID NO: 133979 - RNA, 1701 nt, Artificial Sequence
  derived and/or modified CDS sequence (opt3) from hemagglutinin__InfluenzaA__ADM95857
augaaggccauccuggugguccuccuuuacaccuucgcuacagcaaacgccgacacucugugcauuggcuaucacgcgaauaacagcacggauaccguugacacaguguuggagaaaaauguaacugugacccauuccgucaacuuacuggaagauaagcacaaugggaaacuauguaagcucagaggaguggcuccccugcaucuugguaaaugcaacauagccggcuggauccuggggaauccugagugugaaucuuugucaacagcaaacaguuggagcuacauuguugagaccuccucuucggacaauggaacuugcuauccaggcgauuuuaucgacuacgaggagcucagggagcagcugucaagcgugaguuccuucgaacgguuugagauuuucccgaagacaucuagcuggcccaaccacgauuccaauaagggugucaccgccgcuuguccucaugcaggggccaaaucauuuuauaagaaccugaucuggcucgugaaaaagggaaauaguuacccaaaauuaagcaagucuuauauaaacgacaagggcaaagaaguacugguucuuuggggcauccaccaccccuccacgucagcugaucaacagagcuuguaccagaaugccgacgcguacguguucgucgggaccagucgcuauucuaagaaauuuaagccugagauugcaauccgaccaaaagugcgugaucaggagggaagaaugaacuacuauuggacucugguggaacccggugacaagauuacauucgaggccacuggcaaccuagucguuccuagguacgcuuuugccauggaacggaaugcaggguccggaaucauaauuagcgauaccccagugcaugacugcaacacaaccugucaaacgccgaaaggcgcuaucaauacuucgcuccccuuccagaacauucacccuaucacaaucgguaagugcccaaaguauguaaaaucuaccaagcugcgcauggccacugggcuuagaaaugugcccuccauucagucaaggggacuguuuggcgcgauagccggcuucaucgaagggggauggacagguauggucgacggcugguacggguaucaucaccagaacgaacaaggaaguggcuacgcagcugauuugaaaagcacccagaaugccauugacgagaucacgaacaagguaaauuccguuauagagaaaaugaacacccaguuuacagcuguggguaaggaguucaaucaccucgaaaagcggauugaaaaccugaauaaaaaggucgaugacggguucuuagauaucuggacuuacaacgccgagcugcucgugcuucuggaaaaugagcgcaccuuggacuaucaugauucuaacgugaaaaaccuauacgagaagguucgaagccagcugaaaaauaacgcaaaggaaaucggcaauggauguuuugaguucuaucacaagugcgacaacacauguauggaaucagugaaaaauggcacuuacgauuauccuaaguacagugaggaagccaaacucaacagagaggagauugacggggucaagcuggaauccaccaggaucuaucaaauucuugcuauauacagcacaguggcgucuucacuggucuuggugguuagucucggagcaaucagcuuuuggaugugcuccaaugguucucugcagugccggauuuguaucuga

SEQ ID NO: 133980 - RNA, 1701 nt, Artificial Sequence; identical to SEQ ID NO: 132399
  derived and/or modified CDS sequence (opt3) from hemagglutinin__InfluenzaA__ADM95858

SEQ ID NO: 133981 - RNA, 1701 nt, Artificial Sequence
  derived and/or modified CDS sequence (opt3) from hemagglutinin__InfluenzaA__ADM95859
augaaggccauccuggugguccuccuuuacaccuucgcuacagcaaacgccgacacucugugcauuggcuaucacgcgaauaacagcacggauaccguugacacaguguuggagaaaaauguaacugugacccauuccgucaacuuacuggaagauaagcacaaugagaaacuauguaagcucagagggguggcuccccugcaucuuggaaaaugcaacauagccgguuggauccugggcaauccugaaugugagucuuugucaacagcaaguagcugguccuacauuguugaaaccucuucgucagacaacgggacuugcuauccaggagauuuuaucgacuacgaggagcucagggaacagcugagcaguguguccucuuucgagcgguuugaaauuuucccgaagacaagcuccuggcccaaucacgauucaaacaagggcgucaccgccgcuuguccucaugccggugcaaaaaguuuuuauaagaaucugaucuggcucgugaaaaaggggaacagcuacccaaaauuaucuaaguccuauauaaaugacaagggaaaagagguacugguucuuuggggcauccaccaccccucaacgagcgcugaucaacagaguuuguaccagaacgccgacgcguacguguucgucggcacuucucgcuauuccaagaaauuuaagccugagauugcaauccgaccaaaagugcgugaucaggaagggagaaugaauuacuauuggacccugguggagcccggagacaagauuacauucgaagccacugguaaccuagucguuccuagguacgcuuuugccauggagcggaacgcaggcagcgggaucauaauuucggauaccccagugcaugacugcaauacaaccugucaaacgccgaaaggagcuaucaacacuucucuccccuuccagaauauucacccuaucacaaucggcaagugcccaaaguauguaaaauccaccaagcugcgccuugccacuggucugagaaacgugcccucaauucagaguaggggguuguuuggagcgauagccggcuucaucgaaggcggguggacaggaauggucgacgguugguacggcuaucaucaccagaaugagcaagggagcggauacgcagcugaucucaaauccacccagaacgccauugacgagaucacgaauaaggugaacucuguuauagaaaagaugaauacccaguuuacagcugugggcaaagaguucaaccaccuggaaaagcggauugagaauuuaaacaaaaaggucgaugacgguuuccuggauaucuggacuuacaaugccgaacuccuugugcuguuggagaacgagcgcacccuagacuaucaugauagcaauguuaaaaagcuguacgaaaaaguacgaucacagcucaagaacaacgcaaaggagaucgggaauggcuguuuugaguucuaucacaaaugcgacaacacauguauggaaagugugaagaauggaacuuacgauuauccuaaauacuccgaagaggccaagcugaacagagaggaaauugacggcgucaaacuugagagcaccaggaucuaucaaauucuggcuauauacucuacaguggcgucaaguuugguccucgugguuagccugggggcaaucuccuuuuggaugugcucuaauggaucguuacagugccggauuuguaucuga

SEQ ID NO: 133982 - RNA, 1701 nt, Artificial Sequence; identical to SEQ ID NO: 132344
  derived and/or modified CDS sequence (opt3) from hemagglutinin__InfluenzaA__ADM95860

SEQ ID NO: 133983 - RNA, 1701 nt, Artificial Sequence; identical to SEQ ID NO: 133944
  derived and/or modified CDS sequence (opt3) from hemagglutinin__InfluenzaA__ADM95862

SEQ ID NO: 133984 - RNA, 1701 nt, Artificial Sequence
  derived and/or modified CDS sequence (opt3) from hemagglutinin__InfluenzaA__ADM95864
augaaggccauccuggugguccuccuuuacaccuucgcuacagcaaacgccgacacucugugcauuggcuaucacgcgaauaacagcacggauaccguugacacaguguuggagaaaaauguaacugugacccauuccgucaacuuacuggaagauaagcacaaugggaaacuauguaagcucagaggaguggcuccccugcaucuugguaaaugcaacauagccggcuggauccuggggaauccugagugugaaucuuugucaacagcaaguagcugguccuacauuguugagaccucuucgucagacaacggaacuugcuauccaggcgauuuuaucgacuacgaggagcucagggagcagcugagcaguguguccucuuucgaacgguuugagauuuucccgaagacaagcuccuggcccaaucacgauucaaacaagggugucaccgccgcuuguccucaugcaggggccaaaaguuuuuauaagaaucugaucuggcucgugaaaaagggaaacagcuacccaaaauuaucuaaguccuauauaaaugacaagggcaaagaaguacugguucuuuggggcauccaccaccccucaacgagcgcugaucaacagaguuuguaccagaacgccgacgcguacguguucgucgggacuucucgcuauuccaagaaauuuaagccugagauugcaauccgaccacgugugagagaucaggagggaaggaugaauuaccauuggacccugguggaacccggugacaaaauuacauucgaggccacuggcaaccuagucguuccucgguaugcuuuugccauggaacgcaacgcagggagcggaaucauaauuucggauaccccagugcacgacugcaauacaaccugucaaacgccgaagggcgcuaucaacacuucucuccccuuccagaauauucauccuaucacaaucgguaaaugcccaaaguacguaaaguccaccaaacugagacuugccacugggcugaggaacauucccucaauacagagucggggauuguuuggcgcgaucgccggcuucauugaagggggauggacagguaugguggacggcugguauggguaccaccaccagaaugaacaaggaagcggcuaugcagcugaucucaaguccacccagaacgccaucgacgagauaacgaauaaagucaacucugugauugagaagaugaauacccaguuuacagcuguugguaaagaguucaaccaucuggaaaagcgcaucgaaaauuuaaacaagaaaguggaugacggguuccuggauaucuggacuuacaaugccgagcuccuuguccuguuggaaaacgagcgaacccuagacuaccacgauagcaaugugaagaaccuguaugagaaaguaagaucacagcucaagaacaaugcaaaagaaauuggcaacggauguuuugaguucuaccauaagugcgacaauacauguauggaaaguguuaagaacggcacuuaugauuacccuaaauauuccgaggaagccaagcugaauagggaggagaucgacggggugaaacuugaaagcacccggauuuaccaaauacuggcuaucuauucuacagucgcgucaaguuuggugcucgucgugagccugggagcaauuuccuuuuggaugugcucuaacgguucguuacagugccguaucuguaucuga

SEQ ID NO: 133985 - RNA, 1701 nt, Artificial Sequence; identical to SEQ ID NO: 132269
  derived and/or modified CDS sequence (opt3) from hemagglutinin__InfluenzaA__ADM95865

SEQ ID NO: 133986 - RNA, 1701 nt, Artificial Sequence
  derived and/or modified CDS sequence (opt3) from hemagglutinin__InfluenzaA__ADM95866
augaaggccauccuggugguccuccuuuacaccuucgcuacaacuaacgcagacacgcugugcauuggcuaucacgccaauaacagcaccgauacaguugacacuguguuggagaaaaauguaaccgugacacauuccgucaacuuacuggaagauaagcacaaugggaaacuauguaagcucagaggaguggcgccccugcaucuugguaaaugcaacauagcuggcuggauccuggggaauccugagugugaaucuuugucaaccgccaguagcugguccuacauuguugagaucucuucgucagacaacggaacuugcuauccaggcgauuuuauugacuacgaggagcucagggagcagcugagcaguguguccucuuucgaacgguuugagaucuucccgaagacaagcuccuggcccaaucacgauucaaacaagggugucaccgcagccuguccucaugcuggggcaaaaaguuuuuauaagaaucugauauggcucgugaaaaagggaaacagcuacccaaaauuaucuaaguccuauaucaaugacaagggcaaagaaguacugguucuuuggggcauucaccaccccucaacgagcgccgaucaacagaguuuguaccagaacgcugacgccuacguguucgucgggacuucucgcuauuccaagaaauuuaagccugagaucgcgauucgaccaaaagugcgugaucaggagggaagaaugaauuacuauuggacccugguggaacccggugacaagaucacauucgaggcaacuggcaaccuagucguuccuagguacgccuuugcuauggaacggaacgccgggagcggaauaauuaucucggauaccccagugcaugacugcaauacaaccugucaaacgccgaaaggcgcaauuaacacuucucuccccuuccagaauauccacccuaucacaauugguaagugcccaaaguauguaaaauccaccaagcugcgccuugugacugggcugagaaacguccccucaauacagaguaggggauuguuuggcgcuaucgccggcuucauugaagggggauggacagguaugguggacggcugguacggguaucaucaccagaaugaacaaggaagcggcuacgcggccgaucucaaauccacccagaacgcaaucgacaagauaacgaauaaaguuaacucugugauugagaagaugaauacccaguuuacagcugucgguaaggaguucaaccaccuggaaaaacggaucgagaauuuaaacaagaaaguggaugacggguuccuggauaucuggacuuacaaugccgaacuccuuguacuguuggagaacgaacgcacccuagacuaucaugauagcaauguuaagaaccuguacgagaaagugcgaucacagcucaagaacaaugcuaaggagauuggcaacggauguuuugaguucuaucacaaaugcgacaauacauguauggaaagugucaagaacggcacuuacgauuauccuaaauacuccgaagaggccaagcugaauagagaagagaucgacggggugaaacuugagagcaccaggauuuaucaaauacuggcaaucuacucuacagccgcuucaaguuugguccucgugguuagccugggagcgauuuccuuuuggaugugcucuaacgguucguuacagugccggaucuguaucuga

SEQ ID NO: 133987 - RNA, 1698 nt, Artificial Sequence; identical to SEQ ID NO: 133561
  derived and/or modified CDS sequence (opt3) from hemagglutinin__InfluenzaA__ADN06300

SEQ ID NO: 133988 - RNA, 1698 nt, Artificial Sequence
  derived and/or modified CDS sequence (opt3) from hemagglutinin__InfluenzaA__ADN06311
augaaggugaaacugcucguccuucugugcaccuugacagccacuuacgcugacacgaucuguauuggcuaucacgcaaacaauagcaccgauacaguugacacuguguuagagaagaacguaaccgugacacauuccgucaaucugcuagaaaacucucacaaugggaaacucugccugcuuaagggaauagcgccccugcaguuggguaacuguucaguggccggcuggauccucgggaauccugagugcgaacugcugauuaguaaagagagcugguccuacaucguugaaaagccaaacccggagaauggaaccuguuaucccggccauuucgcugauuacgaggaacucagagagcaauuaucuucggugucauccuuugaaagguucgagauuuuuccuaaggguaguuccuggccaaaccacacugucacaggggugucugccagcugcucccauaauggagagaacucauucuaucggaaucugcuuugguugaccggcaaaaacggccuguaccccaaucuaaguaagagcuaugcaaacaacaaagaaaaggagguacucguucuguggggagugcaccacccuccaaauaucgccgaccagaaaacgcuuuaccauacugaaaacgcuuacgucucugugguguccucacacuauagccgcaaguuuacccccgagauagcaaagcgaccuaaaguccgugaucaggaagggagaaucaauuacuauuggacacuguuggagccaggugacacuauuaucuucgaggccaacggcaaucucauugcuccgagguacgccuuugcgcugagucggggguucggaucuggcaucauaaacuccaaugcacccauggauaagugugacgccaaaugccagaccccucaaggugcuauuaacagcucguuaccauuucagaauguucaucccgugacaaucggggaauguccuaaguauguacgcucugccaaacugagaauggugaccggacucaggaacauuccauccauccagucacggggccuuuucggcgcaaucgcuggguuuauugagggagguuggacgggcauggucgaugggugguacggauaucaccaccagaaugaacaaggcagugguuacgccgcggaccaaaagagcacucagaacgccauaaaugggaucacaaacaaagugaauagcguuauugagaagaugaacacccaguucacugcagugggcaaggaauuuaacaaacuggagcgccgaauggagaauuugaacaagaaagucgaugacggauucaucgauauauggacauacaaugcugaacuacuggugcuccuggagaacgaaagaacccuugacuuccaugacucuaauguaaagaaccuguaugagaaaguuaagagccaguugaagaauaacgccaaagaaauuggcaaugggugcuuugaguucuaccacaaguguaacgaugagugcauggaaucagugaaaaauggaacguaugacuaccccaaguauagugaggaauccaaacucaacagggagaagaucgauggugucaagcuggagagcaugggcguguaccagaucuuagcuauuuauucuaccgucgccucaagucuggugcuacucguuagccugggggcaaucuccuuuuggaugugcucuaauggaucgcuucagugucggauuugcauauga

SEQ ID NO: 133989 - RNA, 1698 nt, Artificial Sequence
  derived and/or modified CDS sequence (opt3) from hemagglutinin__InfluenzaA__ADN06322
augaaggugaaacugcucguccuucugugcaccuucacagccacuuacgcugacacgaucuguauuggcuaucacgcaaacaauagcaccgauacaguugacacuguguuggagaagaacguaaccgugacacauuccgucaauuuacuggaaaacucucacaaugggaaacuaugccuccugaagggaauagcgccccuucagcuggguaacuguucaguggccggcuggaucuuggggaauccugagugcgaacuccugauuaguaaagagagcugguccuacaucguugaaaagccaaacccggagaauggaaccuguuaucccggccauuuugcugauuacgaggaacugagagagcaacucucuucggugagcucauucgaaagguuugagauuuucccuaaggagaguuccuggccaaaccacacugucacaggugugucugccagcugcucccauaauggggaaucaaguuuuuaucggaacuuacuguggcuuaccggcaaaaauggauuguaccccaaccugagcaagucuuaugcaaauaacaaagagaaggaaguucuaguacucuggggcgugcaccacccuccaaacauggucgaccagcgcacgcuguaccgaacugagaaugccuacguguccguggucucaagccauuauagucguaaauucacccccgaaaucgcuaagagaccuaagguuagggaucaggaggggcggauaaacuacuauuggacacuucuggagccaggagacacuaucauuuuugaagcaaaugguaacuugaucgccccgcgcuacgcuuucgcccucucuagaggcuuuggguccggaauuaucaauagcaacgcgcccaugggcaaaugugaugcaaagugccagaccccucaaggugccauaaauucgucucugccauuccagaacgugcaccccguaacaauuggggaguguccuaaauaugugagguccgcuaaguuacggauggucaccggacugcgcaauaucccaucaauucagagucgaggccucuuuggcgccaucgcaggguucaucgaaggagguuggacgggcaugguggacgggugguacggauaucaucaccagaacgagcaaggcagcgguuacgcugccgaucagaaauccacucagaaugcgauuaacgggauaacaaauaagguuaacucugugaucgaaaagaugaauacccaguuuacugccgucggcaaggaguucaacaaacuugagagaaggauggaaaaccugaauaaaaagguggacgauggauucauugacaucuggacauacaacgcagaguugcuaguacugcucgaaaaugagcggacccuggauuuucacgacagcaacguuaaaaaucuuuaugaaaaggugaaaucacaacugaagaacaaugcuaaggagauaggcaacgggugcuucgaguuuuaccauaaauguaaugacgaaugcauggagagugucaagaacggaacguaugauuaccccaaauauuccgaagagagcaaguugaaucgugagaaaauugacggugugaagcucgaaucuaugggcgucuaccagauccuggccaucuauucaaccguggcuaguagcuuaguucugcuagugucccucggggccauuucuuucuggaugugcucgaacggaagccugcagugucgcaucugcauuuga

SEQ ID NO: 133990 - RNA, 1698 nt, Artificial Sequence
  derived and/or modified CDS sequence (opt3) from hemagglutinin__InfluenzaA__ADN06344
augaaggugaaacugcucguccuucugugcaccuucacagccacuuacgcugacacgaucuguauuggcuaucacgcaaacaauagcaccgauacaguugacacuguguuggagaagaacguaaccgugacacauuccgucaauuuacuggaaaacucucacaaugggaaacuaugccuccugaagggaauagcgccccuucagcuggguaacuguucaguggccggcuggaucuuggggaauccugagugcgaacuccugauuaguaaagagagcugguccuacaucguugaaaagccaaacccggagaauggaaccuguuaucccggccauuuugcugauuacgaggaacugagagagcaacucucuucggugagcucauucgaaagguuugagauuuucccuaaggagaguuccuggccaaaccacacugucacaggugugucugccagcugcucccauaauggggaaucaaguuuuuaucggaacuuacuguggcuuaccggaaagaauggcuuguaccccaaccugagcaagucuuaugcaaauaacaaagagaaggaagugcuaguucucuggggcgugcaccacccuccauccaucucagaccagaaaacgcuguaccauacugagaacgccuacgucagcguggugaguucucacuauucccgcaaguucacccccgaaauagcuaagcgaccuaaaguccgugaucaggaggggagaaucaauuacuauuggacacuucuggagccaggagacacuauuaucuuugaagcaaacgguaauuugauugccccgagguacgcuuucgcccucagccggggcuuugggucgggaaucauaaacucuaaugcgcccauggauaagugugacgcaaaaugccagaccccucaaggcgccauuaacuccucacugccauuccagaauguucaucccgugacaaucggugaguguccuaaguauguacgcagugcuaaauuaagaauggugaccgggcugaggaacauuccaagcauccagucccggggacucuuuggcgccaucgcaggcuucauugaagggggauggacggguauggucgauggcugguacggguaucaccaccagaaugagcaaggaucuggcuacgcugccgaccagaaaagcacucagaacgcgauaaaugguaucacaaacaaaguaaauucaguuauugaaaagaugaacacccaguuuacugccguggggaaggaguucaauaaacuugagcgccgaauggaaaaccugaacaagaaagucgaugacggcuucaucgauauauggacauacaaugcagaguugcuagugcugcucgaaaacgagagaacccuggacuuucaugacaguaauguaaagaaccuuuaugaaaaaguuaagucccaacugaagaauaacgcuaaagagauuggaaauggcugcuucgaguuuuaccacaaguguaacgaugaaugcauggagagcgugaaaaaugggacguaugacuaccccaaguauucugaagagucaaaauugaacagggagaagaucgauggagucaagcucgaaaguauggguguguaccagauccuggccauuuauagcaccgucgcuuccucuuuagugcugcuaguuucgcucggcgccaucagcuucuggaugugcuccaaugggucacugcagugucggauuugcauauga

SEQ ID NO: 133991 - RNA, 1701 nt, Artificial Sequence; identical to SEQ ID NO: 133581
  derived and/or modified CDS sequence (opt3) from hemagglutinin__InfluenzaA__ADN06366

SEQ ID NO: 133992 - RNA, 1701 nt, Artificial Sequence
  derived and/or modified CDS sequence (opt3) from hemagglutinin__InfluenzaA__ADN26165
augaaggccauccuggugguccuccuuuacaccuucgcuacagcaaacgccgacacucugugcauuggcuaucacgcgaauaacagcacggauaccguugacacaguguuggagaaaaauguaacugugacccauuccgucaacuuacuggaagggaagcacaauggaaaacuauguaagcucagagguguggcuccccugcaucuuggcaaaugcaacauagccggguggauccugggaaauccugagugugaaucuuugucaacagcaaguagcugguccuacauuguugagaccucuucgucagauaacggcacuugcuauccaggugacuuuaucgauuacgaagaacucagggagcagcugagcaguguguccucuuucgaacgguuugagauuuucccgaagacaagcuccuggcccaaucacgacucaaacaagggggucaccgccgcuuguccucaugcaggagccaaaaguuuuuauaagaaucugaucuggcucauaaagaagggcaacagcuacccaaaauuaucuaaguccuauaucaaugauaagggcaaagaagugcugguacuuugggggauucaccaccccucaacgagcgcugaccaacagaguuuguaccagaacgccgaugcguacguuuucgugggaacuucucgcuauuccaagaaauuuaagccugagaucgcaauucgaccaaaaguccgugaccaggaggguagaaugaauuacuauuggacccugguggaacccggcgauaagaucacauucgaggccacugggaaccuaguggucccuagguacgcuuuugccauggaacggaacgcaggaagcggcauaauuaucucggacaccccaguucaugauugcaauacaaccugucaaacgccgaaaggugcuauuaacacuucucuccccuuccagaauauccacccuaucacaauugggaagugcccaaaguaugugaaauccaccaagcugcgccuugccacuggacugagaaacauacccucaauccagaguaggggcuuguuuggcgcgauugccggguucaucgagggagguuggacaggcaugguagacgggugguacggauaucaucaccagaaugaacaaggcagcgguuacgcagcugaccucaaauccacccagaacgccauagaugagauuacgaauaaggugaacucugucaucgagaaaaugaauacccaguuuacagcuguggggaaggaguucaaccaccuggagaagcggaucgaaaauuuaaacaaaaagguugacgauggcuuccuggacauuuggacuuacaaugccgagcuccuugugcuguuggaaaacgagcgcacccuagauuaucaugacagcaaugucaaaaaccuguacgagaaggugcgaucacagcucaaaaacaaugcaaaggaaaucggaaacggcuguuuugaguucuaucacaagugcgauaauacauguauggaaaguguuaaaaacgggacuuacgacuauccuaaguacuccgaggaagccaaacugaauagagaggagauugauggaguaaaacuugaaagcgcuaggauauaucaaauccuggcgauuuacucuaccguggcaucaaguuugguccucguggucagccugggugccaucuccuuuuggaugugcucuaacggcucguuacagugccggaucuguauuuga

SEQ ID NO: 133993 - RNA, 1701 nt, Artificial Sequence; identical to SEQ ID NO: 130897
  derived and/or modified CDS sequence (opt3) from hemagglutinin__InfluenzaA__ADN26175

SEQ ID NO: 133994 - RNA, 1701 nt, Artificial Sequence
  derived and/or modified CDS sequence (opt3) from hemagglutinin__InfluenzaA__ADN78194
augaaggccauccuggugguccuccuuuacaccuucgcuacaacuaacgcagacacgcugugcauuggcuaucacgccaauaacagcaccgauacaguugacacuguguuggagaaaaauguaaccgugacacauuccgucaacuuacuggaagauaagcacaaugggaaacuauguaagcucagaggaguggcgccccugcaucuugguaaaugcaacauagcuggcuggauccuggggaauccugagugugaaucuuugucaaccgccaguagcugguccuacauuguugagacuucuucgucagacaacggaacaugcuauccaggcgauuuuaucgacuacgaggagcucagggagcagcugagcaguguguccucuuucgaacgguuugagauuuucccgaagaccagcuccuggcccaaucacgauucaaacaagggugucacggcagccuguccucaugcuggggcaaaaaguuuuuauaagaaucugaucuggcucgugaaaaagggaaacagcuacccaaaauuaucuaaguccuauauaaaugacaagggcaaagaaguacugguucuuuggggcauccaccaccccucaacuagcgccgaucaacagaguuuguaccagaacgcugacgccuacguguucgucgggaccucucgcuauuccaagaaauuuaagccugagauugcgauccgaccaaaagugcgugaucaggagggaagaaugaauuacuauuggacacugguggaacccggugacaagauuacuuucgaggcaaccggcaaccuagucguuccuagguacgccuuugcuauggaacggaacgccgggagcggaaucauaauuucggauacaccagugcaugacugcaauaccacgugucaaacuccgaaaggcgcaaucaacacaucucuccccuuccagaauauucacccuaucaccaucgguaagugcccaaaguauguaaaauccacuaagcugcgccuugcuacagggcugagaaacgugcccucaauucagaguaggggauuguuuggcgccauagcgggcuucaucgaagggggauggaccgguauggucgacggcugguacggguaucaucaccagaaugaacaaggaagcggcuacgccgcagaucucaaauccacgcagaacgcuauugacaagaucaccaauaaagugaacucuguuauagagaagaugaauacacaguuuacugccguggguaaggaguucaaccaccuggaaaaacggauugagaauuuaaacaagaaagucgaugacgggcugcucgauaucuggaccuacaaugcugaacuucugguguugcuagagaacgaacgcacacuggacuaucaugauagcaauguaaagaaccucuacgagaaaguucgaucacagcugaagaacaaugccaaggagaucggcaacggauguuucgaauuuuaucacaaaugcgacaauacuuguauggagagugugaagaacggcaccuacgauuauccuaaauacuccgaagaggcaaaacuuaauagagaagagauugacggggucaagcuggagagcacaaggaucuaucaaauuuuggccauauacucuaccguggcuucaagucucguccuggugguuagcuuaggagcgaucuccuucuggaugugcucuaacgguucgcugcagugccggauuuguaucuga

SEQ ID NO: 133995 - RNA, 1701 nt, Artificial Sequence; identical to SEQ ID NO: 131881
  derived and/or modified CDS sequence (opt3) from hemagglutinin__InfluenzaA__ADN78195

SEQ ID NO: 133996 - RNA, 1701 nt, Artificial Sequence; identical to SEQ ID NO: 132269
  derived and/or modified CDS sequence (opt3) from hemagglutinin__InfluenzaA__ADN78212

SEQ ID NO: 133997 - RNA, 1701 nt, Artificial Sequence; identical to SEQ ID NO: 132269
  derived and/or modified CDS sequence (opt3) from hemagglutinin__InfluenzaA__ADN78221

SEQ ID NO: 133998 - RNA, 1698 nt, Artificial Sequence; identical to SEQ ID NO: 133988
  derived and/or modified CDS sequence (opt3) from hemagglutinin__InfluenzaA__ADN89050

SEQ ID NO: 133999 - RNA, 1698 nt, Artificial Sequence
  derived and/or modified CDS sequence (opt3) from hemagglutinin__InfluenzaA__ADN89061
augaaggugaaacugcucguccuucugugcaccuucacagccacuuacgcugacacgaucuguauuggcuaucacgcaaacaauagcaccgauacaguugacacuguguuggagaagaacguaaccgugacacauuccgucaauuuacuggaaaacucucacaaugggaaacuaugccuccugaagggaauagcgccccuucagcuggguaacuguucaguggccggcuggaucuuggggaauccugagugcgaacuccugauuaguaaagagagcugguccuacaucguugaaaagccaaacccggagaauggaaccuguuaucccggccauuuugcugauuacgaggaacugagagagcaacucucuucggugagcagcuucgaaagguuugagauuuucccuaaggagaguuccuggccaaaccacacugucacaggugugucugccagcugcucccauaauggggaaucaaguuuuuaucggaacuuacuguggcuuaccgagaaaaauggauuguaccccaaccugagcaagucuuaugcaaauaacaaagaaaaggaggugcuaguucucuggggcgugcaccacccuccauccaucucagaccagaaaacgcuguaccauacugaaaacgccuacgucagcguggugaguucucacuauucccgcaaguucacccccgagauagcuaagcgaccuaaaguccgugaucaggagggcagaaucaauuacuauuggacacuucuggaaccaggggacacuauuaucuuugaggcaaacggaaauuugauugccccgagguacgcuuucgcccucagccgggguuuuggcucggggaucauaaacucuaaugcgcccauggauaagugugacgcaaaaugccagaccccucaaggagccauuaacuccucacugccauuccagaauguucaucccgugacaaucggcgaauguccuaaguauguacgcagugcuaaauuaagaauggugaccggucugaggaacauuccaagcauccagucccgggggcucuuuggagccaucgcaggcuucauugagggcggguggacgggaauggucgaugguugguacggcuaucaccaccagaaugaacaagggucuggauacgcugccgaccagaagucaacucagaacgcgauaaaugagaucacaaacaaaguaaauucaguuauugagaagaugaacacccaguuuacugccgugggcaaggaguucaauaaacuugaacgccgaauggaaaaccugaacaagaaagucgaugacgguuucaucgauauauggacauacaaugcagaguugcuagugcugcucgaaaacgagagaacccuggacuuucaugacaguaauguaaagaaccuuuaugagaaaguuaagaaucaacugaagaacaaugcuaaagaaauugggaacggcugcuucgaguuuuaccacaaguguaaugaugaaugcauggaguccgugaaaaacggaacguaugacuaccccaaguauagcgaggaaucuaaauugaauagggagaagaucgauggcgucaagcucgaaucaauggggguguaccagauccuggccauuuauaguaccgucgcuagcuccuuagugcugcuaguuucucucggagccaucucguucuggaugugcagcaacgguucccugcagugucggauuugcauauga

SEQ ID NO: 134000 - RNA, 1698 nt, Artificial Sequence; identical to SEQ ID NO: 133990
  derived and/or modified CDS sequence (opt3) from hemagglutinin__InfluenzaA__ADN89072

SEQ ID NO: 134001 - RNA, 1698 nt, Artificial Sequence
  derived and/or modified CDS sequence (opt3) from hemagglutinin__InfluenzaA__ADN89083
augaaggugaaacugcucguccuucugugcaccuucacagccacuuacgcugacacgaucuguauuggcuaucacgcaaacaauagcaccgauacaguugacacuguguuggagaagaacguaaccgugacacauuccgucaauuuacuggaaaacucucacaaugggaaacuaugccuccugaagggaauagcgccccuucagcuggguaacuguucaguggccggcuggaucuuggggaauccugagugcgaacuccugauuaguaaagagagcugguccuacaucguugaaaagccaaacccggagaauggaaccuguuaucccggccauuuugcugauuacgaggaacugagagagcaacucucuucggugagcucauucgaaagguuugagauuuucccuaaggagaguuccuggccaaaccacacugucacaggugugucugccagcugcucccauaauggggaaaacucauuuuaucggaauuuacuguggcuuaccggaaagaacggcuuguaccccaaucugaguaagagcuaugcaaacaacaaagagaaggaagugcuaguucucuggggcgugcaccacccuccaaauauggccgaccagaaaacgcuguaccauacugagaacgcuuacgucucugugguguccucacacuauagccgcaaguucacccccgaaaucgcaaagcgaccuaaaguccgugaucaggaggggagaauaaauuacuauuggacacuucuggagccaggagacacuaucauuuuugaagccaacgguaauuugaucgcuccgagguacgccuucgcgcucagucggggcuuugggucuggaauuaucaacuccaaugcacccauggauaagugugacgccaaaugccagaccccucaaggcgcuauaaacagcucgcugccauuccagaauguucaucccgugacaauuggugaguguccuaaguauguacgcucugccaaauuaagaauggugaccgggcugaggaacaucccauccauucagucacggggacucuuuggcgcaaucgcuggcuucaucgaagggggauggacggguauggucgauggcugguacggguaucaccaccagaaugagcaaggaaguggcuacgccgcggaccagaaaagcacucagaacgccauuaaugguauaacaaacaaaguaaauuccguuaucgaaaagaugaacacccaguuuacugcaguggggaaggaguucaacaaacuugagcgccgaauggaaaaucugaacaagaaagucgaugacggcuucauugauaucuggacauacaaugcugaguugcuagugcugcucgaaaacgagagaacccuggacuuucaugacucuaauguaaagaaccuuuaugaaaaaguuaagagccaacugaagaauaacgccaaagagauaggaaauggcugcuucgaguuuuaccacaaguguaacgaugaaugcauggagucagugaaaaaugggacguaugacuaccccaaguauagugaagaguccaaauugaacagggagaagauugauggagucaagcucgaaagcauggguguguaccagauccuggcuaucuauucuaccgucgccucaaguuuagugcugcuaguuagccucggcgcaauuuccuucuggaugugcucuaaugggucgcugcagugucggaucugcauuuga

SEQ ID NO: 134002 - RNA, 1698 nt, Artificial Sequence
  derived and/or modified CDS sequence (opt3) from hemagglutinin__InfluenzaA__ADN89094
augaaggugaaacugcucguccuucugugcaccuucacagccacuuacgcugacacgaucuguauuggcuaucacgcaaacaauagcaccgauacaguugacacugccuuggagaagaacgugaccguaacacauuccgugaauuuacuggaaaacucucacaaugggaaacuaugccuccugaagggaauagcgccccuucagcuggguaacuguucagucgcuggcuggaucuuggggaauccugagugcgaacuccugauuaguaaagagagcugguccuacaucguggaaaagccaaacccggagaauggaaccuguuaucccggccauuuugccgauuacgaggaacugagagagcaacucucuucgguuagcagcuucgaaagguuugagauuuucccuaaggagaguuccuggccaaaccacacugugacaggugucucugcaagcugcucccauaauggggaaaacucauuuuaucggaauuuacuguggcuuaccgggaaaaacggcuuguaccccaaucugaguaagagcuaugccaacaacaaaggcaaggaggugcuaguacucuggggaguucaccacccuccaaauaucgcugaccagaaaacgcuguaccauacugaaaacgcauacgugucugucguguccucacacuauagccgcaaguucacccccgagauagccaagcgaccuaaagugcgugaucaggaaggaagaaucaauuacuauuggacacuucuggagccaggugacacuauuaucuuugaggcuaacggcaauuugauugccccgagguacgcguucgcacucagucggggguuuggaucuggcaucauaaacuccaaugcccccauggauaagugugacgcuaaaugccagaccccucaaggugccauuaacagcucgcugccauuccagaauguccaucccguuacaaucggggaauguccuaaguaugugcgcucugcaaaauuaagaaugguaaccggacugaggaacauuccauccauccagucacggggccucuuuggcgcuaucgccggguucauugagggagguuggacgggcaugguggaugggugguacggauaucaccaccagaaugaacaaggcagugguuacgcggccgaccagaagucaacucagaacgcaauaaaugggaucacaaacaaagucaauuccgugauugagaagaugaacacccaguuuacugcuguuggcaaggaguucaacaaacuugaacgccgaauggagaaucugaacaagaaaguggaugacggauucaucgauauauggacauacaaugccgaauugcuaguccugcucgagaacgaaagaacccuggacuuucaugacucuaaugugaagaaccuuuaugagaaaguaaagagccaacugaagaauaacgcuaaagaaauuggcaaugggugcuucgaguuuuaccacaaguguaacgaugagugcauggaaucaguuaaaaauggaacguaugacuaccccaaguauagugaggaauccaaauugaacagggagaagaucgauggugugaagcucgagagcaugggcgucuaccagauccuggccauuuauucuaccguggcaucaaguuuaguccugcuagugagccucggggccaucuccuucuggaugugcucuaauggaucgcugcagugucggauuugcauauga

SEQ ID NO: 134003 - RNA, 1698 nt, Artificial Sequence
  derived and/or modified CDS sequence (opt3) from hemagglutinin__InfluenzaA__ADN89116
augaaggugaaacugcucauccuucugugcaccuucacagccacuuacgcugacacgauuuguauaggcuaucacgcaaacaauagcaccgauacagucgacacuguuuuggagaagaacgugaccguaacacauuccgugaauuuacuggaaaacucucacaaugggaaacuaugccuccugaagggaaucgcgccccuucagcuggguaacuguucagucgccggcuggauuuuggggaauccugagugcgaacuccugaucaguaaagagagcugguccuacauuguggaaaagccaaacccggagaauggaaccuguuaucccggccauuuugcugauuacgaggaacugagagagcaacucucuucgguuagcucauucgaaagguuugagaucuucccuaaggagaguuccuggccaaaccacacugugacaggugucucugccagcugcucccauaauggggaaucaaguuuuuaucggaacuuacuguggcuuaccgugaaaaauggauuguaccccaaccugagcaagucuuaugcaaauaacaaagagaaggaaguucuaguacucuggggcgugcaccacccuccaaacauagucgaccagaaaacgcuguaccgcacugagaaugccuacguguccguggucucaagccauuauagucgaaaguucacccccgaaaucgcuaagcguccuaaaguuagagaucaggagggcaggauuaacuacuauuggacacuucuggagccaggggacacuaucauuuuugaagcaaauggaaacuugaucgccccgcgguacgcuuucgcccucucucgcgguuuuggcuccgggauaauuaauagcaacgcgcccauggauaagugugacgcaaaaugccagaccccuagaggagccaucaauucgucucugccauuccaaaacgugcaccccguaacaauuggcgaguguccuaaguaugugagguccgcuaaauuacggauggucaccggucugcgcaauaucccaucaauccagagucgagggcucuuuggagccauugcaggcuucauagaaggcggguggacgggaaugguggaugguugguacggcuaucaucaccagaacgagcaggggagcggauacgcugccgaccaaaaguccacucagaaugcgaucaacggcauuacaaauaaaguuaacucugugaucgaaaagaugaauacccaguuuacugccgucgguaaggaguucaacaaccuugagagaaggauggaaaaucugaacaaaaagguggaugacggguucauagauauuuggacauacaaugcagaguugcuaguacugcucgaaaacgagcggacccuggacuuucacgacagcaauguuaaaaaccuuuaugaaaaggugaaaucacagcugaagaauaacgcuaaggagaucggcaauggaugcuucgaguuuuaccauaaauguaacgaugaaugcauggagagugucaagaauggcacguaugacuaccccaaauauuccgaagagagcaaguugaaccgugagaaaaucgauggggugaagcucgaaucuaugggagucuaccaaauucuggccaucuauucaaccguggcuaguagcuuaguucugcuagugucccucggugccauuucuuucuggaugugcucgaauggcagccugcagugucgcauaugcaucuga

SEQ ID NO: 134004 - RNA, 1698 nt, Artificial Sequence
  derived and/or modified CDS sequence (opt3) from hemagglutinin__InfluenzaA__ADN89127
augaaggugaaacugcucguccuucugugcaccuugacagccacuuacgcugacacgaucuguauuggcuaucacgcaaacaauagcaccgauacaguugacacuguguuagagaagaacguaaccgugacacauuccgucaaucugcuagaaaacucucacaaugggaaacucugccugcuuaagggaauagcgccccugcaguuggguaacuguucaguggccggcuggauccucgggaauccugagugcgaacugcugauuaguaaagagagcugguccuacaucguugaaaagccaaacccggagaauggaaccuguuaucccggccauuucgcugauuacgaggaacucagagagcaauuaucuucggugucauccuuugaaagguucgagauuuuuccuaaggguaguuccuggccaaaccacacugucacaggggugucugccagcugcucccauaauggagagaacucauucuaucggaaucugcuuugguugaccggcaaaaacggccuguaccccaaucuaaguaagagcuaugcaaacaacaaagaaaaggagguacucguucuguggggagugcaccacccuccaaauaucgccgaccagaaaacgcuuuaccauacugaaaacgcuuacgucucugugguguccucacacuauagccgcaaguuuacccccgagauagcaaagcgaccuaaaguccgugaucaggaagggagaaucaauuacuauuggacacuguuggagccaggugacacuauuaucuucgaggccaacggcaaucucauugcuccgagguacgccuuugcgcugagucggggguucggaucuggcaucauaaacuccaaugcacccauggauaagugugacgccaaaugccagaccccucaaggugcuauuaacagcucguuaccauuucagaauguucaucccgugacaaucggggaauguccuaaguauguacgcucugccaaacugagaauggugaccggacucaggaacauuccauccauccagucacggggccuuuucggcgcaaucgcuggguuuauugagggagguuggacgggcauggucgaugggugguacggauaucaccaccagaaugaacaaggcagugguuacgccgcggaccaaaagagcacucagaacgccauaaaugggaucacaaacaaagugaauagcguuauugagaagaugaacacccaguucacugcagugggcaaggaauuuaacaaacuggagcgccgaauggagaauuugaacaagaaagucgaugacggauucaucgauauauggacauacaaugcugaacuacuggugcuccuggagaacgaaagaacccuugacuuccaugacucuaauguaaagaaccuguaugagaaaguuaagagccaguugaagaauaacgccgaagagauuggcaaugggugcuuugaguucuaccacaaauguaacgaugaaugcauggagucagugaagaauggaacguaugacuaccccaaauauagugaagaguccaagcucaacagggagaaaaucgauggugucaagcuggaaagcaugggcguguaccagaucuuagcuauuuauucuaccgucgccucaagucuggugcuacucguuagccugggggcaaucuccuuuuggaugugcucuaauggaucgcuucagugucggauuugcauauga

SEQ ID NO: 134005 - RNA, 1698 nt, Artificial Sequence
  derived and/or modified CDS sequence (opt3) from hemagglutinin__InfluenzaA__ADN89149
augaaggugaaacugcucguccuucugugcaccuucacagccacuuacgcugacacgaucuguauuggcuaucacgcaaacaauagcaccgauacaguugacacuguguuggagaagaacguaaccgugacacauuccgucaauuuacuggaaaacucucacaaugggaaacuaugccuccugaagggaauagcgccccuucagcuggguaacuguucaguggccggcuggaucuuggggaauccugagugcgaacuccugauuaguaaagagagcugguccuacaucguugaaaagccaaacccggagaauggaaccuguuaucccggccauuuugcugauuacgaggaacugagagagcaacucucuucggugagcagcuucgaaagguuugagauuuucccuaaggagaguuccuggccaaaccacacugucacaggugugucugccagcugcucccauaauggggaaucaaguuuuuaucggaacuuacuguggcuuaccgagaaaaauggauuguaccccaaccugagcaagucuuaugcaaauaacaaagaaaaggagguucuaguacucuggggcgugcaccacccuccauccaucucagaccagaaaacgcuguaccauacugaaaacgccuacgucagcguggugaguucucacuauucccgcaaguucacccccgaggucgcuaagcgaccuaaaguucgugaucaggagggcagaauaaauuacuauuggacacuucuggaaccaggggacacuaucauuuuugaggcaaacggaaauuugaucgccccgagguacgcuuucgcccucagccgggguuuuggcucggggauuaucaacucuaaugcgcccauggauaagugugacgcaaaaugccagaccccucaaggagccauaaacuccucacugccauuccagaaugugcaucccguaacaauuggcgaauguccuaaguaugugcgcagugcuaaauuaagaauggucaccggucugaggaacaucccaagcauucagucccgggggcucuuuggagccaucgcaggcuucaucgagggcggguggacgggaaugguggaugguugguacggcuaucaccaccagaaugaacaagggucuggauacgcugccgaccagaagucaacucagaacgcgauuaauggcauaacaaacaaaguuaauucagugaucgagaagaugaacacccaguuuacugccgucgguaaggaguucaauaaacuugaacgccgaauggagaaccugaacaagaaaguggaugacggguucauugauaucuggacauacaaugcagaauugcuaguacugcucgagaacgaaagaacccuggacuuucaugacaguaauguuaagaaccuuuaugagaaagugaagucccaacugaagaauaacgcuaaagagauaggcaauggaugcuucgaauuuuaccacaaguguaacgaugagugcauggaaagcgucaaaaauggcacguaugacuaccccaaguauucugaggagucaaaauugaacagggaaaagauugauggggugaagcucgagaguaugggagucuaccagauccuggccaucuauagcaccguggcuuccucuuuaguucugcuagugucgcucggugccauuagcuucuggaugugcuccaauggcucacugcagugucggaucugcauuuga

SEQ ID NO: 134006 - RNA, 1698 nt, Artificial Sequence; identical to SEQ ID NO: 133561
  derived and/or modified CDS sequence (opt3) from hemagglutinin__InfluenzaA__ADN89171

SEQ ID NO: 134007 - RNA, 1698 nt, Artificial Sequence
  derived and/or modified CDS sequence (opt3) from hemagglutinin__InfluenzaA__ADN89182
augaaggugaaacugcucguccuucugugcaccuugacagccacuuacgcugacacgaucuguauuggcuaucacgcaaacaauagcaccgauacaguugacacuguguuagagaagaacguaaccgugacacauuccgucaaucugcuagaaaacucucacaaugggaaacucugccugcuuaagggaauagcgccccugcaguuggguaacuguucaguggccggcuggauccucgggaauccugagugcgaacugcugauuaguaaagagagcugguccuacaucguugaaaagccaaacccggagaauggaaccuguuaucccggccauuucgcugauuacgaggaacucagagagcaauuaucuucggugagcucauuugaaagguucgagauuuuuccuaaggagaguuccuggccaaaccacacugucacaggugugucugccagcugcucccauaauggggaaucaaguuucuaucggaaccugcuuugguugaccggcaaaaauggacuguaccccaaccuaagcaagucuuaugcaaauaacaaagagaaggaaguacucguucuguggggcgugcaccacccuccaaacaucgucgaccagaaaacgcuuuaccgcacugagaaugccuacguguccguggucucaagccauuauagucgaaaguuuacccccgaaauagcuaagcguccuaaaguuagagaucaggaggggaggaucaacuacuauuggacacuguuggagccaggagacacuauuaucuucgaagcaaaugguaaccucauugccccgcgguacgcuuuugcccugucucgcggcuucggguccggaaucauaaauagcaacgcgcccauggauaagugugacgcaaaaugccagaccccucaaggcgccauuaauucgucuuuaccauuucagaacgugcaccccguaacaaucggugaguguccuaaguaugugagauccgcuaaacugaggauggucaccgggcuccggaauauuccaucaauccagagucgcggacuuuucggcgccaucgcaggcuuuauugaagggggauggacggguaugguggauggcugguacggguaucaucaccagaacgagcaaggaagcggcuacgcugccgaccagaaguccacucagaaugcgauaaacgguaucacaaauaaaguuaacucugugauugaaaagaugaauacccaguucacugccgucgggaaggaguuuaacaaacuggagcgaagaauggaaaacuugaauaagaaaguggaugacggcuucaucgauauauggacauacaacgcagagcuacugguacuccuggaaaaugagaggacccuugacuuccacgacagcaacguuaagaaucuguaugaaaaagugaagucacaauugaagaacaaugcuaaagagauuggaaacggcugcuuugaguucuaccauaaguguaaugaugaaugcauggagagugucaaaaacgggacguaugacuaccccaaguauuccgaagagagcaaacucaaucgggagaagaucgauggagugaagcuggaaucuaugggugucuaccagaucuuagccauuuauucaaccguggcuaguagccugguucuacucgugucccugggcgccaucucuuuuuggaugugcucgaacgggagccuucagugucguauuugcauauga

SEQ ID NO: 134008 - RNA, 1698 nt, Artificial Sequence; identical to SEQ ID NO: 133561
  derived and/or modified CDS sequence (opt3) from hemagglutinin__InfluenzaA__ADN89193

SEQ ID NO: 134009 - RNA, 1698 nt, Artificial Sequence; identical to SEQ ID NO: 133561
  derived and/or modified CDS sequence (opt3) from hemagglutinin__InfluenzaA__ADN89204

SEQ ID NO: 134010 - RNA, 1698 nt, Artificial Sequence; identical to SEQ ID NO: 133988
  derived and/or modified CDS sequence (opt3) from hemagglutinin__InfluenzaA__ADN89215

SEQ ID NO: 134011 - RNA, 1698 nt, Artificial Sequence
  derived and/or modified CDS sequence (opt3) from hemagglutinin__InfluenzaA__ADN89226
augaaggugaaacugcucguccuucugugcaccuucgccgcuacauacgcagacacuaucuguauuggcuaucacgccaacaauagcacggauaccguugacacaguguuggagaagaacguaacugugacccauuccgucaauuuacuggaaaacucucacaaugggaaacuaugccuccugaagggaauagcgccccuucagcuggguaacuguucaguggcuggcuggaucuuggggaauccugagugcgaacuccugauuaguaaagagagcugguccuacaucguugaaaagccaaacccggagaauggaacauguuaucccggccauuuugccgauuacgaggaacugagagagcaacucucuucggugagcucauucgaaagguuugagauuuucccuaaggagaguuccuggccaaaccacaccgucacuggugugucugcaagcugcucccauaauggggaaucaaguuuuuaucggaacuuacuguggcuuacagagaaaaauggauuguaccccaaccugagcaagucuuaugccaauaacaaagaaaaggagguucuaguacucuggggcgugcaccacccuccauccaucucagaccagaaaacccuguaccauacggaaaacgcuuacgucagcguggugaguucucacuauucccgcaaguucacucccgagauagcaaagcgaccuaaaguccgugaucaggagggcagaaucaauuacuauuggacccuucuggaaccaggggacacaauuaucuuugaggccaacggaaauuugauugcuccgagguacgccuucgcgcucaaccgggguuuuggcagcgggaucauaaauucgaacgcacccauggauaagugugacgccaaaugccagacuccucaaggagcuauuaauucuucccugccauuccagaacguucaucccgugaccaucggcgaauguccuaaguauguacgcucagccaaauuaagaauggugacaggucugaggaauauuccaaguguccagagccgggggcucuuuggagcaaucgcuggcuucaucgagggcggguggaccggaaugguggaugguugguacggcuaucaccaccagaacgaacaaggguccggauacgccgcggaccagaagucuacgcagaaugccauuaacggcauaacuaauaaaguuaacagcgugaucgagaagaugaauacacaguuuaccgcagucgguaaggaguucaacaaacuugaacgccgaauggagaaccugaauaagaaaguggaugacggguucauugauaucuggacuuacaacgcugaauugcuaguacugcucgagaaugaaagaacacuggacuuucaugacucaaacguuaagaaucuuuaugagaaagugaagaaccaacugaagaauaacgccaaagagauaggcaauggaugcuucgaauuuuaccacaaguguaacgaugagugcauggaaagugucaaaaauggcaccuaugacuaccccaaguauuccgaggagagcaaauugaacagggaaaagauugauggggugaagcucgagucuaugggagucuaccagauccuggcuaucuauucaacgguggccaguagcuuaguucugcuagugucccucggugcaauuucuuucuggaugugcucgaauggcagccugcagugucggaucugcauuuga

SEQ ID NO: 134012 - RNA, 1698 nt, Artificial Sequence; identical to SEQ ID NO: 133988
  derived and/or modified CDS sequence (opt3) from hemagglutinin__InfluenzaA__ADN89237

SEQ ID NO: 134013 - RNA, 1698 nt, Artificial Sequence
  derived and/or modified CDS sequence (opt3) from hemagglutinin__InfluenzaA__ADN89248
augaaggugaaacugcucguccuucugugcaccuucacagccacuuacgcugacacgaucuguauuggcuaucacgcaaacaauagcaccgauacaguugacacuguguuggagaagaacguaaccgugacacauuccgucaauuuacuggaaaacucucacaaugggaaacuaugccuccugaagggaauagcgccccuucagcuggguaacuguucaaucgccggcuggauuuuggggaauccugagugcgaacuccugaucaguaaagagagcugguccuacauuguggaaaagccaaacccggagaauggaaccuguuaucccggccauuuugcugauuacgaggaacugagagagcaacucucuucgguuagcucauucgaaagguuugagaucuucccuaaggagaguuccuggccaaaccacacugugacaggugucucugccagcugcucccauaauggggaaucaaguuuuuaucggaacuuacuguggcuuaccggaaagaauggcuuguaccccaaccugagcaagucuuaugcaaauaacaaagagaaggaagugcuaguacucuggggcguucaccacccuccauccauaucagaccagaaaacgcuguaccauacugagaacgccuacgugagcgucgugaguucucacuauucccgcaaguucacccccgaaaucgcuaagcgaccuaaagugcgugaucaggaggggagaauuaauuacuauuggacacuucuggagccaggagacacuaucauuuuugaagcaaacgguaauuugaucgccccgagguacgcuuucgcccucagccggggcuuugggucgggaauaauuaacucuaaugcgcccauggauaagugugacgcaaaaugccagaccccucaaggcgccaucaacuccucacugccauuccagaauguccaucccguuacaauuggugaguguccuaaguaugugcgcagugcuaaauuaagaaugguaaccgggcugaggaacaucccaagcauccagucccggggacucuuuggcgccauugcaggcuucauagaagggggauggacggguaugguggauggcugguacggguaucaccaccagaaugagcaaggaucuggcuacgcugccgaccagaaaagcacucagaacgcgaucaaugguauuacaaacaaagucaauucagugaucgaaaagaugaacacccaguuuacugccguugggaaggaguucaauaaacuugagcgccgaauggaaaaccugaacaagaaaguggaugacggcuucauagauauuuggacauacaaugcagaguugcuaguccugcucgaaaacgagagaacccuggacuuucaugacaguaaugugaagaaccuuuaugaaaaaguaaagucccaacugaagaauaacgcuaaagagaucggaaauggcugcuucgaguuuuaccacaaguguaacgaugaaugcauggagagcguuaaaaaugggacguaugacuaccccaaguauucugaagagucaaaauugaacagggagaagaucgauggagugaagcucgaaaguaugggugucuaccagauucuggccaucuauagcaccguggcuuccucuuuaguccugcuagugucgcucggcgccauuagcuucuggaugugcuccaaugggucacugcagugucggauaugcaucuga

SEQ ID NO: 134014 - RNA, 1698 nt, Artificial Sequence; identical to SEQ ID NO: 134001
  derived and/or modified CDS sequence (opt3) from hemagglutinin__InfluenzaA__ADN89259

SEQ ID NO: 134015 - RNA, 1698 nt, Artificial Sequence
  derived and/or modified CDS sequence (opt3) from hemagglutinin__InfluenzaA__ADN89281
augaaggugaaacugcucguccuucugugcaccuucacagccacuuacgcugacacgaucuguauuggcuaucacgcaaacaauagcaccgauacaguugacacuguguuggagaagaacguaaccgugacacauuccgucaauuuacuggaaaacucucacaaugggaaacuaugccuccugaagggaauagcgccccuucagcuggguaacuguucaguggccggcuggaucuuggggaauccugagugcgaacuccugauuaguaaagagagcugguccuacaucguugaaaagccaaacccggagaauggaaccuguuaucccggccauuuugcugauuacgaggaacugagagagcaacucucuucggugagcagcuucgaaagguuugagauuuucccuaaggagaguuccuggccaaaccacacugucacaggugugucugccagcugcucccauaauggggaaucaaguuuuuaucggaacuuacuguggcuuaccgagaaaaauggauuguaccccaaccugagcaagucuuaugcaaauaacaaagaaaaggaggugcuaguucucuggggcgugcaccacccuccauccaucucagaccagaaaacgcuguaccauacugaaaacgccuacgucagcguggugaguucucacuauucccgcaaguucacccccgagauagcuaagcgaccuaaaguccgugaucaggagggcagaaucaauuacuauuggacacuucuggaaccaggggacacuauuaucuuugaggcaaacggaaauuugauugccccgagguacgcuuucgcccucagccgggguuuuggcucggggaucauaaacucuaaugcgcccauggauaagugugacgcaaaaugccagaccccucaaggagccauuaacuccucacugccauuccagaauguucaucccgugacaaucggcgaauguccuaaguauguacgcagugcuaaauuaagaauggugaccggucugaggaacauuccaagcauccagucccgggggcucuuuggagccaucgcaggcuucauugagggcggguggacgggaauggucgaugguugguacggcuaucaccaccagaaugaacaagggucuggauacgcugccgaccagaagucaacucagaacgcgauaaauggcaucacaaacaaaguaaauucaguuauugagaagaugaacacccaguuuacugccguggguaaggaguucaauaaacuugaacgccgaauggagaaccugaacaagaaagucgaugacggguucaucgauauauggacauacaaugcagaauugcuagugcugcucgagaacgaaagaacccuggacuuucaugacaguaauguaaagaaccuuuaugagaaaguuaagaaucaacugaagaacaaugcuaaagagauuggcaacggaugcuucgaauuuuaccacaaguguaaugaugagugcauggaauccgugaaaaacggcacguaugacuaccccaaguauagcgaggagucuaaauugaauagggaaaagaucgauggggucaagcucgagucaaugggaguguaccagauccuggccauuuauaguaccgucgcuagcuccuuagugcugcuaguuucucucggugccaucucguucuggaugugcagcaacggcucccugcagugucggauuugcauauga

SEQ ID NO: 134016 - RNA, 1698 nt, Artificial Sequence; identical to SEQ ID NO: 134015
  derived and/or modified CDS sequence (opt3) from hemagglutinin__InfluenzaA__ADN89292

SEQ ID NO: 134017 - RNA, 1698 nt, Artificial Sequence; identical to SEQ ID NO: 134015
  derived and/or modified CDS sequence (opt3) from hemagglutinin__InfluenzaA__ADN89303

SEQ ID NO: 134018 - RNA, 1698 nt, Artificial Sequence; identical to SEQ ID NO: 131674
  derived and/or modified CDS sequence (opt3) from hemagglutinin__InfluenzaA__ADN89314

SEQ ID NO: 134019 - RNA, 1698 nt, Artificial Sequence; identical to SEQ ID NO: 131179
  derived and/or modified CDS sequence (opt3) from hemagglutinin__InfluenzaA__ADN89325

SEQ ID NO: 134020 - RNA, 1698 nt, Artificial Sequence
  derived and/or modified CDS sequence (opt3) from hemagglutinin__InfluenzaA__ADN89336
augaaggugaaacugcucguccuucugugcaccuucacagccacuuacgcugacacgaucuguauuggcuaucacgcaaacaauagcaccgauacaguugacacuguguuggagaagaacguaaccgugacacauuccgucaauuuacuggaaaacucucacaaugggaaacuaugccuccugaagggaauagcgccccuucagcuggguaacuguucaguggccggcuggaucuuggggaauccugagugcgaacuccugauuaguaaagagagcugguccuacaucguugaaaagccaaacccggagaauggaaccuguuaucccggccauuuugcugauuacgaggaacugagagagcaacucucuucggugagcucauucgaaagguuugagauuuucccuaaggagaguuccuggccaaaccacacugucacaggugugucugccagcugcucccauaauggggaacggucauuuuaucgcaacuuacuguggcuuaccggaaagaauggcuuguaccccaaccugaguaagagcuaugcaaauaacaaagagaaggaagugcuaguucucuggggcgugcaccacccuccagacaucggggaucagaaaacgcuguaccauacugagaacgccuacgucucugugguguccucacacuauagccgaaaguucacccccgaaauagcuaagcguccuaaagucagagaccaggagggaaggaucaauuacuauuggacacuucuggagccaggugauacuauuaucuuugaagcaaacggcaauuugauugccccgcgguacgcuuucgcccucagucgcggguuuggaucuggcaucauaaacuccaaugcgcccauggacaagugugaugcaaaaugccagaccccucaaggugccauuaacagcucgcugccauuccagaauguucaucccgugacaaucggggaguguccuaaguauguaagaucugcuaaauuaaggauggugaccggacugcggaacauuccauccauccagucacgcggccucuuuggcgccaucgcaggguucauugaaggagguuggacgggcauggucgacgggugguacggauaucaccaccagaaugagcaaggcagugguuacgcugccgaucagaaaagcacucagaacgcgauaaaugggaucacaaacaaaguaaauuccguuauugaaaagaugaacacccaguuuacugccgugggcaaggaguucaauaaacuugagcgaagaauggaaaaccugaacaagaaagucgacgauggauucaucgacauauggacauacaaugcagaguugcuagugcugcucgaaaacgagaggacccuggacuuucaugauucuaauguaaagaaccuuuaugaaaaaguuaagagccaacugaagaauaacgcuaaagagauuggcaaugggugcuucgaguuuuaccacaaguguaacgacgaaugcauggagucagugaaaaauggaacguaugauuaccccaaguauagugaagaguccaaauugaaccgggagaagaucgacggugucaagcucgaaagcaugggcguguaccagauccuggccauuuauucuaccgucgcuucaaguuuagugcugcuaguuagccucggggccaucuccuucuggaugugcucuaauggaucgcugcagugucguauuugcauauga

SEQ ID NO: 134021 - RNA, 1698 nt, Artificial Sequence; identical to SEQ ID NO: 134011
  derived and/or modified CDS sequence (opt3) from hemagglutinin__InfluenzaA__ADN89347

SEQ ID NO: 134022 - RNA, 1698 nt, Artificial Sequence; identical to SEQ ID NO: 131179
  derived and/or modified CDS sequence (opt3) from hemagglutinin__InfluenzaA__ADN89358

SEQ ID NO: 134023 - RNA, 1698 nt, Artificial Sequence
  derived and/or modified CDS sequence (opt3) from hemagglutinin__InfluenzaA__ADN89369
augaaggugaaacugcucguccuucugugcaccuucacagccacuuacgcugacacgaucuguauuggcuaucacgcaaacaauagcaccgauacaguugacacuguguuggagaagaacguaaccgugacacauuccgucaauuuacuggaaaacucucacaaugggaaacuaugccuccugaagggaauagcgccccuucagcuggguaacuguucaguggccggcuggaucuuggggaauccugagugcgaacuccugauuaguaaagagagcugguccuacaucguugaaaagccaaacccggagaauggaaccuguuaucccggccauuuugcugauuacgaggaacugagagagcaacucucuucggugagcucauucgaaagguuugagauuuucccuaaggagaguuccuggccaaaccacacugucacaggugugucugccagcugcucccauaauggggaaucaaguuuuuaucggaacuuacuguggcuuaccguaaagaauggauuguaccccaaccugagcaaaucuuaugcaaauaacaaagagaaggaaguucuagugcucuggggcguccaccacccuccaaacaucguggaccagaaaacgcuguaccgcacugagaaugccuacguguccgucguuucaagccauuauagucgaaaguucauacccgaaaucgcuaagcguccuaaagugagagaucaggagggcaggauuaacuacuauuggacccuucuggagccaggggacacaaucauuuuugaagcaaauggaaacuugaucgccccgcgguacgcuuucgcccucucucgcgguuuuggcuccgggauaauuaauagcaacgcgcccauggauaagugugacgcaaaaugccagacuccuagaggagccaucaauucgucucugccauuccaaaacguacaccccgugaccauuggcgaguguccuaaguaugucagguccgcuaaauuacggauggugacaggucugcgcaauaucccaucaauccagagucgagggcucuuuggagccauugcaggcuucauagaaggcggguggaccggaaugguugaugguugguacggcuaucaucaccagaacgagcaggggagcggauacgcugccgaccaaaaguccacgcagaaugcgaucaacggcauuacuaauaaagugaacucugucaucgaaaagaugaauacacaguuuaccgccguggguaaggaguucaacaaacuugagagaaggauggaaaaccugaauaagaaaguagaugacggguucauagauauuuggacuuacaacgcagaguugcuaguucugcucgaaaaugagcggacacuggacuuucacgacagcaacgugaagaaucuuuaugaaaaagucaagucacagcugaagaacaaugcuaaagagaucggcaacggaugcuucgaguuuuaccauaaguguaaugaugaaugcauggagagugugaaaaacggcaccuaugacuaccccaaguauuccgaagagagcaaauugaaucgugagaagaucgauggggucaagcucgaaucuaugggaguguaccaaauucuggccaucuauucaacgguugcuaguagcuuagugcugcuaguaucccucggugccauuucuuucuggaugugcucgaacggcagccugcagugucgcauaugcaucuga

SEQ ID NO: 134024 - RNA, 1698 nt, Artificial Sequence
  derived and/or modified CDS sequence (opt3) from hemagglutinin__InfluenzaA__ADN89380
augaaggugaaacugcucguccuucugugcaccuugacagccacuuacgcugacacgaucuguauuggcuaucacgcaaacaauagcaccgauacaguugacacuguguuagagaagaacguaaccgugacacauuccgucaaucugcuagaaaacucucacaaugggaaacucugccugcuuaagggaauagcgccccugcaguuggguaacuguucaguggccggcuggauccucgggaauccugagugcgaacugcugauuaguaaagagagcugguccuacaucguugaaaagccaaacccggagaauggaaccuguuaucccggccauuucgcugauuacgaggaacucagagagcaauuaucuucggugagcucauuugaaagguucgagauuuuuccuaaggagaguuccuggccaaaccacacugucacaggugugucugccagcugcucccauaauggggaaucaaguuucuaucggaaccugcuuugguugaccggcaaaaauggacuguaccccaaccuaagcaagucuuaugcaaauaacaaagagaaggaaguacucguucuguggggcgugcaccacccuccaaacaucgucgaccagaaaacgcuuuaccgcacugagaaugccuacguguccguggucucaagccauuauagucgaaaguuuacccccgaaauagcuaagcguccuaaaguuagagaucaggaggggaggaucaacuacuauuggacacuguuggagccaggagacacuauuaucuucgaagcaaaugguaaccucauugccccgcgguacgcuuuugcccugucucgcggcuucggguccggaaucauaaauagcaacgcgcccauggauaagugugacgcaaaaugccagaccccucaaggcgccauuaauucgucuuuaccauuucagaacgugcaccccguaacaaucggugaguguccuaaguaugugagauccgcuaaacugaggauggucaccgggcuccggaauauuccaucaauccagagucgcggacuuuucggcgccaucgcaggcuuuauugaagggggauggacggguaugguggauggcugguacggguaucaucaccagaacgagcaaggaagcggcuacgcugccgaccagaaguccacucagaaugcgauaaacgguaucacaaauaaaguuaacucugugauugaaaagaugaauacccaguucacugccgucgggaaggaguuuaacaaacuggagcgaagaauggaaaacuugaauaagaaaguggaugacggcuucaucgauauauggacauacaacgcagagcuacugguacuccuggaaaaugagaggacccuugacuuccacgacagcaacguuaagaaucuguaugaaaaagugaagucacaauugaagaacaaugcuaaagagauuggaaacggcugcuuugaguucuaccauaaguguaauaacgaaugcauggagagugucaaaaaugggacguaugauuaccccaaguauuccgaagagagcaaacucaaccgggagaagaucgacggagugaagcuggaaucuaugggugucuaccagaucuuagccauuuauucaaccguggcuaguagccugguucuacucgugucccugggcgccaucucuuuuuggaugugcucgaaugggagccuucagugucguauuugcauauga

SEQ ID NO: 134025 - RNA, 1698 nt, Artificial Sequence
  derived and/or modified CDS sequence (opt3) from hemagglutinin__InfluenzaA__ADN89391
augaaggugaaacugcucguccuucugugcaccuucacagccacuuacgcugacacgaucuguauuggcuaucacgcaaacaauagcaccgauacaguugacacuguguuggagaagaacguaaccgugacacauuccgucaauuuacuggaaaacucucacaaugggaaacuaugccuccugaagggaauagcgccccuucagcuggguaacuguucaguggccggcuggaucuuggggaauccugagugcgaacuccugauuaguaaagagagcugguccuacaucguugaaaagccaaacccggagaauggaaccuguuaucccggccauuuugcugauuacgaggaacugagagagcaacucucuucggugagcucauucgaaagguuugagauuuucccuaaggagaguuccuggccaaaccacacugucacaggugugucugccagcugcucccauaauggggaacggucauuuuauaaaaacuuacuguggcuuaccggaaagaauggcuuguaccccaaccugaguaaaagcuaugcaaauaacaaggagaaagaagugcuaguucucuggggcgugcaccacccuccagacaucggggaucagaagacgcuguaccauacugagaacgccuacgucucugugguguccucacacuauagccgcaaguucacccccgaaauagcuaaacgaccuaagguccgugaccaggagggaagaaucaauuacuauuggacacuucuggagccaggugauacuauuaucuuugaagcaaacggcaauuugauugccccgagguacgcuuucgcccucagucggggguuuggaucuggcaucauaaacuccaaugcgcccauggacaaaugugaugcaaagugccagaccccucaaggugccauuaacagcucgcugccauuccagaauguucaucccgugacaaucggggaguguccuaaauauguacgcucugcuaaguuaagaauggugaccggacugaggaacauuccauccauccagucacggggccucuuuggcgccaucgcaggguucauugaaggagguuggacgggcauggucgacgggugguacggauaucaccaccagaaugagcaaggcagugguuacgcugccgaucagaaaagcacucagaacgcgauaaaugggaucacaaacaagguaaauuccguuauugaaaagaugaacacccaguuuacugccgugggcaaagaguucaauaaacuugagcgccgaauggaaaaccugaacaaaaaggucgacgauggauucaucgacauauggacauacaaugcagaguugcuagugcugcucgaaaacgagagaacccuggacuuucaugauucuaauguaaagaaccuuuaugaaaagguuaagagccaacugaaaaauaacgcuaaggagauuggcaaugggugcuucgaguuuuaccacaaauguaacgacgaaugcauggagucagugaagaauggaacguaugauuaccccaaauauagugaagaguccaaguugaacagggagaagaucgacggugucaaacucgaaagcaugggcguguaccagauccuggccauuuauucuaccgucgcuucaaguuuagugcugcuaguuagccucggggccaucuccuucuggaugugcucuaauggaucgcugcagugucggauuugcauauga

SEQ ID NO: 134026 - RNA, 1698 nt, Artificial Sequence
  derived and/or modified CDS sequence (opt3) from hemagglutinin__InfluenzaA__ADN89402
augaaggugaaacugcucguccuucugugcaccuucacagccacuuacgcugacacgaucuguauuggcuaucacgcaaacaauagcaccgauacaguugacacuguguuggagaagaacguaaccgugacacauuccgucaauuuacuggaaaacucucacaaugggaaacuaugccuccugaagggaauagcgccccuucagcuggguaacuguucaguggccggcuggaucuuggggaauccugagugcgaacuccugauuaguaaaaagagcugguccuacaucguugagaagccaaacccggaaaauggaaccuguuaucccggccauuuugcugauuacgaggagcugaaagaacaacucucuucggugagcucauucgagagauuugaaauuuucccuaaggagaguuccuggccaaaccacacugucacaggugugucugccagcugcucccauaauggggagucaaguuuuuauaggaacuuacuguggcuuaccggcaaaaauggauuguaccccaaccugagcaagucuuaugcaaauaacaaagaaaaggagguucuaguacucuggggcgugcaccacccuccaaacaucgucgaccagaagacgcuguaccggacugaaaaugccuacguguccguggucucaagccauuauagucgcaaauucacccccgagauagcuaagcgaccuaaaguucgugaucaggaagggagaaucaacuacuauuggacacuucuggagccaggagacacuauuaucuuugaggcaaaugguaacuugauugccccgagguacgcuuucgcccucucucggggcuuuggguccggaaucauaaauagcaacgcgcccaugggcaagugugaugcaaaaugccagaccccucaaggugccauuaauucgucucugccauuccagaacgugcaccccguaacaaucggggaauguccuaaguaugugcgcuccgcuaaauuaagaauggucaccggacugaggaauauuccaucaauccagagucggggccucuuuggcgccaucgcaggguucauugagggagguuggacgggcaugguggacgggugguacggauaucaucaccagaacgaacaaggcagcgguuacgcugccgaucagaaguccacucagaaugcgauaaacgggaucacaaauaagguuaacucugugauugagaaaaugaauacccaguuuacugccgucggcaaggaguucaacaaacuugaacgccgaauggagaaccugaauaagaaaguggacgauggauucaucgacauauggacauacaacgcagaauugcuaguacugcucgagaaugaaagaacccuggauuuucacgacagcaacguuaagaaucuuuaugagaaggugaaaucacaacugaagaacaaugcuaaagaaauuggcaacgggugcuucgaguuuuaccauaaguguaaugacgagugcauggaaagugucaaaaacggaacguaugauuaccccaaguauuccgaggaaagcaaguugaauagggagaaaaucgacggugugaagcucgagucuaugggcgucuaccagauccuggccauuuauucaaccguggcuaguagcuuaguucugcuagugucccucggggccaucucuuucuggaugugcucgaacggaagccugcagugucggauuugcauauga

SEQ ID NO: 134027 - RNA, 1698 nt, Artificial Sequence; identical to SEQ ID NO: 133988
  derived and/or modified CDS sequence (opt3) from hemagglutinin__InfluenzaA__ADN89413

SEQ ID NO: 134028 - RNA, 1698 nt, Artificial Sequence; identical to SEQ ID NO: 133561
  derived and/or modified CDS sequence (opt3) from hemagglutinin__InfluenzaA__ADN89424

SEQ ID NO: 134029 - RNA, 1698 nt, Artificial Sequence
  derived and/or modified CDS sequence (opt3) from hemagglutinin__InfluenzaA__ADN89435
augaaggugaaacugcucguccuucugugcaccuucacagccacuuacgcugacacgaucuguauuggcuaucacgcaaacaauagcaccgauacaguugacacuguguuggagaagaacguaaccgugacacauuccgucaauuuacuggaaaacucucacaaugggaaacuaugccuccugaagggaauagcgccccuucagcuggguaacuguucaguggccggcuggaucuuggggaauccugagugcgaacuccugauuaguaaagagagcugguccuacaucguugaaaagccaaacccggagaauggaaccuguuaucccggccauuuugcugauuacgaggaacugagagagcaacucucuucggugagcucauucgaaagguuugagauuuucccuaaggagaguuccuggccaaaccacacugucacaggugugucugccagcugcucccauaauggggaaaacucauuuuaucggaauuuacuguggcuuaccggaaagaacggcuuguaccccaaucugaguaagagcuaugcaaacaacaaagagaaggaagugcuaguucucuggggcgugcaccacccuccaaauaucgccgaccagaaaacgcuguaccauacugagaacgcuuacgucucugugguguccucacacuauagccgcaaguucacccccgaaauagcaaagcgaccuaaaguccgugaucaggaggggagaaucaauuacuauuggacacuucuggagccaggagacacuauuaucuuugaagccaacgguaauuugauugcuccgagguacgccuucgcgcucagucggggcuuugggucuggaaucauaaacuccaaugcacccauggauaagugugacgccaaaugccagaccccucaaggcgcuauuaacagcucgcugccauuccagaauguucaucccgugacaaucggugaguguccuaaguauguacgcucugccaaauuaagaauggugaccgggcugaggaacauuccauccauccagucacggggacucuuuggcgcaaucgcuggcuucauugaagggggauggacggguauggucgauggcugguacggguaucaccaccagaaugagcaaggaaguggcuacgccgcggaccagaaaagcacucagaacgccauaaaugguaucacaaacaaaguaaauuccguuauugaaaagaugaacacccaguuuacugcaguggggaaggaguucaacaaacuugagcgccgaauggaaaaucugaacaagaaagucgaugacggcuucaucgauauauggacauacaaugcugaguugcuagugcugcucgaaaacgagagaacccuggacuuucaugacucuaauguaaagaaccuuuaugaaaaaguuaagagccaacugaagaauaacgccaaagagauuggaaauggcugcuucgaguuuuaccacaaguguaacgaugaaugcauggagucagugaaaaaugggacguaugacuaccccaaguauagugaagaguccagguugaaccgggagaaaaucgauggagucaagcucgaaagcauggguguguaccagauccuggcuauuuauucuaccgucgccucaaguuuagugcugcuaguuagccucggcgcaaucuccuucuggaugugcucuaaugggucgcugcagugucguauuugcauauga

SEQ ID NO: 134030 - RNA, 1698 nt, Artificial Sequence
  derived and/or modified CDS sequence (opt3) from hemagglutinin__InfluenzaA__ADN89446
augaaggccaaacugcucgugcuucugugcaccuucacagcuacuuacgcagacacgaucuguauuggcuaucacgccaacaauagcaccgauacagucgacacuguuuuggagaagaacgugaccguaacacauuccgugaauuuacuggaaaacucucacaaugggaaacuaugccuccugaagggaauagcgccccuucagcuggguaacuguucagucgcuggcuggaucuuggggaauccugagugcgaacuccugauuaguaaagagagcugguccuacaucguggaaaagccaaacccggagaauggaaccuguuaucccggccauuuugccgauuacgaggaacugagagagcaacucucuucgguuagcucauucgaaagguuugagauuuucccuaaggagaguuccuggccaaaccacacugugacaggugucucugcaagcugcucccauaauggggaaaacucauuuuaucggaauuuacuguggcuuaccggaaagaacggcuuguaccccaaucugaguaagagcuaugccaacaacaaagagaaggaagugcuaguacucuggggcguucaccacccuccaaauaucgcugaccagaaaacgcuguaccauacugagaacgcauacgugucugucguguccucacacuauagccgcaaguucacccccgaaauagccaagcgaccuaaagugcgugaucaggaggggagaaucaauuacuauuggacacuucuggagccaggagacacuauuaucuuugaagcuaacgguaauuugauugccccgagguacgcguucgcacucagucggggcuuugggucuggaaucauaaacuccaaugcccccauggauaagugugacgcuaaaugccagaccccucaaggcgccauuaacagcucgcugccauuccagaauguccaucccguuacaaucggugaguguccuaaguaugugcgcucugcaaaauuaagaaugguaaccgggcugaggaacauuccauccauccagucacggggacucuuuggcgcuaucgccggcuucauugaagggggauggacggguaugguggauggcugguacggguaucaccaccagaaugagcaaggaaguggcuacgcggccgaccagaaaagcacucagaacgcaauaaaugguaucacaaacaaagucaauuccgugauugaaaagaugaacacccaguuuacugcuguugggaaggaguucaacaaacuugagcgccgaauggaaaaucugaacaagaaaguggaugacggcuucaucgauauauggacauacaaugccgaguugcuaguccugcucgaaaacgagagaacccuggacuuucaugacucuaaugugaagaaccuuuaugaaaaaguaaagagccaacugaagaauaacgcuaaagagauuggaaauggcugcuucgaguuuuaccacaaguguaacgaugaaugcauggagucaguuaaaaaugggacguaugacuaccccaaguauagugaagaguccaaauugaacagggagaagaucgauggagugaagcucgaaagcaugggugucuaccagauccuggccauuuauucuaccguggcaucaaguuuaguccugcuagugagccucggcgccaucuccuucuggaugugcucuaaugggucgcugcagugucggauuugcauauga

SEQ ID NO: 134031 - RNA, 1698 nt, Artificial Sequence; identical to SEQ ID NO: 133561
  derived and/or modified CDS sequence (opt3) from hemagglutinin__InfluenzaA__ADN89457

SEQ ID NO: 134032 - RNA, 1698 nt, Artificial Sequence
  derived and/or modified CDS sequence (opt3) from hemagglutinin__InfluenzaA__ADN89468
augaaggugaaacugcucguccuucugugcaccuucacagccacuuacgcugacacgaucuguauuggcuaucacgcaaacaauagcaccgauacaguugacacuguguuggagaagaacguaaccgugacacauuccgucaauuuacuggaaaacucucacaaugggaaacuaugccuccugaagggaauagcgccccuucagcuggguaacuguucaguggccggcuggaucuuggggaauccugagugcgaacuccugauuaguaaagagagcugguccuacaucguugaaaagccaaacccggagaauggaaccuguuaucccggccauuuugcugauuacgaggaacugagagagcaacucucuucggugagcucauucgaaagguuugagauuuucccuaaggacaguuccuggccaaaccacacugucacaggugugucugccagcugcucccauaauggggagucaaguuuuuaucggaacuuacuguggcuuaccggcaaaaauggauuguaccccaaccugagcaagucuuaugcaaauaacaaagaaaaggagguucuaguacucuggggcgugcaccacccuccauccaucaacgaucagaaaacgcuguaccauacugaaaaugccuacgucucaguggugagcagucacuauucucgcaaguucacccccgagauagcuaagcgaccuaaaguccgugaccaggaagggagaaucaacuacuauuggacacuucuggagccaggagauacuauuaucuuugaggcaaaugguaacuugauugccccgagguacgcuuucgcccucucccggggcuuugggagcggaaucauaaauucgaacgcgcccauggacaagugugaugcaaaaugccagaccccucaaggcgccauuaauucuucccugccauuccagaacguucaucccgugacaaucggugaauguccuaaguauguacgcucagcuaaauuaagaauggugaccgggcugaggaauauuccaaguauccagagccggggacucuuuggcgccaucgcaggcuucauugaagggggauggacggguauggucgacggcugguacggguaucaccaccagaacgaacaaggauccggcuacgcugccgaucagaagucuacucagaaugcgauaaacgguaucacaaauaaagugaacagcguuauugagaagaugaauacccaguuuacugccguggggaaggaguucucaaaacuugagcgccgaauggagaaccugaacaagaaagucgacgauggcuucaucgacauauggacauacaaugcagaauugcuagugcugcucgagaacgaaagaacccuggacuuucaugauaguaauguaaagaaccuuuaugagaaaguuaagucccaacugaagaauaacgcuaaagaaauuggaaauggcugcuucgaguuuuaccacaaguguaacgacgagugcauggaaagcgugaaaaaugggacguaugauuaccccaaguauucugaggaaucaaaauugaacagggagaagaucgacggagucaagcucgagaguauggguguguaccagauccugaccauuuauagcacagucgccuccucuuuagugcugcuaaucucgcucggcgcuauuagcuucuggaugugcuccaaugggucacugcagugucggauaugcaucuga

SEQ ID NO: 134033 - RNA, 1698 nt, Artificial Sequence; identical to SEQ ID NO: 133990
  derived and/or modified CDS sequence (opt3) from hemagglutinin__InfluenzaA__ADN89479

SEQ ID NO: 134034 - RNA, 1698 nt, Artificial Sequence; identical to SEQ ID NO: 133990
  derived and/or modified CDS sequence (opt3) from hemagglutinin__InfluenzaA__ADN89490

SEQ ID NO: 134035 - RNA, 1698 nt, Artificial Sequence; identical to SEQ ID NO: 134013
  derived and/or modified CDS sequence (opt3) from hemagglutinin__InfluenzaA__ADN89501

SEQ ID NO: 134036 - RNA, 1698 nt, Artificial Sequence; identical to SEQ ID NO: 134001
  derived and/or modified CDS sequence (opt3) from hemagglutinin__InfluenzaA__ADN89512

SEQ ID NO: 134037 - RNA, 1698 nt, Artificial Sequence; identical to SEQ ID NO: 134015
  derived and/or modified CDS sequence (opt3) from hemagglutinin__InfluenzaA__ADN89523

SEQ ID NO: 134038 - RNA, 1698 nt, Artificial Sequence; identical to SEQ ID NO: 134024
  derived and/or modified CDS sequence (opt3) from hemagglutinin__InfluenzaA__ADN89534

SEQ ID NO: 134039 - RNA, 1698 nt, Artificial Sequence; identical to SEQ ID NO: 134029
  derived and/or modified CDS sequence (opt3) from hemagglutinin__InfluenzaA__ADN89545

SEQ ID NO: 134040 - RNA, 1698 nt, Artificial Sequence; identical to SEQ ID NO: 131674
  derived and/or modified CDS sequence (opt3) from hemagglutinin__InfluenzaA__ADN89556

SEQ ID NO: 134041 - RNA, 1698 nt, Artificial Sequence; identical to SEQ ID NO: 133990
  derived and/or modified CDS sequence (opt3) from hemagglutinin__InfluenzaA__ADN89567

SEQ ID NO: 134042 - RNA, 1698 nt, Artificial Sequence
  derived and/or modified CDS sequence (opt3) from hemagglutinin__InfluenzaA__ADN89578
augaaggugaaacugcucguccuucugugcaccuugacagccacuuacgcugacacgaucuguauuggcuaucacgcaaacaauagcaccgauacaguugacacuguguuagagaagaacguaaccgugacacauuccgucaaucugcuagaaaacucucacaaugggaaacucugccugcuuaagggaauagcgccccugcaguuggguaacuguucaguggccggcuggauccucgggaauccugagugcgaacugcugauuaguaaagagagcugguccuacaucguugaaaagccaaacccggagaauggaaccuguuaucccggccauuucgcugauuacgaggaacucagagagcaauuaucuucggugagcagcuuugaaagguucgagauuuuuccuaaggguaguuccuggccaaaccacacugucacaggggugucugccagcugcucccauaauggagagaacucauucuaucggaaucugcuuugguugaccggcaaaaacggccuguaccccaaucuaaguaagagcuaugcaaacaacaaagaaaaggagguacuccugcuuuggggaguucaccacccuccaaauaucgccgaccagaaaacgcuguaccauacugaaaacgcuuacgugucugucguguccucacacuauagccgcaaguuuacccccgagauagcaaagcgaccuaaagugcgugaucaggaagggagaaucaauuacuauuggacauugcucgagccaggugacacuauuaucuucgaggccaacggcaaucugauugcuccgagguacgccuuugcguuaagucggggguucggaucuggcaucauaaacuccaaugcacccauggauaagugugacgccaaaugccagaccccucaaggugcuauuaacagcucgcugccauuucagaauguccaucccguuacaaucggggaauguccuaaguaugugcgcucugccaaacucagaaugguaaccggacuuaggaacauuccauccauccagucacggggccuguucggcgcaaucgcuggguuuauugagggagguuggacgggcaugguggaugggugguacggauaucaccaccagaaugaacaaggcagugguuacgccgcggaccagaagucaacucagaacgccauaaaugggaucacaaacaaagucaauuccgugauugagaagaugaacacccaguucacugcaguuggcaaggaauuuaacaaauuggagcgccgaauggagaaucuaaacaagaaaguggaugacggauucaucgauauauggacauacaaugcugaacugcucguccugcuugagaacgaaagaacccuggacuuccaugacucuaaugugaagaacuuguaugagaaaguaaagagccaacucaagaauaacgccaaagaaauuggcaaugggugcuuugaguucuaccacaaguguaacgaugagugcauggaaucaguuaaaaauggaacguaugacuaccccaaguauagugaggaauccaaacugaacagggagaagaucgauggugugaaguuagagagcaugggcgucuaccagauccuggcuauuuauucuaccguggccucaagucuaguccuccuggugagccuuggggcaaucuccuuuuggaugugcucuaauggaucguugcagugucggauuugcauauga

SEQ ID NO: 134043 - RNA, 1698 nt, Artificial Sequence; identical to SEQ ID NO: 133561
  derived and/or modified CDS sequence (opt3) from hemagglutinin__InfluenzaA__ADN89589

SEQ ID NO: 134044 - RNA, 1698 nt, Artificial Sequence
  derived and/or modified CDS sequence (opt3) from hemagglutinin__InfluenzaA__ADN89600
augaaggugaaacugcucguccuucugugcaccuucacagccacuuacgcugacacgaucuguauuggcuaucacgcaaacaauagcaccgauacaguugacacuguguuggagaagaacguaaccgugacacauuccgucaauuuacuggaaaacucucacaaugggaaacuaugccuccugaagggaauagcgccccuucagcuggguaacuguucaguggccggcuggaucuuggggaauccugagugcgaacuccugauuaguaaagagagcugguccuacaucguugaaaagccaaacccggagaauggaaccuguuaucccggccauuuugcugauuacgaggaacugagagagcaacucucuucggugagcucauucgaaagguuugagauuuucccuaaggagaguuccuggccaaaccacacugucacaggugugucugccagcugcucccauaauggggaaucaaguuuuuaucggaacuuacuguggcuuacccgcaaaaauggauuguaccccaaccugagcaagucuuaugcaaauaacaaagagaaggaaguucuaguacucuggggcgugcaccacccuccaaacauggucgaccagaaaacgcuguaccgaacugagaaugccuacguguccguggucucaagccauuauagucguaaguucacccccgaaaucgcuaagagaccuaaaguuagggaucaggagggccggauaaacuacuauuggacacuucuggagccaggggacacuaucauuuuugaagcaaauggaaacuugaucgccccgcgcuacgcuuucgcccucucuagagguuuuggcuccgggauuaucaauagcaacgcgcccaugggaaagugugaugcaaaaugccagaccccucaaggcgccauaaauucgucucugccauuccagaacgugcaccccguaacaauuggugaguguccuaaguaugugagguccgcuaaauuacggauggucaccgggcugcgcaauaucccaucaauucagagucgaggacucuuuggcgccaucgcaggcuucaucgaagggggauggacggguaugguggacggcugguacggguaucaucaccagaacgagcaaggaagcggcuacgcugccgaucagaaguccacucagaaugcgauuaacgguauaacaaauaaaguuaacucugugaucgaaaagaugaauacccaguuuacugccgucgggaaggaguucaacaaacuugagagaaggauggaaaaccugaauaagaaaguggacgauggcuucauugacaucuggacauacaacgcagaguugcuaguacugcucgaaaaugagcggacccuggauuuucacgacagcaacguuaagaaucuuuaugaaaaagugaagucacaacugaagaacaaugcuaaagagauaggaaacggcugcuucgaguuuuaccauaaguguaaugacgaaugcauggagagugucaaaaacgggacguaugauuaccccaaguauuccgaagagagcaaauugaaucgugagaagauugacggagugaagcucgaaucuaugggugucuaccagauccuggccaucuauucaaccguggcuaguagcuuaguucugcuagugucccucggcgccauuucuuucuggaugugcucgaacgggagccugcagugucgcaucugcauuuga

SEQ ID NO: 134045 - RNA, 1698 nt, Artificial Sequence; identical to SEQ ID NO: 133561
  derived and/or modified CDS sequence (opt3) from hemagglutinin__InfluenzaA__ADN89611

SEQ ID NO: 134046 - RNA, 1698 nt, Artificial Sequence; identical to SEQ ID NO: 133988
  derived and/or modified CDS sequence (opt3) from hemagglutinin__InfluenzaA__ADN89622

SEQ ID NO: 134047 - RNA, 1698 nt, Artificial Sequence; identical to SEQ ID NO: 134029
  derived and/or modified CDS sequence (opt3) from hemagglutinin__InfluenzaA__ADN89633

SEQ ID NO: 134048 - RNA, 1698 nt, Artificial Sequence; identical to SEQ ID NO: 134013
  derived and/or modified CDS sequence (opt3) from hemagglutinin__InfluenzaA__ADN89644

SEQ ID NO: 134049 - RNA, 1698 nt, Artificial Sequence; identical to SEQ ID NO: 134029
  derived and/or modified CDS sequence (opt3) from hemagglutinin__InfluenzaA__ADN89655

SEQ ID NO: 134050 - RNA, 1698 nt, Artificial Sequence; identical to SEQ ID NO: 133561
  derived and/or modified CDS sequence (opt3) from hemagglutinin__InfluenzaA__ADN89666

SEQ ID NO: 134051 - RNA, 1698 nt, Artificial Sequence; identical to SEQ ID NO: 134001
  derived and/or modified CDS sequence (opt3) from hemagglutinin__InfluenzaA__ADN89677

SEQ ID NO: 134052 - RNA, 1698 nt, Artificial Sequence; identical to SEQ ID NO: 134001
  derived and/or modified CDS sequence (opt3) from hemagglutinin__InfluenzaA__ADN89688

SEQ ID NO: 134053 - RNA, 1698 nt, Artificial Sequence; identical to SEQ ID NO: 133988
  derived and/or modified CDS sequence (opt3) from hemagglutinin__InfluenzaA__ADN89699

SEQ ID NO: 134054 - RNA, 1698 nt, Artificial Sequence; identical to SEQ ID NO: 133990
  derived and/or modified CDS sequence (opt3) from hemagglutinin__InfluenzaA__ADN89710

SEQ ID NO: 134055 - RNA, 1698 nt, Artificial Sequence; identical to SEQ ID NO: 134013
  derived and/or modified CDS sequence (opt3) from hemagglutinin__InfluenzaA__ADN89721

SEQ ID NO: 134056 - RNA, 1698 nt, Artificial Sequence; identical to SEQ ID NO: 133990
  derived and/or modified CDS sequence (opt3) from hemagglutinin__InfluenzaA__ADN89732

SEQ ID NO: 134057 - RNA, 1698 nt, Artificial Sequence; identical to SEQ ID NO: 133990
  derived and/or modified CDS sequence (opt3) from hemagglutinin__InfluenzaA__ADN89743

SEQ ID NO: 134058 - RNA, 1698 nt, Artificial Sequence; identical to SEQ ID NO: 134015
  derived and/or modified CDS sequence (opt3) from hemagglutinin__InfluenzaA__ADN89765

SEQ ID NO: 134059 - RNA, 1698 nt, Artificial Sequence
  derived and/or modified CDS sequence (opt3) from hemagglutinin__InfluenzaA__ADN89776
augaaggugaaacugcucguccuucugugcaccuucacagccacuuacgcugacacgaucuguauuggcuaucacgcaaacaauagcaccgauacaguugacacuguguuggagaagaacguaaccgugacacauuccgucaauuuacuggaaaacucucacaaugggaaacuaugccuccugaagggaauagcgccccuucagcuggguaacuguucaguggccggcuggaucuuggggaauccugagugcgaacuccugauuaguaaagagagcugguccuacaucguugaaaagccaaacccggagaauggaaccuguuaucccggccauuuugcugauuacgaggaacugagagagcaacucucuucggugagcucauucgaaagguuugagauuuucccuaaggagaguuccuggccaaaccacacugucacaggugugucugccagcugcucccauaauggggaaucaaguuuuuaucggaacuuacuguggcuuaccggaaagaauggcuuguaccccaaccugagcaagucuuaugcaaauaacaaagagaaggaaguucuaguacucuggggcgugcaccacccuccauccaucucagaccagaaaacgcuguaccauacugagaacgccuacgucagcguggugaguucucacuauucccgcaaguucacccccgaagucgcuaagcgaccuaaaguucgugaucaggaggggagaauaaauuacuauuggacacuucuggagccaggagacacuaucauuuuugaagcaaacgguaauuugaucgccccgagguacgcuuucgcccucagccggggcuuugggucgggaauuaucaacucuaaugcgcccauggauaagugugacgcaaaaugccagaccccucaaggcgccauaaacuccucacugccauuccagaaugugcaucccguaacaauuggugaguguccuaaguaugugcgcagugcuaaauuaagaauggucaccgggcugaggaacaucccaagcauucagucccggggacucuuuggcgccaucgcaggcuucaucgaagggggauggacggguaugguggauggcugguacggguaucaccaccagaaugagcaaggaucuggcuacgcugccgaccagaaaagcacucagaacgcgauuaaugguauaacaaacaaaguuaauucagugaucgaaaagaugaacacccaguuuacugccgucgggaaggaguucaauaaacuugagcgccgaauggaaaaccugaacaagaaaguggaugacggcuucauugauaucuggacauacaaugcagaguugcuaguacugcucgaaaacgagagaacccuggacuuucaugacaguaauguuaagaaccuuuaugaaaaagugaagucccaacugaagaauaacgcuaaagagauaggaaauggcugcuucgaguuuuaccacaaguguaacgaugaaugcauggagagcgucaaaaaugggacguaugacuaccccaaguauucugaagagucaaaauugaacagggagaagauugauggagugaagcucgaaaguaugggugucuaccagauccuggccaucuauagcaccguggcuuccucuuuaguucugcuagugucgcucggcgccauuagcuucuggaugugcuccaaugggucacugcagugucggaucugcauuuga

SEQ ID NO: 134060 - RNA, 1698 nt, Artificial Sequence; identical to SEQ ID NO: 134001
  derived and/or modified CDS sequence (opt3) from hemagglutinin__InfluenzaA__ADN89787

SEQ ID NO: 134061 - RNA, 1698 nt, Artificial Sequence; identical to SEQ ID NO: 134015
  derived and/or modified CDS sequence (opt3) from hemagglutinin__InfluenzaA__ADN89798

SEQ ID NO: 134062 - RNA, 1698 nt, Artificial Sequence; identical to SEQ ID NO: 133561
  derived and/or modified CDS sequence (opt3) from hemagglutinin__InfluenzaA__ADN89809

SEQ ID NO: 134063 - RNA, 1698 nt, Artificial Sequence; identical to SEQ ID NO: 133561
  derived and/or modified CDS sequence (opt3) from hemagglutinin__InfluenzaA__ADN89820

SEQ ID NO: 134064 - RNA, 1698 nt, Artificial Sequence; identical to SEQ ID NO: 133561
  derived and/or modified CDS sequence (opt3) from hemagglutinin__InfluenzaA__ADN89831

SEQ ID NO: 134065 - RNA, 1698 nt, Artificial Sequence
  derived and/or modified CDS sequence (opt3) from hemagglutinin__InfluenzaA__ADN89842
augaaggugaaacugcucguccuucugugcaccuucacagccacuuacgcugacacgaucuguauuggcuaucacgcaaacaauagcaccgauacaguugacacuguguuggagaagaacguaaccgugacacauuccgucaauuuacuggaaaacagacacaaugggaaacuaugccuccugaagggaauagcgccccuucagcuggguaacuguucuguggccggcuggaucuuggggaauccugagugcgaacuccugauuucaaaagagaguuggagcuacaucguugaaaagccaaacccggagaauggaaccuguuaucccggccauuuugcugauuacgaggaacugagggagcaacucuccucugugucgucauucgaacgguuugagauuuucccuaaggagagcaguuggccaaaccacacugucacagguguguccgccucuugcagccauaauggggaauccucauuuuaucgcaacuuacuguggcuuaccggaaagaauggcuuguaccccaaccugaguaagagcuaugcaaauaacaaagagaaggaagugcuaguucucuggggcgugcaccacccuccaaacaucgucgaccagaaaacgcuguaccgaacugagaaugccuacgugucuguggucuccucacauuauagccguaaguucacccccgaaauagcuaagagaccuaaaguuagggaucaggaggggcggaucaacuacuauuggacacuucuggagccaggagacacuauuaucuuugaagcaaaugguaacuugauugccccgcgcuacgcuuucgcccucaguagaggcuuugggucuggaaucauaaauuccaacgcgcccauggauaagugugacgcaaaaugccagaccccucaaggcgccauuaauagcucgcugccauuccagaacgugcaccccguaacaaucggugaguguccuaaguaugugaggucugcuaaauuacggauggucaccgggcugcgcaauauuccauccauccagucacgaggacucuuuggcgccaucgcaggcuucauugaagggggauggacggguaugguggauggcugguacggguaucaucaccagaacgagcaaggaaguggcuacgcugccgaccagaaaagcacucagaaugcgauaaacgguaucacaaauaaaguuaacuccgugauugaaaagaugaauacccaguuuacugccgucgggaaggaguucaacaaacuugagagaaggauggaaaaccugaauaagaaaguggaugacggcuucaucgauauauggacauacaacgcagaguugcuaguacugcucgaaaaugagcggacccuggacuuucacgacucuaacguuaagaaucuuuaugaaaaaguaaagagccaacugaagaacaaugcuaaagagauuggaaacggcugcuucgaguuuuaccauaaguguaaugaugaaugcauggagucagucaaaaacgggacguaugacuaccccaaguauagugaagaguccaaauugaaucgugagaagaucgauggagugaagcucgaaagcaugggugucuaccagauccuggccauuuauucuaccguggcuucaaguuuaguucugcuagugagccucggcgccaucuccuucuggaugugcucuaacgggucgcugcagugucgcauuugcauauga

SEQ ID NO: 134066 - RNA, 1701 nt, Artificial Sequence; identical to SEQ ID NO: 133581
  derived and/or modified CDS sequence (opt3) from hemagglutinin__InfluenzaA__ADN89864

SEQ ID NO: 134067 - RNA, 1701 nt, Artificial Sequence; identical to SEQ ID NO: 133581
  derived and/or modified CDS sequence (opt3) from hemagglutinin__InfluenzaA__ADN89875

SEQ ID NO: 134068 - RNA, 1701 nt, Artificial Sequence
  derived and/or modified CDS sequence (opt3) from hemagglutinin__InfluenzaA__ADN89886
augaagaccaucauugcccugagcuacauacucugccuuguguucgcucagaaacugcccggcaacgacaauuccacagcaacuuuguguuuagggcaccaugccgucccuaacggaacgaucguuaagaccauuacaaaugaucaaaucgaggugacuaacgcgaccgaacugguacagucuucaaguacaggugagauuugcgacagcccacaccagauccuagauggcgaaaauuguacccucauagacgcucugcuuggggauccgcagugcgacggauuucaaaacaaaaagugggaucuguucguggagagauccaaagccuauucuaauuguuaccccuaugacgucccugauuacgcaucguugaggucacucguggccagcaguggcacucuggaauuuaacaaugaguccuucaacuggacagguguuacccagaaugggacgucuagcgcuugcauccggcgcuccaacaauucauuuuucagucgacugaacuggcucacucauuuaaauuuuaaguauccagcacugaacgugaccaugcccaacaaugagcaguucgacaaacuuuacauuuggggaguccaccauccuggcacagauaaggaccagaucuuuuuguaugcccaagcuagcggccguauuacugugucuaccaagagaucccagcaggccguaaucccaaacauagggucaaggccccggguucgcaauauuccuagcagaaucaguauuuacuggacaaucgugaaaccaggagauauccugcuaauuaacucuaccgguaaucucauagcgccgaggggcuacuucaagauccgguccgggaaaagcucgauuaugcgcucugacgcacccaucggaaaguguaacuccgaaugcauaacgccuaauggcucaauuccaaacgacaagcccuuucagaaugucaaccgaaucacuuauggugccuguccuagauacgugaaacaaaguacacugaaacuugcuaccgggaugaggaaugugccagagaagcagacucggggaaucuucggcgccauugcaggcuuuaucgaaaacgggugggagggaauggucgaugguugguauggcuuccgucaccagaauagcgaggggcgcggacaagcugccgaccugaaguccacacaggcggccauugaucagauaaacggcaaauugaauagacucaucgguaagaccaacgaaaaauuccaccagauugagaaggaauuuucugagguugaagggaggauccaagaccuggagaaguacguggaggauacgaaaaucgacuuauggagcuauaacgcagaacugcucguagcucuugagaaucagcauaccauugaucugacagacucagaaaugaacaaguuguucgagaaaacucggaagcagcuacgagaaaaugccgaggauaugggcaacggaugcuuuaccauauaccacaaaugugacaaugcuugcaucggcaguauucgcaacgggacauaugaucauaauguguacagagacgaggcccugaacaauagguuccagaucaagggagucgaacucaaguccgguuacaaagacuggauucuguggaucagcuuugcaauaucuugcuuccuucuguguguggccuugcucggcuuuaucaugugggcuugccaaaaggggaacauucgguguaauaucugcauuuga

SEQ ID NO: 134069 - RNA, 1701 nt, Artificial Sequence; identical to SEQ ID NO: 133581
  derived and/or modified CDS sequence (opt3) from hemagglutinin__InfluenzaA__ADN89897

SEQ ID NO: 134070 - RNA, 1701 nt, Artificial Sequence; identical to SEQ ID NO: 133581
  derived and/or modified CDS sequence (opt3) from hemagglutinin__InfluenzaA__ADN89908

SEQ ID NO: 134071 - RNA, 1701 nt, Artificial Sequence; identical to SEQ ID NO: 133581
  derived and/or modified CDS sequence (opt3) from hemagglutinin__InfluenzaA__ADN89919

SEQ ID NO: 134072 - RNA, 1701 nt, Artificial Sequence; identical to SEQ ID NO: 133581
  derived and/or modified CDS sequence (opt3) from hemagglutinin__InfluenzaA__ADN89930

SEQ ID NO: 134073 - RNA, 1701 nt, Artificial Sequence; identical to SEQ ID NO: 133581
  derived and/or modified CDS sequence (opt3) from hemagglutinin__InfluenzaA__ADN89941

SEQ ID NO: 134074 - RNA, 1701 nt, Artificial Sequence; identical to SEQ ID NO: 133581
  derived and/or modified CDS sequence (opt3) from hemagglutinin__InfluenzaA__ADN89952

SEQ ID NO: 134075 - RNA, 1701 nt, Artificial Sequence; identical to SEQ ID NO: 133581
  derived and/or modified CDS sequence (opt3) from hemagglutinin__InfluenzaA__ADN89963

SEQ ID NO: 134076 - RNA, 1701 nt, Artificial Sequence
  derived and/or modified CDS sequence (opt3) from hemagglutinin__InfluenzaA__ADN89974
augaagaccaucauugcccugagcuacauacucugccuuguguucgcucagaaacugcccggcaacgacaauuccacagcaacuuuguguuuagggcaccaugccgucccuaacggaacgaucguuaagaccauuacaaaugaucaaaucgaggugacuaacgcgaccgaacugguacagucuucaaguacaggugagauuugcgacagcccacaccagauccuagauggcgaaaauuguacccucauagacgcucugcuuggggauccgcagugcgacggauuucaaaacaaaaagugggaucuguucguggagagauccaaagccuauucuaauuguuaccccuaugacgucccugauuacgcaucguugaggucacucguggccagcaguggcacucuggaauuuaacaaugaguccuucaacuggacagguguuacccagaaugggacgucuagcgcuugcauccggcgcuccaacaauucauuuuucagucgacugaacuggcucacucauuuaaauuuuaaguauccagcacugaacgugaccaugcccaacaaugagcaguucgacaaacuuuacauuuggggaguccaccauccuggcacagauaaggaccagaucuuuuuguaugcccaagcuagcggccguauuacugugucuaccaagagaucccagcaggccguaaucccaaacauagggucaaggccccggguucgcaauauuccuagcagaaucaguauuuacuggacaaucgugaaaccaggagauauccugcuaauuaacucuaccgguaaucucauagcgccgaggggcuacuucaagauccaguccgggaaaagcucgauuaugcggucugacgcacccaucggaaaguguaacuccgaaugcauaacgccuaauggcucaauuccaaacgacaagcccuuucaaaaugucaaccgcaucacuuauggugccuguccucgauacgugaaacagaguacacugaaacuugcuaccgggaugagaaaugugccagagaagcagacuaggggaaucuucggcgccauugcaggcuuuaucgaaaacgggugggagggaauggucgaugguugguauggcuuccggcaccaaaauagcgaggggcguggacaggcugccgaccugaaguccacacaggcggccauugaucagauaaacggcaaauugaaucgccucaucgguaagaccaacgaaaaauuccaccaaauugagaaggaauuuucugagguugaagggagaauccaggaccuggagaaguacguggaggauacgaaaaucgacuuauggagcuauaacgcagaacugcucguagcucuugagaaucagcauaccauugaucugacagacucagaaaugaacaaguuguucgagaaaacuaagaaacagcuaagggaaaaugccgaggauaugggcaacggaugcuuuaccauauaccacaagugugacaaugcuugcaucggcaguauucggaacgggacauaugaucauaauguguaccgagacgaggcccugaacaaucgcuuccaaaucaagggagucgaacucaaauccgguuacaaggacuggauucuguggaucagcuuugcaauaucuugcuuccuucuguguguggccuugcucggcuuuaucaugugggcuugccagaaagggaacauuagauguaauaucugcauuuga

SEQ ID NO: 134077 - RNA, 1701 nt, Artificial Sequence; identical to SEQ ID NO: 133581
  derived and/or modified CDS sequence (opt3) from hemagglutinin__InfluenzaA__ADN89985

SEQ ID NO: 134078 - RNA, 1701 nt, Artificial Sequence; identical to SEQ ID NO: 133581
  derived and/or modified CDS sequence (opt3) from hemagglutinin__InfluenzaA__ADN89996

SEQ ID NO: 134079 - RNA, 1701 nt, Artificial Sequence; identical to SEQ ID NO: 133581
  derived and/or modified CDS sequence (opt3) from hemagglutinin__InfluenzaA__ADN90007

SEQ ID NO: 134080 - RNA, 1701 nt, Artificial Sequence; identical to SEQ ID NO: 133581
  derived and/or modified CDS sequence (opt3) from hemagglutinin__InfluenzaA__ADN90018

SEQ ID NO: 134081 - RNA, 1701 nt, Artificial Sequence; identical to SEQ ID NO: 133581
  derived and/or modified CDS sequence (opt3) from hemagglutinin__InfluenzaA__ADN90040

SEQ ID NO: 134082 - RNA, 1701 nt, Artificial Sequence; identical to SEQ ID NO: 133581
  derived and/or modified CDS sequence (opt3) from hemagglutinin__InfluenzaA__ADN90051

SEQ ID NO: 134083 - RNA, 1701 nt, Artificial Sequence; identical to SEQ ID NO: 133581
  derived and/or modified CDS sequence (opt3) from hemagglutinin__InfluenzaA__ADN90062

SEQ ID NO: 134084 - RNA, 1701 nt, Artificial Sequence; identical to SEQ ID NO: 133581
  derived and/or modified CDS sequence (opt3) from hemagglutinin__InfluenzaA__ADN90073

SEQ ID NO: 134085 - RNA, 1701 nt, Artificial Sequence; identical to SEQ ID NO: 133581
  derived and/or modified CDS sequence (opt3) from hemagglutinin__InfluenzaA__ADN90084

SEQ ID NO: 134086 - RNA, 1701 nt, Artificial Sequence; identical to SEQ ID NO: 133581
  derived and/or modified CDS sequence (opt3) from hemagglutinin__InfluenzaA__ADN90095

SEQ ID NO: 134087 - RNA, 1701 nt, Artificial Sequence; identical to SEQ ID NO: 133581
  derived and/or modified CDS sequence (opt3) from hemagglutinin__InfluenzaA__ADN90106

SEQ ID NO: 134088 - RNA, 1701 nt, Artificial Sequence; identical to SEQ ID NO: 133581
  derived and/or modified CDS sequence (opt3) from hemagglutinin__InfluenzaA__ADN90117

SEQ ID NO: 134089 - RNA, 1701 nt, Artificial Sequence; identical to SEQ ID NO: 133581
  derived and/or modified CDS sequence (opt3) from hemagglutinin__InfluenzaA__ADN90128

SEQ ID NO: 134090 - RNA, 1701 nt, Artificial Sequence; identical to SEQ ID NO: 133581
  derived and/or modified CDS sequence (opt3) from hemagglutinin__InfluenzaA__ADN90139

SEQ ID NO: 134091 - RNA, 1701 nt, Artificial Sequence; identical to SEQ ID NO: 133581
  derived and/or modified CDS sequence (opt3) from hemagglutinin__InfluenzaA__ADN90150

SEQ ID NO: 134092 - RNA, 1701 nt, Artificial Sequence; identical to SEQ ID NO: 133581
  derived and/or modified CDS sequence (opt3) from hemagglutinin__InfluenzaA__ADN90161

SEQ ID NO: 134093 - RNA, 1701 nt, Artificial Sequence; identical to SEQ ID NO: 133581
  derived and/or modified CDS sequence (opt3) from hemagglutinin__InfluenzaA__ADN90172

SEQ ID NO: 134094 - RNA, 1701 nt, Artificial Sequence; identical to SEQ ID NO: 133581
  derived and/or modified CDS sequence (opt3) from hemagglutinin__InfluenzaA__ADN90183

SEQ ID NO: 134095 - RNA, 1701 nt, Artificial Sequence; identical to SEQ ID NO: 133581
  derived and/or modified CDS sequence (opt3) from hemagglutinin__InfluenzaA__ADN90194

SEQ ID NO: 134096 - RNA, 1701 nt, Artificial Sequence; identical to SEQ ID NO: 133581
  derived and/or modified CDS sequence (opt3) from hemagglutinin__InfluenzaA__ADN90205

SEQ ID NO: 134097 - RNA, 1701 nt, Artificial Sequence; identical to SEQ ID NO: 133581
  derived and/or modified CDS sequence (opt3) from hemagglutinin__InfluenzaA__ADN90216

SEQ ID NO: 134098 - RNA, 1701 nt, Artificial Sequence; identical to SEQ ID NO: 131478
  derived and/or modified CDS sequence (opt3) from hemagglutinin__InfluenzaA__ADN92467

SEQ ID NO: 134099 - RNA, 1701 nt, Artificial Sequence
  derived and/or modified CDS sequence (opt3) from hemagglutinin__InfluenzaA__ADN92478
augaagaccaucauugcccugagccacauacucugccuuguguucgcucagaaacugcccggcaacgacaauuccacagcaacuuuguguuuagggcaucacgccgucccuaacggaacgaucguuaagaccauuacaaaugaucaaaucgaggugacuaacgcgaccgaacugguacagucuucaaguacaggugagauuugcgacagcccacaucagauccuagauggcaaaaauuguacccucauagacgcucugcuuggggauccgcagugcgacggauuucaaaacaagaaaugggaucuguucguggaaagauccaaggccuacucuaauuguuaucccuacgacgucccugauuaugcaucguugaggucacucguggccagcaguggcacucuggaguuuaacaaugaauccuucaacuggacagguguuacccagaaugggacgucuagcgcuugcauccggcgcuccaagaacucauuuuucagucgacugaauuggcucacucacuuaaacuuuaaauaccaggcacugaaugugaccaugccaaacaacgagcaguucgacaagcuguauauuuggggaguccaucaccccggcacagauaaagaccaaaucuuuuuguacgcccaggcuagcggccguauuacugugucuaccaagagaucccagcagacaguaaucccuaauauagggucaaggccacggguucgcaacauucccagcagaaucaguauuuauuggaccaucgugaaaccuggagauauccugcuaauuaauucuacggguaaccucauagccccaaggggcuacuucaagauccaauccggaaagagcucgauuaugcggucugacgcgccgaucgggaaauguaauuccgagugcauaacucccaacggcucaauuccuaaugacaagccauuucagaacgucaaucgcaucacauacggugcauguccccgauaugugaaacagaacacccugaaacuugccacugggaugagaaaugugccugaaaaacaaacaaggggaaucuucggcgcuauugccggcuuuaucgagaacgggugggaaggaauggucgaugguugguacggcuuccggcaccagaauagugaggggcguggacaggcagcugaccuuaagagcacccaggccgcgauugaucaaauaaacggcaaauugaaucgccucaucgguaagacgaacgagaaguuccaucagauugaaaaagaguuuuccgaaguugaggggagaauccaggaccuggaaaaguauguggaggauaccaaaaucgacuuauggucuuacaacgccgagcugcucguagcacuugaaaaucagcacacaauugaucugacugacagcgagaugaacaaguuguucgaaaagaccaagaagcaacuaagggagaaugcugaagauaugggcaacggaugcuuuaaaauauaucauaagugugacaaugccugcaucggcucaauucggaacgggacauacgaucacgacguguaucgagacgaggcucugaauaaccgcuuccagaucaaaggagucgagcucaagagugguuacaaagauuggauucuguggaucuccuuugccauaagcugcuuccuucuguguguggcauugcucggcuuuaucaugugggccugccagaaggggaauauuagauguaacaucugcauuuga

SEQ ID NO: 134100 - RNA, 1701 nt, Artificial Sequence
  derived and/or modified CDS sequence (opt3) from hemagglutinin__InfluenzaA__ADN92489
augaagaccaucauugcccugagcuacauacucugccuuguguucgcucagaaacugcccggcaacgacaauuccacagcaacuuuguguuuagggcaccaugccgucccuaacggaacgaucguuaagaccauuacaaaugaucaaaucgaggugacuaacgcgaccgaacugguacagucuucaaguacaggugagauuugcgacagcccacaccagauccuagauggcaaaaauuguacccucauagacgcucugcuuggggauccgcagugcgacggauuucaaaacaagaaaugggaucuguucguggaaagauccaaggccuauucuaauuguuaccccuaugacgucccugauuacgcaucguugaggucacucguggccagcaguggcacucuggaguuuaacaaugaaaacuucaauuggacagguguuacccagaacgggacguccucugcuugcauccggcgcagcaaaaauuccuuuuucucacgacugaacuggcucacucauuuaaauuuuaaauaucaggcacugaacgugaccaugccaaacaaugagcaguucgacaaacuuuacauuuggggaguccaccaucccggcacagauaaggaccaaaucuuuuuguaugcccaggcuaguggccguauuacugugagcaccaagagaucucagcagacaguaaucccuaacauaggguccaggccacggguucgcaauauucccucaagaaucagcauuuacuggaccaucgugaaaccuggagauauccugcuaauuaacaguacggguaaucucauagccccaaggggcuacuucaagauccaaucugggaaguccagcauuaugcggucggacgcgccgaucggaaaauguaacucugagugcauaacucccaauggcuccauuccuaacgacaagccauuucagaaugucaaccgcaucacauauggugcauguccccgauacgugaaacagaauacccugaaacuugccacugggaugagaaacgugccugaaaagcaaacaaggggaaucuucggcgcuauugccggcuuuaucgagaaugggugggaaggaauggucgaugguugguauggcuuccggcaccagaacucagaggggcguggacaggcagcugaccugaagaguacccaggccgcgauugaucaaauaaauggcaaauugaaccgccucaucgguaagacgaacgagaaguuccaccagauugaaaaagaguuuagcgaaguugaggggagaauccaggaccuggaaaaguacguggaggauaccaaaaucgacuuaugguccuauaaugccgagcugcucguagcacuugaaaaccagcauacaauugaucugacugacucugagaugaauaaguuguucgaaaagaccaagaagcaacuaagggagaacgcugaagauaugggcaauggaugcuuuaaaauauaccacaagugugacaacgccugcaucggcagcauucggaaugggacauaugaucaugacguguaccgagacgaggcucugaacaaucgcuuccagaucaaaggagucgagcucaagucagguuacaaagauuggauucuguggaucaguuuugccauauccugcuuccuucuguguguggcauugcucggcuuuaucaugugggccugccagaaggggaacauuagauguaauaucugcauuuga

SEQ ID NO: 134101 - RNA, 1701 nt, Artificial Sequence; identical to SEQ ID NO: 131478
  derived and/or modified CDS sequence (opt3) from hemagglutinin__InfluenzaA__ADN92500

SEQ ID NO: 134102 - RNA, 1701 nt, Artificial Sequence; identical to SEQ ID NO: 130717
  derived and/or modified CDS sequence (opt3) from hemagglutinin__InfluenzaA__ADN92510

SEQ ID NO: 134103 - RNA, 1701 nt, Artificial Sequence; identical to SEQ ID NO: 130717
  derived and/or modified CDS sequence (opt3) from hemagglutinin__InfluenzaA__ADN92520

SEQ ID NO: 134104 - RNA, 1701 nt, Artificial Sequence; identical to SEQ ID NO: 131819
  derived and/or modified CDS sequence (opt3) from hemagglutinin__InfluenzaA__ADN92530

SEQ ID NO: 134105 - RNA, 1701 nt, Artificial Sequence; identical to SEQ ID NO: 130959
  derived and/or modified CDS sequence (opt3) from hemagglutinin__InfluenzaA__ADN92540

SEQ ID NO: 134106 - RNA, 1701 nt, Artificial Sequence; identical to SEQ ID NO: 130717
  derived and/or modified CDS sequence (opt3) from hemagglutinin__InfluenzaA__ADN92550

SEQ ID NO: 134107 - RNA, 1701 nt, Artificial Sequence; identical to SEQ ID NO: 130717
  derived and/or modified CDS sequence (opt3) from hemagglutinin__InfluenzaA__ADN92560

SEQ ID NO: 134108 - RNA, 1701 nt, Artificial Sequence
  derived and/or modified CDS sequence (opt3) from hemagglutinin__InfluenzaA__ADO00730
augaaggccauccuggugguccuccuuuacaccuucgcuacagcaaacgccgacacucugugcauuggcuaucacgcgaauaacagcacggauaccguugacacaguguuggagaaaaauguaacugugacccauuccgucaacuuacuggaagauaagcacaaugggaaacuauguaagcucagaggaguggcuccccugcaucuugguaaaugcaacauagccggcuggauccuggggaauccugaguguggaucuuugucaacagcaaguagcugguccuacauuguugaaaccucuucgucagacaacggcacuugcuauccaggugauuuuaucgacuacgaggaacucagggagcagcugagcaguguguccucuuucgagcgguuugaaauuuucccgaagacaagcuccuggcccaaucacgauucaaacaagggggucaccgccgcuuguccucaugcaggagccaaaaguuuuuauaagaaucugaucuggcucgugaaaaagggcaacagcuacccaaaauuaucuaaguccuauauaaaugacaagggcaaagagguacugguucuuugggggauccaccaccccucaacgagcgcugaucaacagaguuuguaccagaacgccgacgcguacguguucgucggaacuucucgcuauuccaagaaauuuaagccugaaauugcaauccgaccaaaagugcgugaucaggaggguagaaugaauuacuauuggacccugguggagcccggcgacaagauuacauucgaagccacugggaaccuagucguuccuagguacgcuuuugccauggagcggaacgcaggaagcggcaucauaauuucggauaccccagugcaugacugcaauacaaccugucaaacgccgaaaggugcuaucaacacuucucuccccuuccagaauauucacccuaucacaaucgggaagugcccaaaguauguaaaauccaccaagcugcgccuugccacuggacugagaaacgugcccucaauucagaguaggggcuuguuuggcgcgauagccggguucaucgaaggagguuggacaggcauggucgacgggugguacggauaucaucaccagaaugagcaaggcagcgguuacgcagcugaucucaaauccacccagaacgccauugacgggaucacgaauaaggugaacucuguuauagaaaagaugaauacccaguuuacagcugugggcaaggaguucaaccaccuggagaagcggauugaaaauuuaaacaaaaaggucgaugacggauuccuggauaucuggacuuacaaugccgagcuccuugugcuguuggaaaacgagcgcacccuagacuaucaugauagcaauguuaaaaaccuguacgaaaagguacgaucacagcucaaaaacaaugcaaaggagaucggcaacggguguuuugaguucuaucacaagugcgacaauacauguauggaaagugugaaaaacggaacuuacgauuauccuaaguacuccgaggaagccaaacugaauagagaggaaauugacggugucaaacuugagagcaccaggaucuaucaaauucuggcuauauacucuacaguggcgucaaguuugguccucgugguuagccugggcgcaaucuccuuuuggaugugcucuaacgggucguuacagugccggauuuguaucuga

SEQ ID NO: 134109 - RNA, 1701 nt, Artificial Sequence; identical to SEQ ID NO: 132137
  derived and/or modified CDS sequence (opt3) from hemagglutinin__InfluenzaA__ADO00740

SEQ ID NO: 134110 - RNA, 1701 nt, Artificial Sequence; identical to SEQ ID NO: 131881
  derived and/or modified CDS sequence (opt3) from hemagglutinin__InfluenzaA__ADO00750

SEQ ID NO: 134111 - RNA, 1701 nt, Artificial Sequence; identical to SEQ ID NO: 130717
  derived and/or modified CDS sequence (opt3) from hemagglutinin__InfluenzaA__ADO12143

SEQ ID NO: 134112 - RNA, 1701 nt, Artificial Sequence; identical to SEQ ID NO: 130717
  derived and/or modified CDS sequence (opt3) from hemagglutinin__InfluenzaA__ADO12153

SEQ ID NO: 134113 - RNA, 1701 nt, Artificial Sequence; identical to SEQ ID NO: 130717
  derived and/or modified CDS sequence (opt3) from hemagglutinin__InfluenzaA__ADO12163

SEQ ID NO: 134114 - RNA, 1701 nt, Artificial Sequence; identical to SEQ ID NO: 130717
  derived and/or modified CDS sequence (opt3) from hemagglutinin__InfluenzaA__ADO12173

SEQ ID NO: 134115 - RNA, 1701 nt, Artificial Sequence; identical to SEQ ID NO: 130717
  derived and/or modified CDS sequence (opt3) from hemagglutinin__InfluenzaA__ADO12183

SEQ ID NO: 134116 - RNA, 1701 nt, Artificial Sequence; identical to SEQ ID NO: 130717
  derived and/or modified CDS sequence (opt3) from hemagglutinin__InfluenzaA__ADO12193

SEQ ID NO: 134117 - RNA, 1701 nt, Artificial Sequence; identical to SEQ ID NO: 130717
  derived and/or modified CDS sequence (opt3) from hemagglutinin__InfluenzaA__ADO12203

SEQ ID NO: 134118 - RNA, 1701 nt, Artificial Sequence; identical to SEQ ID NO: 130717
  derived and/or modified CDS sequence (opt3) from hemagglutinin__InfluenzaA__ADO12213

SEQ ID NO: 134119 - RNA, 1701 nt, Artificial Sequence; identical to SEQ ID NO: 130717
  derived and/or modified CDS sequence (opt3) from hemagglutinin__InfluenzaA__ADO12223

SEQ ID NO: 134120 - RNA, 1701 nt, Artificial Sequence; identical to SEQ ID NO: 130717
  derived and/or modified CDS sequence (opt3) from hemagglutinin__InfluenzaA__ADO12233

SEQ ID NO: 134121 - RNA, 1701 nt, Artificial Sequence; identical to SEQ ID NO: 130717
  derived and/or modified CDS sequence (opt3) from hemagglutinin__InfluenzaA__ADO12243

SEQ ID NO: 134122 - RNA, 1701 nt, Artificial Sequence; identical to SEQ ID NO: 130717
  derived and/or modified CDS sequence (opt3) from hemagglutinin__InfluenzaA__ADO12253

SEQ ID NO: 134123 - RNA, 1701 nt, Artificial Sequence; identical to SEQ ID NO: 130717
  derived and/or modified CDS sequence (opt3) from hemagglutinin__InfluenzaA__ADO12263

SEQ ID NO: 134124 - RNA, 1701 nt, Artificial Sequence; identical to SEQ ID NO: 130717
  derived and/or modified CDS sequence (opt3) from hemagglutinin__InfluenzaA__ADO12273

SEQ ID NO: 134125 - RNA, 1701 nt, Artificial Sequence; identical to SEQ ID NO: 130717
  derived and/or modified CDS sequence (opt3) from hemagglutinin__InfluenzaA__ADO12283

SEQ ID NO: 134126 - RNA, 1701 nt, Artificial Sequence; identical to SEQ ID NO: 130717
  derived and/or modified CDS sequence (opt3) from hemagglutinin__InfluenzaA__ADO12293

SEQ ID NO: 134127 - RNA, 1701 nt, Artificial Sequence; identical to SEQ ID NO: 130717
  derived and/or modified CDS sequence (opt3) from hemagglutinin__InfluenzaA__ADO12303

SEQ ID NO: 134128 - RNA, 1701 nt, Artificial Sequence; identical to SEQ ID NO: 130717
  derived and/or modified CDS sequence (opt3) from hemagglutinin__InfluenzaA__ADO12313

SEQ ID NO: 134129 - RNA, 1701 nt, Artificial Sequence; identical to SEQ ID NO: 130717
  derived and/or modified CDS sequence (opt3) from hemagglutinin__InfluenzaA__ADO12323

SEQ ID NO: 134130 - RNA, 1701 nt, Artificial Sequence; identical to SEQ ID NO: 130717
  derived and/or modified CDS sequence (opt3) from hemagglutinin__InfluenzaA__ADO12333

SEQ ID NO: 134131 - RNA, 1701 nt, Artificial Sequence; identical to SEQ ID NO: 130717
  derived and/or modified CDS sequence (opt3) from hemagglutinin__InfluenzaA__ADO12343

SEQ ID NO: 134132 - RNA, 1701 nt, Artificial Sequence; identical to SEQ ID NO: 130717
  derived and/or modified CDS sequence (opt3) from hemagglutinin__InfluenzaA__ADO12353

SEQ ID NO: 134133 - RNA, 1701 nt, Artificial Sequence; identical to SEQ ID NO: 130717
  derived and/or modified CDS sequence (opt3) from hemagglutinin__InfluenzaA__ADO12363

SEQ ID NO: 134134 - RNA, 1701 nt, Artificial Sequence
  derived and/or modified CDS sequence (opt3) from hemagglutinin__InfluenzaA__ADO12373
augaaggccauccuggugguccuccuuuacaccuucgcuacagcaaacgccgacacucugugcauuggcuaucacgcgaauaacagcacggauaccguugacacaguguuggagaagaauguaacugugacccauuccgucaacuuacuggaagauaagcacaaugggaaacuauguaagcucagaggaguggcuccccugcaucuugguaaaugcaacauagccggcuggauccuggggaauccugagugugaaucuuugucaacagcaaguagcugguccuacauuguugagaccucuucgucagacaacggaacuugcuauccaggcgauuuuaucgacuacgaggagcucagggagcagcugagcaguguguccucuuucgaacgguuugagauuuucccgaagacaagcuccuggcccaaucacgauucaaacaagggugucaccgccgcuuguccucaugcaggggccaaaaguuuuuauaagaaucugaucuggcucgugaaaaagggaaacagcuacccaaaauuaucuaaguccuauauaaauaacaagggcaaagaaguacugguucuuuggggcauccaccaccccucaacgagcgcugaccaacagaguuuguaccagaaugccgaugcguacguguucgucgggacuucucgcuauuccaagaaauuuaagccugagauugcaauccgaccaaaagugcgugaccaggagggaagaaugaacuacuauuggacccugguggaacccggugauaagauuacauucgaggccacuggcaaccuagucguuccuagguacgcuuuugccauggaacggaaugcagggagcggaaucauaauuucggacaccccagugcaugauugcaacacaaccugucaaacgccgaaaggcgcuaucaauacuucucuccccuuccagaacauucacccuaucacaaucgguaagugcccaaaguauguaaaauccaccaagcugcgccuugccacugggcugagaaaugugcccucaauucagaguaggggauuguuuggcgcgauagccggcuucaucgaagggggauggacagguauggucgacggcugguacggguaucaucaccagaacgaacaaggaagcggcuacgcagcugaccucaaauccacccagaaugccauugaugagaucacgaacaagguaaauucuguuauagagaaaaugaacacccaguuuacagcuguggguaaggaguucaaucaccuggaaaagcggauugaaaacuuaaauaaaaaggucgacgauggguuccuggacaucuggacuuacaacgccgagcuccuugugcuguuggaaaaugagcgcacccuagauuaucaugacagcaacgugaaaaaccuguacgagaagguucgaucacagcucaaaaauaacgcaaaggaaaucggcaauggauguuuugaguucuaucacaagugcgauaacacauguauggaaagugugaaaaauggcacuuacgacuauccuaaguacuccgaggaagccaaacugaacagagaggagauugauggggucaaacuugaaagcaccaggaucuaucaaauucuggcuauauacucuacaguggcgucaaguuugguccucgugguuagccugggagcaaucuccuuuuggaugugcucuaaugguucguuacagugccggauuuguaucuga

SEQ ID NO: 134135 - RNA, 1701 nt, Artificial Sequence; identical to SEQ ID NO: 132202
  derived and/or modified CDS sequence (opt3) from hemagglutinin__InfluenzaA__ADO12383

SEQ ID NO: 134136 - RNA, 1701 nt, Artificial Sequence
  derived and/or modified CDS sequence (opt3) from hemagglutinin__InfluenzaA__ADO12403
augaaggccauccuggugguccuccuuuacaccuucgcuacagcaaacgccgacacucugugcauuggcuaucacgcgaauaacagcacggauaccguugacacaguguuggagaagaauguaacugugacccauuccgucaacuuacuggaagauaagcacaaugggaaacuauguaagcucagaggaguggcuccccugcaucuugguaaaugcaacauagccggcuggauccuggggaauccugagugugaaucuuugucaacagcaaguagcugguccuacauuguugagaccucuucgucagacaacggaacuugcuauccaggcgauuuuaucgacuacgaggagcucagggagcagcugagcaguguguccucuuucgaacgguuugagauuuucccgaagacaagcuccuggcccaaucacgauucaaacaagggugucaccgccgcuuguccucaugcaggggccaaaaguuuuuauaagaaucugaucuggcucgugaaaaagggaaacagcuacccaaaauuaucuaaguccuauauaaaugacaagggcaaagaaguacugguucuuuggggcauccaccaccccucaacgagcgcugaucaacagaguuuguaccagaacgccgacgcguacguguucgucgggacuucucgcuauuccaagaaauuuaagccugagauugcaauccgaccaaaagugcgugaucaggagggaagaaugaauuacuauuggacccugguggaacccggugacaagauuacauucgaggccacuggcaaccuagucguuccuagguacgcuuuugccauggaacggaacgcagggagcggaaucauaauuucggauaccccagugcaugacugcaauacaaccugucaaacgccgaaaggcgcuaucaacacuucucuccccuuccagaauguacacccuauuacaaucgguaagugcccaaaguaugugaaauccaccaagcugcgccuugccacugggcugagaaacguccccucaauccagaguaggggauuguuuggcgcgauugccggcuucauagaagggggauggacagguaugguggacggcugguacggguaucaucaccagaaugaacaaggaagcggcuacgcagcugaucucaaauccacccagaacgccaucgacgagauuacgaauaagguuaacucugugaucgagaaaaugaauacccaguuuacagcugucgguaaggaguucaaccaccuggaaaagcggauagaaaauuuaaacaaaaagguggaugacggguuccuggauauuuggacuuacaaugccgagcuccuuguacuguuggaaaacgagcgcacccuagacuaucaugauagcaauguuaaaaaccuguacgagaaggugcgaucacagcucaaaaacaaugcaaaggaaaucggcaacggauguuuugaguucuaucacaagugcgacaauacauguauggaaagugucaaaaacggcacuuacgauuauccuaaguacuccgaggaagccaaacugaauagagaggagaucgacggggugaaacuugaaagcaccaggauuuaucaaauccuggcuauuuacucuacagucgcgucaaguuuggugcucguugugagccugggagcaauauccuuuuggaugugcucuaacgguucguuacagugccggaucuguauuuga

SEQ ID NO: 134137 - RNA, 1701 nt, Artificial Sequence; identical to SEQ ID NO: 132353
  derived and/or modified CDS sequence (opt3) from hemagglutinin__InfluenzaA__ADO12413

SEQ ID NO: 134138 - RNA, 1701 nt, Artificial Sequence; identical to SEQ ID NO: 130717
  derived and/or modified CDS sequence (opt3) from hemagglutinin__InfluenzaA__ADO12423

SEQ ID NO: 134139 - RNA, 1701 nt, Artificial Sequence; identical to SEQ ID NO: 130717
  derived and/or modified CDS sequence (opt3) from hemagglutinin__InfluenzaA__ADO12433

SEQ ID NO: 134140 - RNA, 1701 nt, Artificial Sequence; identical to SEQ ID NO: 130717
  derived and/or modified CDS sequence (opt3) from hemagglutinin__InfluenzaA__ADO12443

SEQ ID NO: 134141 - RNA, 1701 nt, Artificial Sequence; identical to SEQ ID NO: 130717
  derived and/or modified CDS sequence (opt3) from hemagglutinin__InfluenzaA__ADO12453

SEQ ID NO: 134142 - RNA, 1701 nt, Artificial Sequence; identical to SEQ ID NO: 130717
  derived and/or modified CDS sequence (opt3) from hemagglutinin__InfluenzaA__ADO12463

SEQ ID NO: 134143 - RNA, 1701 nt, Artificial Sequence
  derived and/or modified CDS sequence (opt3) from hemagglutinin__InfluenzaA__ADO12473
augaaggccauccuggugguccuccuuuacaccuucgcuacagcaaacgccgacacucugugcauuggcuaucacgcgaauaacagcacggauaccguugacacaguguuggagaaaaauguaacugugacccauuccgucaacuuacuggaagauaagcagaaugggaaacuauguaagcucagaggaguggcuccccugcaccuugguaaaugcaacauagccggcuggauccuggggaauccugagugugaaucuuugucaacagcaaguagcugguccuacauuguugagaccucuucgucagacaacggaacuugcuauccaggcgauuuuaucgacuacgaggagcucagggagcaacugagcaguguguccucuuucgaacgguuugagauuuucccgaagacaagcuccuggcccaaucaugauucaaacaagggugucaccgccgcuuguccucacgcaggggccaaaaguuuuuauaagaaucugaucuggcucgugaaaaagggaaacagcuacccaaaauuaucuaaguccuauauaaaugacaagggcaaagaaguacugguucuuuggggcauccaucaccccucaacgagcgcugaucagcagaguuuguaccagaacgccgacgcguacguguucgucgggacuucucgcuauuccaagaaauuuaagccugagauugcaauccgaccaaaagugcgugaucaagagggaagaaugaauuacuauuggacccugguggaacccggugacaagauuacauucgaggccacuggcaaccuagucguuccuagguacgcuuuugccauggaacggaacgcagggagcggaaucauaauuucggauaccccagugcacgacugcaauacaaccugucagacgccgaaaggcgcuaucaacacuucucuccccuuccagaauauucauccuaucacaaucgguaagugcccaaaguauguaaaauccaccaagcugcgccuugccacugggcugagaaacgugcccucaauucagaguaggggauuguuuggcgcgauagccggcuucaucgaagggggauggacagguauggucgacggcugguacggguaucaccaucaaaaugaacagggaagcggcuacgcagcugaucucaaauccacccagaacgccauugacgagaucacgaauaaggugaacucuguuauagagaaaaugaauacccaguuuacagcuguggguaaggaguucaaccaccuggaaaagcggauugaaaauuuaaacaaaaaggucgaugacggguuccuggauaucuggacuuacaaugccgagcuccuugugcuguuggaaaacgagcgcacccuagacuaucacgauagcaauguaaagaaccuguacgagaagguucgaucacaacucaaaaacaaugcaaaggaaaucggcaacggauguuuugaguucuaucauaagugcgacaauacauguauggaaagugugaaaaacggcacuuacgauuauccuaaguacuccgaggaagccaaacugaauagagaggagauugacggggucaaacuugaaagcaccaggaucuaucagauucuggcuauauacucuacaguggcgucaaguuugguccucgugguuagccugggagcaaucuccuuuuggaugugcucuaacgguucguuacagugccggauuuguaucuga

SEQ ID NO: 134144 - RNA, 1701 nt, Artificial Sequence; identical to SEQ ID NO: 130717
  derived and/or modified CDS sequence (opt3) from hemagglutinin__InfluenzaA__ADO12493

SEQ ID NO: 134145 - RNA, 1701 nt, Artificial Sequence
  derived and/or modified CDS sequence (opt3) from hemagglutinin__InfluenzaA__ADO12503
augaaggccauccuggugguccuccuuuacaccuucgcuacagcaaacgccgacacucugugcauuggcuaucacgcgaauaacagcacggauaccguugacacaguguuggagaaaaauguaacugugacccauuccgucaacuuacuggaagauaagcacaaugggaaacuauguaagcucagaggaguggcuccccugcaucuugguaaaugcaacauagccggcuggauccuggggaauccugagugugaaucuuugucaacagcaaguagcugguccuacauuguugagaccucuucgucagacaacggaacuugcuauccaggcgauuuuaucgacuacgaggagcucagggagcagcugagcaguguguccucuuucgaacgguuugagauuuucccgaagacaagcuccuggcccaaucacgauucaaacaagggugucaccgccgcuuguccucaugcaggggccaaaaguuuuuauaagaaucugaucuggcucgugaaaaagggaaacagcuacccaaaauuaucuaaguccuauauaaaugacaagggcaaagaaguacugguucuuuggggcauccaccaccccucaacgagcgcugaucaacagaguuuguaccagaacgccgacgcguacguguucgucgggacuucucgcuauuccaagaaauuuaagccugagauugcaauccgaccaaaagugcgugaucaggagggaagaaugaauuacuauuggacccugguggaacccggugacaagauuacauucgaggccacuggcaaccuagucguuccuagguacgcuuuugccauggaacggaacgcagggagcggaaucauaauuucggauaccccagugcaugacugcaauacaaccugucaaacgccgaaaggcgcuaucaacacuucucuccccuuccagaauauucacccuaucacaaucgguaagugcccaaaguauguaaaauccaccaagcugcgccuugccacugggcugagaaacgugcccucaauucagaguaggggauuguuuggcgcgauagccggcuucaucgaagggggauggacagguauggucgacggcugguacggguaucaucaccagaaugaacaaggaagcggcuacgcagcugaucucaaauccacccagaacgccauugacgagaucacgaauaaggugaacucuguuauagagaaaaugaauacccaguuuacagcuguggguaaggaguucaaccaccuggaaaagcggauugaaaauuuaaacaaaaaggucgaugacggguuccuggauaucuggacuuacaaugccgagcuccuugugcuguuggaaaacgagcgcacccuagacuaucaugauagcaauguaaagaaccuguacgagaagguucgaucacagcucaaaaacaaugcaaaggaaaucggcaacggauguuuugaguucuaucacaagugcgacaauacauguauggaaagugugaaaaacggcacuuacgauuauccuaaguacuccgaggaagccaaacugaauagagaggagauugacggggucaaacuugaaagcaccaggaucuaucaaauucuggcuauauacucuacaguggcgucaaguuugguccucgugguuagccugggagcaaucaacuuuuggaugugcuccaaugguucuuuacagugccggauuuguaucuga

SEQ ID NO: 134146 - RNA, 1701 nt, Artificial Sequence
  derived and/or modified CDS sequence (opt3) from hemagglutinin__InfluenzaA__ADO12513
augaaggccauccuggugguccuccuuuacaccuucgcuacagcaaacgccgacacucugugcauuggcuaucacgcgaauaacagcacggauaccguugacacaguguuggagaaaaauguaacugugacccauuccgucaacuuacuggaagauaagcacaaugggaaacuauguaagcucagagagguggcuccccugcaucuuggaaaaugcaacauagccgguuggauccugggcaauccugaaugugagucuuugucaacagcaaguagcugguccuacauuguugaaaccucuucgucagacaacgggacuugcuauccaggagauuuuaucgacuacgaggagcucagggaacagcugagcaguguguccucuuucgagcgguuugaaauuuucccgaagacaagcuccuggcccaaucacgauucaaacaagggcgucaccgccgcuuguccucaugccggugcaaaaaguuuuuauaagaaucugaucuggcucgugaaaaaggggaacagcuacccaaaauuaucuaaguccuauauaaaugacaagggaaaagagguacugguucuuuggggcauccaccaccccucaacgagcgcugaucaacagaguuuguaccagaacgccgacgcguacguguucgucggcacuucucgcuauuccaagaaauuuaagccugagauugcaauccgaccaaaagugcgugaucaggaagggagaaugaauuacuauuggacccugguggagcccggagacaagauuacauucgaagccacugguaaccuagucguuccuagguacgcuuuugccauggagcggaacgcaggcagcgggaucauaauuucggauaccccagugcaugacugcaauacaaccugucaaacgccgaaaggagcuaucaacacuucucuccccuuccagaauauucacccuaucacaaucggcaagugcccaaaguauguaaaauccaccaagcugcgccuugccacuggucugagaaacgugcccucaauucagaguaggggguuguuuggagcgauagccggcuucaucgaaggcggguggacaggaauggucgacgguugguacggcuaucaucaccagaaugagcaagggagcggauacgcagcugaucucaaauccacccagaacgccauugacgagaucacgaauaaggugaacucuguuauagaaaagaugaauacccaguuuacagcugugggcaaggaguucaaccaccuggaaaagcggauugagaauuuaaacaaaaaggucgaugacgguuuccuggauaucuggacuuacaaugccgaacuccuugugcuguuggagaacgagcgcacccuagacuaucaugauagcaauguuaaaaaccuguacgaaaagguacgaucacagcucaaaaacaaugcaaaggagaucgggaacggcuguuuugaguucuaucacaagugcgacaauacauguauggaaagugugaaaaacggaacuuacgauuauccuaaguacuccgaagaggccaaacugaauagagaggaaauugacggcgucaaacuugagagcaccaggaucuaucaaauucuggcuauauacucuacaguggcgucaaguuugguccucgugguuagccugggggcaaucuccuuuuggaugugcucuaacggaucguuacagugccggauuuguaucuga

SEQ ID NO: 134147 - RNA, 1701 nt, Artificial Sequence; identical to SEQ ID NO: 130717
  derived and/or modified CDS sequence (opt3) from hemagglutinin__InfluenzaA__ADO12523

SEQ ID NO: 134148 - RNA, 1701 nt, Artificial Sequence
  derived and/or modified CDS sequence (opt3) from hemagglutinin__InfluenzaA__ADO12533
augaaggccauccuggugguccuccuuuacaccuucgcuacagcaaacgccgacacucugugcauuggcuaucacgcgaauaacagcacggauaccguugacacaguguuggagaaaaauguaacugugacccauuccgucaacuuacuggaagauaagcacaaugggaaacuauguaagcucagaggaguggcuccccugcaucuugguaaaugcaacauagccggcuggauccuggggaauccugagugugaaucuuugucaacagcaaguagcugguccuacauuguugagaccucuucgucagacaacggaacuugcuauccaggcgauuuuaucgacuacgaggagcucagggagcagcugagcaguguguccucuuucgaacgguuugagauuuucccgaagacaagcuccuggcccaaucacgauucaaacaagggugucaccgccgcuuguccucaugcaggggccaaaaguuuuuauaagaaucugaucuggcucgugaaaaagggaaacagcuacccaaaauuaucuaaguccuauauaaaugacaagggcaaagaaguacugguucuuuggggcauccaccaccccucaacgagcgcugaucaacagaguuuguaccagaacgccgacgcguacguguucgucgggacuucucgcuauuccaagaaauuuaagccugagauugcaauccgaccaaaagugcgugaucaggagggaagaaugaauuacuauuggacccugguggaacccggugacaagauuacauucgaggccacuggcaaccuagucguuccuagguacgcuuuugccauggaacggaacgcagggagcggaaucauaauuucggauaccccagugcaugacugcaauacaaccugucaaacgccgaaaggcgcuaucaacacuucucuccccuuccagaauauucacccuaucacaaucgguaagugcccaaaguauguaaaauccacccgccugagacuugccacugggcugaggaacgugcccucaauucagagucggggauuguuuggcgcgauagccggcuucaucgaagggggauggacagguauggucgacggcugguacggguaucaucaccagaaugaacaaggaagcggcuacgcagcugaucucaaguccacccagaacgccauugacgagaucacgaauaaagugaacucuguuauagagaagaugaauacccaguuuacagcuguggguaaagaguucaaccaccuggaaaagcgcauugaaaauuuaaacaagaaagucgaugacggguuccuggauaucuggacuuacaaugccgagcuccuugugcuguuggaaaacgagcgaacccuagacuaucaugauagcaauguaaagaaccuguacgagaaaguuagaucacagcucaagaacaaugcaaaagaaaucggcaacggauguuuugaguucuaucacaagugcgacaauacauguauggaaagugugaagaacggcacuuacgauuauccuaaauacuccgaggaagccaagcugaauagggaggagauugacggggucaaacuugaaagcacccggaucuaucaaauucuggcuauauacucuacaguggcgucaaguuugguccucgugguuagccugggagcaaucuccuuuuggaugugcucuaacgguucguuacagugccguauuuguaucuga

SEQ ID NO: 134149 - RNA, 1701 nt, Artificial Sequence; identical to SEQ ID NO: 130717
  derived and/or modified CDS sequence (opt3) from hemagglutinin__InfluenzaA__ADO12543

SEQ ID NO: 134150 - RNA, 1701 nt, Artificial Sequence; identical to SEQ ID NO: 130717
  derived and/or modified CDS sequence (opt3) from hemagglutinin__InfluenzaA__ADO12553

SEQ ID NO: 134151 - RNA, 1701 nt, Artificial Sequence; identical to SEQ ID NO: 130717
  derived and/or modified CDS sequence (opt3) from hemagglutinin__InfluenzaA__ADO12563

SEQ ID NO: 134152 - RNA, 1701 nt, Artificial Sequence; identical to SEQ ID NO: 130717
  derived and/or modified CDS sequence (opt3) from hemagglutinin__InfluenzaA__ADO12573

SEQ ID NO: 134153 - RNA, 1701 nt, Artificial Sequence
  derived and/or modified CDS sequence (opt3) from hemagglutinin__InfluenzaA__ADO12593
augaaggccauccuggugguccuccuuuacaccuucgcuacagcaaacgccgacacucugugcauuggcuaucacgcgaauaacagcacggauauaguugacaccguguuggagaaaaauguaacagugacucauuccgucaacuuacuggaagauaagcacaaugggaaacuauguaagcucagaggaguggcuccccugcaucuugguaaaugcaacaucgccggcuggauucuggggaauccugagugugaaucuuugucaaccgcaaguagcugguccuacaucguugagacaucuucgucagacaacggaaccugcuauccaggcgauuuuauugacuacgaggagcucagggagcagcugagcaguguguccucuuucgaacgguuugagaucuucccgaagacuagcuccuggcccaaucacgauucaaacaagggugucacagccgcuuguccucaugcaggggccaaaaguuuuuauaagaaucugauauggcucgugaaaaagggaaacagcuacccaaaauuaucuaaguccuauaucaaugacaagggcaaagaaguacugguucuuuggggcauucaccaccccucaaccagcgcugaucaacagaguuuguaccagaacgccgacgcguacguguucgucgggacgucucgcuauuccaagaaauuuaagccugagaucgcaauucgaccaaaagugcgugaucaggagggaagaaugaauuacuauuggacucugguggaacccggugacaagaucaccuucgaggccacaggcaaccuagucguuccuagguacgcuuuugccauggaacggaacgcagggagcggaauaauuaucucggauacuccagugcaugacugcaauaccacaugucaaaccccgaaaggcgcuauuaacacgucucuccccuuccagaauauccacccuaucacuauugguaagugcccaaaguauguaaaauccacaaagcugcgccuugccaccgggcugagaaacgugcccucaauacagaguaggggauuguuuggcgcgaucgccggcuucauugaagggggauggacugguauggucgacggcugguacggguaucaucaccagaaugaacaaggaagcggcuacgcagcugaucucaaauccacacagaacgccaucgacgagauaaccaauaaggugaacucuguuauugagaaaaugaauacgcaguuuaccgcuguggguaaggaguucaaccaccuggaaaagcggaucgaaaauuuaaacaaaaaggucgaugacggguuccuggauaucuggacauacaaugccgagcuccuugugcuguuggaaaacgagcgcacucuagacuaucaugauagcaauguaaagaaccuguacgagaagguucgaucacagcucaaaaacaaugcaaaggaaauuggcaacggauguuuugaguucuaucacaagugcgacaauaccuguauggaaagugugaaaaacggcacauacgauuauccuaaguacuccgaggaagccaaacugaauagagaggagaucgacggggucaaacuugaaagcacuaggauuuaucaaauacuggcuaucuacucuaccguggcgucaaguuugguccucgugguuagccugggagcaauuuccuuuuggaugugcucuaacgguucguuacagugccggaucuguaucuga

SEQ ID NO: 134154 - RNA, 1701 nt, Artificial Sequence; identical to SEQ ID NO: 130717
  derived and/or modified CDS sequence (opt3) from hemagglutinin__InfluenzaA__ADO12603

SEQ ID NO: 134155 - RNA, 1701 nt, Artificial Sequence; identical to SEQ ID NO: 130717
  derived and/or modified CDS sequence (opt3) from hemagglutinin__InfluenzaA__ADO12613

SEQ ID NO: 134156 - RNA, 1701 nt, Artificial Sequence; identical to SEQ ID NO: 130717
  derived and/or modified CDS sequence (opt3) from hemagglutinin__InfluenzaA__ADO12623

SEQ ID NO: 134157 - RNA, 1701 nt, Artificial Sequence
  derived and/or modified CDS sequence (opt3) from hemagglutinin__InfluenzaA__ADO14349
augaaggccauccuggugguccuccuuuacaccuucgcuacagcaaacgccgacacucugugcauuggcuaucacgcgaauaacagcacggauaccguugacacaguguuggagaagaauguaacugugacccauuccgucaacuuacuggaagauaagcacaaagggaagcuauguaaacucagaggaguggcuccccugcaucuugguaagugcaauauagccggcuggauccuggggaacccugagugugaaucuuugucaacagcaaguagcugguccuacauuguugagaccucuucgucagacaagggaacuugcuauccaggcgauuuuaucgacuacgaggagcucagggagcagcugagcaguguguccucuuucgaacgguuugagauuuucccgaaaacaagcuccuggcccaaucacgauucaaacaagggugucaccgccgcuuguccucaugcaggggccaaaaguuuuuauaagaaucugaucuggcucgugaaaaagggaaacagcuacccaaaguuaucuaaauccuauauaaaugacaagggcaaagaaguacugguucuuuggggcauccaccaccccucaacgagcgcugaucaacagaguuuguaccagaacgccgacgcguacguguucgucgggacuucucgcuauuccaagaaauuuaagccugagauugcaauccgaccaaaagugcgugaucaggagggaagaaugaauuacuauuggacccugguggaacccggugacaagauuacauucgaggccacuggcaaccuagucguuccuagguacgcuuuugccauggaacggaaugcagggagcggaaucauaauuucggauaccccagugcaugacugcaacacaaccugucaaacgccgaagggcgcuaucaacacuucucuccccuuccagaauauucacccuaucacaaucgguaaaugcccaaaguauguaaaauccaccaagcugcgccuugccacugggcugagaaacauucccucaauacagaguaggggauuguuuggcgcgaucgccggcuucauugaagggggauggacagguaugguggacggcugguacggguaucaucaccagaaugaacaaggaagcggcuacgcagcugaucucaaauccacccagaacgccaucgacgagauaacgaauaaggucaacucugugauugagaagaugaauacccaguuuacagcuguugguaaagaguucaaccaccuggaaaagcggaucgaaaauuuaaacaaaaagguggaugacggguuccuggauaucuggacuuacaaugccgagcuccuuguccuguuggaaaacgagcgcacccuagacuaucaugauagcaaugugaaaaaccuguacgagaagguacgaucacagcucaagaauaacgcaaaagaaauuggcaacggauguuuugaguucuaucacaagugcgacaauacauguauggaaaguguuaaaaacggcacuuacgauuauccuaaguacuccgaggaagccaaacugaauagagaggagaucgacggggugaaacuugaaagcaccaggauuuaucaaauacuggcuaucuacucuacagucgcgucaaguuuggugcucgucgugagccugggagcaauuuccuuuuggaugugcucuaacgguucguuacagugccggaucuguaucuga

SEQ ID NO: 134158 - RNA, 1701 nt, Artificial Sequence; identical to SEQ ID NO: 132981
  derived and/or modified CDS sequence (opt3) from hemagglutinin__InfluenzaA__ADO14351

SEQ ID NO: 134159 - RNA, 1701 nt, Artificial Sequence
  derived and/or modified CDS sequence (opt3) from hemagglutinin__InfluenzaA__ADO14353
augaaggccauccuggugguccuccuuuacaccuucgcuacagcaaacgccgacacucugugcauuggcuaucacgcgaauaacagcacggauaccguugacacaguguuggagaaaaauguaacugugacccauuccgucaacuuacuggaagauaagcacaaugggaaacuauguaagcucagaggaguggcuccccugcaucuugguaaaugcaacauagccggcuggauccuggggaauccugagugugaaucuuugucaacagcaaguagcugguccuacauuguugagaccucuucgucagacaacggaacuugcuauccaggcgauuuuaucgacuacgaagaacucagggagcagcugagcaguguguccucuuucgaacgguuugagauuuucccgaagacaagcuccuggcccaaucacgauucaaacaagggugucaccgccgcuuguccucaugcagaagccaaaaguuuuuauaagaaucugaucuggcucgugaaaaaggggaacagcuacccaaaauuaucuaaguccuauauaaaugacaagggaaaagagguacugguucuuuggggcauccaccaccccucaacgagcgcugaucaacagaguuuguaccagaacgccgacgcguacguguucgucggcacuucucgcuauuccaagaaauuuaagccugagauugcaauccgaccaaaagugcgugaucaggaagggagaaugaauuacuauuggacccugguggagcccggagacaagauuacauucgaagccacugguaaccuagucguuccuagguacgcuuuugccauggagcggaacgcaggcagcgggaucauaauuucggauaccccagugcaugacugcaauacaaccugucaaacgccgaaaggagcuaucaacacuucucuccccuuccagaauauucacccuaucacaaucggcaagugcccaaaguauguaaaauccaccaagcugcgccuugccacuggucugagaaacauucccucaauacagaguaggggguuguuuggagcgaucgccggcuucauugaaggcggguggacaggaaugguggacgguugguacggcuaucaucaccagaaugagcaagggagcggauacgcagcugaucucaaauccacccagaacgccaucgacgagauaacgaauaaggucaacucugugauugaaaagaugaauacccaguuuacagcuguuggcaaggaguucaaccaccuggaaaagcggaucgagaauuuaaacaaaaagguggaugacgguuuccuggauaucuggacuuacaaugccgaacuccuuguccuguuggagaacgagcgcacccuagacuaucaugauagcaaugugaaaaaccuguacgaaaagguacgaucacagcucaaaaacaaugcaaaggagauugggaacggcuguuuugaguucuaucacaagugcgacaauacauguauggagaguguuaaaaacggaacuuacgauuauccuaaguacuccgaagaggccaaacugaauagagaggaaaucgacggcgugaaacuugagagcaccaggauuuaucaaauacuggcuaucuacucuacagucgcgucaaguuuggugcucgucgugagccugggggcaauuuccuuuuggaugugcucuaacggaucguuacagugccggaucuguaucuga

SEQ ID NO: 134160 - RNA, 1701 nt, Artificial Sequence
  derived and/or modified CDS sequence (opt3) from hemagglutinin__InfluenzaA__ADO14354
augaaggccauccuggugguccuccuuuacaccuucgcuacagcaaacgccgacacucugugcaugggcuaucacgcgaauaacagcacggauaccguugacacaguguuggagaaaaauguaacugugacccauuccgucaacuuacuggaagauaagcacaaugggaaacuauguaagcucagaggaguggcuccccugcaucuugguaaaugcaacauugccggcuggauacuggggaauccugagugugaaucuuugucaacagcaaguagcugguccuacaucguugagaccucuucgucagacaacggaacuugcuauccaggcgauuuuauugacuacgaagaacucagggagcagcugagcaguguguccucuuucgaacgguuugagaucuucccgaagacaagcuccuggcccaaucacgauucaaacaagggugucaccgccgcuuguccucaugcaggggccaaaaguuuuuauaagaaucugauuuggcucgugaaaaagggaaacagcuacccaaaauuaucuaaguccuauaucaaugacaagggcaaagaaguacugguucuuuggggcauacaccaccccucaacgagcgcugaucaacagaguuuguaccagaacgccgacgcguacguguucgucgggacuucucgcuauuccaagaaauuuaagccugagaucgcaauucgaccaaaagugcgugagcaggaaggaagaaugaauuacuauuggacccugguggagcccggugauaagaucacauucgaagccacuggcaaccuagucguuccuagguacgcuuuugccauggagcggaacgcagggagcggaauuaucauaucggacaccccagugcaugauugcaauacaaccugucaaacgccgaaaggcgcuauuaacacuucucuccccuuccagaauauccacccuauuacaaucgguaagugcccaaaguauguaaaauccaccaagcugcgccuugccacugggcugagaaacgugcccucaauccagaguaggggauuguuuggcgcgauugccggcuucauagaagggggauggacagguauggucgacggcugguacggguaucaucaccagaaugagcaaggaagcggcuacgcagcugaccucaaauccacccagaacgccaucgaugagauuacgaauaaggugaacucuguuaucgaaaagaugaauacccaguuuacagcuguggguaaggaguucaaccaccuggaaaagcggauagagaauuuaaacaaaaaggucgacgauggguuccuggacauuuggacuuacaaugccgaacuccuugugcuguuggagaacgagcgcacccuagauuaucaugacagcaauguuaaaaaccuguacgaaaagguacgaucacagcucaaaaacaaugcaaaggagaucggcaacggauguuuugaguucuaucacaagugcgauaauacauguauggagagugugaaaaacggcacuuacgacuauccuaaguacuccgaagaggccaaacugaauagagaggaaaucgauggggucaaacuugagagcaccaggauuuaucaaauccuggcuauuuacucuacaguggcgucaaguuugguccucgugguuagccugggagcaauauccuuuuggaugugcucuaacgguucguuacagugccggaucuguauuuga

SEQ ID NO: 134161 - RNA, 1701 nt, Artificial Sequence
  derived and/or modified CDS sequence (opt3) from hemagglutinin__InfluenzaA__ADO14356
augaaggccauccuggugguccuccuuuacaccuucgcuacagcaaacgccgacacucugugcauuggcuaucacgcgaauaacagcacggauaccguugacacaguguuggagaaaaauguaacugugacccauuccgucaacuuacuggaagauaagcacaaugggaaacuauguaagcucagaggaguggcuccccugcaucuugguaaaugcaacauagccggcuggauccuggggaauccugagugugaaucuuugucaacagcaaguagcugguccuacauuguugagaccucuucgucagacaacggaacuugcuauccaggcgauuuuaucgacuacgaagaacucagggagcagcugagcaguguguccucuuucgaacgguuugagauuuucccgaagacaagcuccuggcccaaucacgauucaaacaagggugucaccgccgcuuguccucaugcaggggccaaaaguuuuuauaagaaucugaucuggcucgugaaaaagggaaacagcuacccaaaauuaucuaaguccuauauaaaugacaagggcaaagaaguacugguucuuuggggcauccaccaccccucaacgagcgcugaucaacagaguuuguaccagaacgccgacgcguacguguucgucgggacuucucgcuauuccaagaaauuuaagccugagauugcaauccgaccaaaagugcguggacaggaggguagaaugaauuacuauuggacccugguggaacccggcgauaagauuacauucgaggccacugggaaccuagucguuccuagguacgcuuuugccauggaacggaacgcaggaagcggcaucauaauuucggacaccccagugcaugauugcaauacaaccugucaaacgccgaaaggugcuaucaacacuucucuccccuuccagaauauucacccuaucacaaucgggaagugcccaaaguauguaaaauccaccaagcugcgccuugccacuggacugagaaacauucccucaauacagaguaggggcuuguuuggcgcgaucgccggguucauugagggagguuggacaggcaugguggacgggugguacggauaucaucaccagaaugaacaaggcagcgguuacgcagcugaccucaaauccacccagaacgccaucgaugagauaacgaauaaggucaacucugugauugagaaaaugaauacccaguuuacagcuguugggaaggaguucaaccaccuggagaagcggaucgaaaauuuaaacaaaaagguggacgauggcuuccuggacaucuggacuuacaaugccgagcuccuuguccuguuggaaaacgagcgcacccuagauuaucaugacagcaaugugaaaaaccuguacgagaagguacgaucacagcucaaaaacaaugcaaaggaaauuggaaacggcuguuuugaguucuaucacaagugcgauaauacauguauggaaaguguuaaaaacgggacuuacgacuauccugaguacuccgaagaggccaagcugaauagagaggaaaucgauggagugaaacuugagagcaccaggauuuaucaaauacuggcuaucuacucuacagucgcgucaaguuuggugcucgucgugagccugggugcaauuuccuuuuggaugugcucuaacggcucguuacagugccggaucuguaucuga

SEQ ID NO: 134162 - RNA, 1701 nt, Artificial Sequence; identical to SEQ ID NO: 132981
  derived and/or modified CDS sequence (opt3) from hemagglutinin__InfluenzaA__ADO14357

SEQ ID NO: 134163 - RNA, 1701 nt, Artificial Sequence
  derived and/or modified CDS sequence (opt3) from hemagglutinin__InfluenzaA__ADO14359
augaaggccauccuggugguccuccuuuacaccuucgcuacagcaaacgccgacacucugugcauuggcuaucacgcgaauaacagcacggauaccguugacacaguguuggagaaaaauguaacugugacccauuccgucaacuuacuggaagauaagcacaaugggaaacuauguaagcucagaggaguggcuccccugcaucuugguaaaugcaacauagccggcuggauccuggggaauccugagugugaaucuuugucaacagcaaguagcugguccuacauuguugagaccucuucgucagacaacggaacuugcuauccaggcgauuuuaucgacuacgaggagcucagggagcagcugagcaguguguccucuuucgaacgguuugagauuuucccgaagacaagcuccuggcccaaucacgauucaaacaagggugucaccgccgcuuguccucaugcaggggccaaaaguuuuuauaagaaucugaucuggcucgugaaaaagggaaacagcuacccaaaauuaucuaaguccuauauaaaugacaagggcaaagaaguacugguucuuuggggcauccaccaucccccuacgucagcugaucaacagagcuuguaccagaacgccgacgcguacguguucgucgggaccagucgcuauucuaagaaauuuaagccagagauugcaauccgacccaaagugcgugaucaggagggaagaaugaauuacuauuggacucugguggaaccuggugacaagauuacauucgaggccacuggcaaccuagucguuccaagguacgcuuuugccauggaacggaacgcaggguccggaaucauaauuagcgauaccccggugcacgacugcaauacaaccugucaaacgcccaaaggcgcuaucaacacuucgcucccuuuccagaauauucacccaaucacaaucgguaagugccccaaguauguaaaaucuaccaagcugcgccuugccacugggcugagaaacgugccuuccauucagucaaggggauuguuuggcgcgauagccggcuucaucgaagggggauggacagguauggucgacggcugguacggguaucaucaccagaaugaacaaggaaguggcuacgcagcugaucucaaaagcacccagaacgccauugacaagaucacgaauaaagugaacuccguuauagagaagaugaauacccaguuuacagcuguggguaaggaguucaaccaccuggaaaaacggauugagaauuuaaacaagaaagucgaugacggguuccuggauaucuggacuuacaaugccgaacuccuugugcuguuggagaacgaacgcacccuagacuaucaugauucuaauguaaagaaccuguacgagaaaguucgaagccagcucaagaacaaugcaaaggagaucggcaacggauguuuugaguucuaucacaaaugcgacaauacauguauggaaucagugaagaacggcacuuacgauuauccaaaauacagugaagaggccaagcugaauagagaagagauugacggggucaaacuugaguccaccaggaucuaucaaauucuggcuauauacagcacaguggcgucuucauugguccucgugguuagucugggagcaaucagcuuuuggaugugcuccaacgguucuuuacagugccggauuuguaucuga

SEQ ID NO: 134164 - RNA, 1701 nt, Artificial Sequence
  derived and/or modified CDS sequence (opt3) from hemagglutinin__InfluenzaA__ADO14361
augaaggccauccuggugguccuccuuuacaccuucgcuacagcaaacgccgacacucugugcauuggcuaucacgcgaauaacagcacggauaccguugacacaguguuggagaaaaauguaacugugacccauuccgucaacuuacuggaagauaagcacaaugggaaacuauguaagcucagaggaguggcuccccugcaucuugguaaaugcaacauagccggcuggauccuggggaauccugagugugaaucuuugucaacagcaaguagcugguccuacauuguugagaccucuucgucagacaagggaacuugcuauccaggcgauuuuaucgacuacgaggagcucagggagcagcugagcaguguguccucuuucgaacgguuugagauuuucccgaagacaagcuccuggcccaaccacgauucaaauaaaggugucaccgccgcuuguccucaugcaggggccaagaguuuuuauaaaaaccugaucuggcucgugaagaaaggaaauagcuacccaaaguuaucuaaguccuauauaaacgacaaaggcaaggaaguacugguucuuuggggcauccaccaccccucaacgagcgcugaucaacagaguuuguaccagaaugccgacgcguacguguucgucgggacuucucgcuauuccaaaaaguuuaaaccugagauugcaauccgaccaaaggugcgugaucaggagggaagaaugaacuacuauuggacccugguggaacccggugacaaaauuacauucgaggccacuggcaaucuagucguuccuagguacgcuuuugccauggaacggaacgcagggagcggaaucauaauuucggauaccccagugcaugacugcaacacaaccugucaaacgccgaagggcgcuaucaauacuucucuccccuuccagaacauucacccuaucacaaucgguaagugcccaaaauauguaaaguccaccaaacugcgccuugccacugggcugagaaauauucccucaauacagaguaggggauuguuuggcgcgaucgccggcuucauugaagggggauggacagguaugguggacggcugguacggguaucaucaccagaacgaacaaggaagcggcuacgcagcugaucucaaguccacccagaaugccaucgacgagauaacgaacaaagucaauucugugauugagaagaugaacacccaguuuacagcuguugguaaggaguucaaucaccuggaaaaacggaucgaaaacuuaaauaagaaaguggaugacggguuccuggauaucuggacuuacaacgccgagcuccuuguccuguuggaaaaugagcgcacccuagacuaucaugauagcaacgugaagaaucuguacgagaaaguacgaucacagcucaagaacaacgcaaaggaaauuggcaauggauguuuugaguucuaucacaaaugcgacaacacauguauggaaaguguuaagaauggcacuuacgauuauccuaaauacuccgaggaagccaagcugaacagagaggagaucgacggggugaaacuugaaagcaccaggauuuaucaaauacuggcuaucuacucuacagucgcgucaaguuuggugcucgucgugagccugggagcaauuuccuuuuggaugugcucuaaugguucguuacagugccggaucuguaucuga

SEQ ID NO: 134165 - RNA, 1701 nt, Artificial Sequence
  derived and/or modified CDS sequence (opt3) from hemagglutinin__InfluenzaA__ADO14362
augaaggccauccuggugguccuccuuuacaccuucgcuacagcaaacgccgacacucugugcauuggcuaucacgcgaauaacagcacggauaccguugacacaguguuggagaagaauguaacugugacccauuccgucaacuuacuggaagauaagcacaaugggaaacuauguaagcucagaggaguggcuccccugcaucuugguaaaugcaacauagccggcuggauccuggggaauccugagugugaaucuuugucaacagcaaguagcugguccuacauuguugagaccucuucgucagacaacggaacuugcuauccaggcgauuuuaucgacuacgaggagcucagggagcagcugagcaguguguccucuuucgaacgguuugagauuuucccgaagacaagcuccuggcccaaucacgauucaaacaagggugucaccgccgcuuguccucaugcaggggccaaaaguuuuuauaagaaucugaucuggcucgugaaaaagggaaacagcuacccaaaauuaucuaaguccuauauaaaugacaagggcaaagaaguacugguucuuuggggcauccaccaccccucaaacagcgcugaucaacagaguuuguaccagaaugccgacgcguacguguucgucgggacgucucgcuauuccaagaaauuuaagccugagauugcaauccgaccaaaagugcgugaucaggagggaagaaugaacuacuauuggacucugguggaacccggugacaagauuaccuucgaggccacaggcaaccuagucguuccuagguacgcuuuugccauggaacggaaugcagggagcggaaucauaauuucggauacuccagugcaugacugcaacaccacaugucaaaccccgaaaggcgcuaucaauacgucucuccccuuccagaacauucacccuaucacuaucgguaagugcccaaaguauguaaaauccacaaagcugcgccuugccaccgggcugagaaaugugcccucaauucagaguaggggauuguuuggcgcgauagccggcuucaucgaagggggauggacugguauggucgacggcugguacggguaucaucaccagaacgaacaaggaagcggcuacgcagcugaucucaaauccacacagaaugccauugacgagaucaccaacaagguaaauucuguuauagagaaaaugaacacgcaguuuaccgcuguggguaaggaguucaaucaccuggaaaagcggauugaaaacuuaaauaaaaaggucgaugacggguuccuggauaucuggacauacaacgccgagcuccuugugcuguuggaaaaugagcgcacucuagacuaucaugauagcaacgugaaaaaccuguacgagaagguucgaucacagcucaaaaauaacgcaaaggaaaucggcaauggauguuuugaguucuaucacaagugcgacaacaccuguauggaaagugugaaaaauggcacauacgauuauccuaaguacuccgaggaagccaaacugaacagagaggagauugacggggucaaacuugaaagcacuaggaucuaucaaauucuggcuauauacucuaccguggcgucaaguuugguccucgugguuagccugggagcaaucuccuuuuggaugugcucuaaugguucguuacagugccggauuuguaucuga

SEQ ID NO: 134166 - RNA, 1683 nt, Artificial Sequence
  derived and/or modified CDS sequence (opt3) from hemagglutinin__InfluenzaA__ADO21015
auggagguggucagccugaucaccauucuccuucugguuacaguguccaacgccgacaagauaugcaucggcuaccaaucuacuaauucaacggaaaccguagauacauugacugagaacaaugugcccgucgcucacgcaaaagaauuacugcauaccgagcacaacgggaugcuaugugccacaaaucucggacauccucugauucuugauaccugcacuaucgaaggucugauuuauggcaacccaaguugugacuugcuccucgggggaagagaguggagcuacaucguggagaggccguccgcgguuaauggccugugcuaucccgguaacguggaaaaucuggaggaauuacggucucuguucucgucagcuagcaguuaccaacgcauacagaucuuuccugggacaauuuggaacgucuccuauggaggcaccucuaaggccuguagcgacuccuucuacaaaucaaugcgauggcuuacgcagaagaauaacgcauauccaauccaggaugcccaauacacuaauaaccguggcaaaaauauuuuguuuaugugggggaucaaccaucccccuaccgacacaacucagaccaaccuguacacaagaaccgauacgacuacaaguguggcuaccgaggacauaaauaggacuuucaagccacuaauuggaccccggccucucguaaacggucagcagggccgcaucgauuauuacuggagcguucugaagccagggcaaacacuuagagugaggucuaauggaaaccugauugcaccgugguauggccacaucuuguccggugagucacacgggcggauccucaaaaccgaccugaauagcggaaacugcgucgugcagugucagacggaacgcggcggcuuaaauaccacacugcccuuucacaacgugaguaaguacgccuucgggaauugcccuaaauaugucggaguuaagucucucaaacuugcugugggucugcgaaacguaccagccagauccagcaggggcuuguuuggggcgauugcaggauucauagagggcgguuggucggggcuaguggccggcugguacggauuucagcauucuaaugaucaaggcgucgggauggcugccgaccgggauuccacucagaaggcaaucgacaagauuaccucaaaagugaacaauaucguugacaagaugaacaaacaguaugaaauaauugaucacgaguucagugaaguggagacacgucugaauaugaucaacaacaagaucgacgaucaaauucaggacaucugggcuuacaaugccgagcuccugguccuucuggaaaaccagaaaacuuuggaugagcaugacgcgaaugugaacaaucucuacaacaagguaaaacgcgcccugggaagcaaugcaguugaagaugguaagggcuguuuugaguuauaucacaagugcgacgaucaguguauggaaaccauuagaaacgggacauacaauaggcggaaauauaaggaggagucccgacuggaacgccagaaaauagagggagugaagcuagaaucugagggcaccuacaaaauccucacuauuuauagcacggucgcuucaagucuggugaucgccauggguuucgcugccuuucuuuucugggcaauguccaacgggagcugcagaugcaauaucuguauuuga

SEQ ID NO: 134167 - RNA, 1683 nt, Artificial Sequence
  derived and/or modified CDS sequence (opt3) from hemagglutinin__InfluenzaA__ADO21026
auggagguggucagccugaucaccauucuccuucugguuacaguguccaacgccgacaagauaugcaucggcuaccagucuacuaauucaacggaaaccguagauacauugacugagaacaaugugcccgucgcucacgcaaaagaauuacugcauaccgagcacaacgggaugcuaugugccacaaaucucggacauccucugauucuugauaccugcacuaucgaaggucugauuuauggcaacccaaguugugacuugcuccuugggggaagagaguggagcuacaucguggagaggccguccgcgguuaauggccugugcuaucccgguaacguggaaaaucucgaggaauuacggucucuguucucgucagcuagcaguuaccaacgcauacagaucuuuccugggacaauuuggaacgucuccuauggaggcaccucuaaggccuguagcgacuccuucuacaaaucaaugcgauggcuuacgcagaagaauaacgcauauccaauccaggaugcccaauacacuaauaaccguggcaaaaauauuuuguuuaugugggggaucaaccaucccccuaccgacacaacucagaccaaccuguacacaagaaccgauacgacuacaaguguggcuaccgaggacauaaauaggacuuucaacccacuaauuggaccccggccucucguaaauggucagcagggccgcaucgauuauuacuggagcguucugaagccagggcaaacacuuagagugaggucuaacggaaaucugauugcaccgugguauggccacaucuuguccggugagucacacgggcggauccucaagaccgaccugaacagcggaaauugcgucgugcagugucagacggaacgcggcggcuuaaacaccacacugcccuuucacaaugugaguaaauacgccuucgggaacugcccuaaguaugucggaguuaaaucucucaagcuggcugugggucugcgaaauguaccagccagauccagcaggggcuuguuuggggcgauugcaggauucauagagggcgguuggucggggcuaguggccggcugguacggauuucagcauucuaacgaucaaggcgucgggauggcugccgaccgggauuccacucagaaagcaaucgacaagauuaccucaaaggugaauaacaucguugacaaaaugaauaagcaguaugaaauaauugaucacgaguucagugaaguggagacacgucugaacaucaucaacaauaaaauugacgaucaaauccaggacauuugggcuuacaacgccgagcuccugguccuucuggaaaaucagaagacuuuggaugagcaugacgcgaacgugaauaaccucuacaauaaaguaaagcgcgcccugggaagcaacgcaguugaagaugguaaaggcuguuuugaguuauaucacaagugcgacgaucaguguauggaaaccauaagaaaugggacauacaacaggcggaaguauaaagaggagucccgacuggaacgccaaaagaucgagggagugaaacuagaaucugagggcaccuacaagauucucacuaucuauagcacggucgcuucaagucuggugaucgccauggguuucgcugccuuucuuuucugggcaauguccaaugggagcugcagaugcaacauuuguauauga

SEQ ID NO: 134168 - RNA, 1683 nt, Artificial Sequence
  derived and/or modified CDS sequence (opt3) from hemagglutinin__InfluenzaA__ADO21037
auggagguggucagccugaucaccauucuccuucugguuacaguguccaacgccgacaagauaugcaucggcuaccaaucuacuaauucaacggaaaccguagauacauugacugagaacaaugugcccgucgcucacgcaaaagaauuacugcauaccgagcacaacgggaugcuaugugccacaaaucucggacauccucugauucuugauaccugcacuaucgaaggucugauuuauggcaacccaaguugugacuugcuccucgggggaagagaguggagcuacaucguggagaggccguccgcgguuaauggccugugcuaucccgguaacguggaaaaucuggaggaauuacggucucuguucucgucagcuagcaguuaccaacgcauacagaucuuuccugggacaauuuggaacgucuccuauggaggcaccucuaaggccuguagcgacuccuucuacaaaucaaugcgauggcuuacgcagaagaauaacgcauauccaauccaggaugcccaauacacuaauaaccguggcaaaaauauuuuguuuaugugggggaucaaccaucccccuaccgacacaacucagaccaaccuguacacaagaaccgauacgacuacaaguguggcuaccgaggacauaaauaggacuuucaagccauauauuggaccccggccucuaguaaacggucagcagggccgcaucgauuacuauuggagcguucucaagccagggcaaacacugagagugaggucuaauggaaaccuuauugcaccgugguacggccacauccuguccggugagucacacgggcggaucuugaaaaccgaccucaauagcggaaacugcgucgugcagugucagacggaacgcggcggccugaauaccacauuacccuuucacaacgugaguaaguaugccuucgggaauugcccuaaauacgucggaguuaagucucugaaacucgcugugggucuucgaaacguaccagccagauccagcaggggccuguuuggggcgauugcaggauucauagagggcgguuggucgggguugguggccggcugguauggauuucagcauucuaaugaucaaggcgucgggauggcugccgaccgggaucuaacucagaaggcaaucgacaagauuaccuccaaagugaacaauaucguugacaagaugaacaaacaguacgaaauaauugaucacgaguucucagaaguggagacacgucugaauaugaucaacaacaagaucgacgaucaaauucaggacaucugggcuuacaaugccgagcuccugguccuucuggaaaaccagaaaacuuuggaugagcaugacgcgaaugugaacaaucucuauaacaagguaaaacgcgcccugggaaguaaugcaguugaagaugguaagggcuguuuugaguuauaccacaagugcgacgaucaguguauggaaaccauuagaaacgggacauauaauaggcggaaauacaaggaggagagccgacuggaacgccagaaaauagagggagugaagcuagaauccgagggcaccuauaaaauccucacuauuuacucuacggucgcuagcucacuggugaucgccauggguuucgcugccuuucuuuucugggcaaugaguaacggguccugcagaugcaauaucuguauuuga

SEQ ID NO: 134169 - RNA, 1683 nt, Artificial Sequence
  derived and/or modified CDS sequence (opt3) from hemagglutinin__InfluenzaA__ADO21048
auggagguggucagccugaucaccauucuccuucugguuacaguguccaacgccgacaagauaugcaucggcuaccaaucuacuaauucaacggaaaccguagauacauugacugagaacaaugugcccgucgcucacgcaaaagaauuacugcauaccgagcacaacgggaugcuaugugccacaaaucucggacauccucugauucuugauaccugcacuaucgaaggucugauuuauggcaacccaaguugugacuugcuccucgggggaagagaguggagcuacaucguggagaggccguccgcgguuaauggccugugcuaucccgguaacguggaaaaucuggaggaauuacggucucuguucucgucagcuagcaguuaccaacgcauacagaucuuuccugggacaauuuggaacgucuccuauggaggcaccucuaaggccuguagcgacuccuucuacaaaucaaugcgauggcuuacgcagaagaauaacgcauauccaauccaggaugcccaauacacuaauaaccguggcaaaaauauucacuuuaugugggggaucaaccaucccccuaccgacacaacucagaccaacuuguacacaagaaccgauacgacuacaaguguggcuaccgaggacauaaauaggacuuucaagccacugauuggaccccggccucuaguaaacggucagcagggccgcaucgauuauuacuggagcguucucaagccagggcaaacacugagagugaggucuaauggaaaccuuauugcaccgugguauggccacauccuguccggugagucacacgggcggaucuugaaaaccgaccucaauagcggaaacugcgucgugcagugucagacggaacgcggcggccugaauaccacauuacccuuucauaacgugaguaaguacgccuucgggaauugcccuaaauaugucggaguuaagucucugaaacucgcugugggucuucgaaacguaccagccagauccagcaggggccuguuuggggcgauugcaggauucauagagggcgguuggucgggguugguggccggcugguacggauuucagcacucuaaugaucaaggcgucgggauggcugccgaccggguguccacucagaaggcaaucgauaagauuaccucaaaaguuaacaauaucguggacaagaugaacaaacaguaugaaauaauugaccaugaguucagugaagucgagacacgucuaaauaugaucaacaacaagaucgaugaccaaauucaggauaucugggcuuacaaugccgagcugcucgugcugcuugaaaaccagaaaacucuggacgagcacgaugcgaauguaaacaauuuguacaacaagguuaaacgcgcccucggaagcaaugcaguggaagacgguaagggcuguuuugagcuguaucacaagugcgaugaccaguguauggaaaccauuagaaacgggacauacaauaggcggaaauauaaggaggagucccgauuagaacgccagaaaauagagggagucaagcuggaaucugagggcaccuacaaaauccuaacuauuuauagcacgguggcuucaagucucgucaucgccauggguuucgcugccuuucuguucugggcaauguccaacgggagcugcagaugcaauaucuguauuuga

SEQ ID NO: 134170 - RNA, 1701 nt, Artificial Sequence
  derived and/or modified CDS sequence (opt3) from hemagglutinin__InfluenzaA__ADO25092
augaaggccauccuggugguccuccuuuacaccuucgcuacagcaaacgccgacacucugugcauuggcuaucacgcgaauaacagcacggauaccguugacacaguguuggagaaaaauguaacugugacccauuccgucaacuuacuggaagauaagcacaaugggaaacuauguaagcucagaggaguggcuccccugcaucuugguaaaugcaacauagccggcuggauccuggggaauccugagugugaaucuuugucaacagcaaguagcugguccuacauuguugagaccucuucgucagacaacggaacuugcuauccaggcgauuuuaucgacuacgaggagcucagggagcagcugagcaguguguccucuuucgaacgguuugagauuuucccgaagacaagcuccuggcccaaucacgauucaaacaagggugucaccgccgcuuguccucaugcaggggccaaaaguuuuuauaagaaucugaucuggcucgugaaaaagggaaacagcuacccaaaauuaucuaauuccuauauaaacgacaagggcaaggaaguacugguucuuuggggcauccaccaccccucaacgagcgcugaucaacagaguuuguaccagaaugccgacgcguacguguucgucgggacuucucgcuauuccaaaaaguuuaaaccugagauugcaauccgaccaaaggugcgugaucaggagggaagaaugaacuacuauuggacccugguggaacccggugacaaaauuacauucgaggccacuggcaaccuagucguuccuagguacgcuuuugccauggaacggaaugcagggagcggaaucauaauuucggauaccccagcucaugacugcaacacaaccugucaaacgccgaagggcgccaucaauacuucucuccccuuccagaacauucacccuaucacaaucgguaaaugcccaaaguaugugaaguccaccaaacugcgccuugcgacugggcugagaaauguacccucaauucagaguaggggauuguuuggcgccauagcaggcuucaucgaagggggauggacagguaugguggacggcugguacggguaucaucaccagaacgaacaaggaagcggcuacgcugccgaucucaaguccacccagaaugcuauugacgagaucacgaacaaagucaauucugugauagagaagaugaacacccaguuuacagccguugguaaagaguucaaucaccuggaaaagcggauugaaaacuuaaauaagaaaguggaugacggguuccuggauaucuggacuuacaacgcagagcuccuuguccuguuggaaaaugagcgcacccuagacuaucaugauagcaacgugaagaaccuguacgagaaaguacgaucacagcucaagaauaacgccaaagaaaucggcaauggauguuuugaguucuaucacaagugcgacaacacauguauggaaaguguuaagaauggcacuuacgauuauccuaaauacuccgaggaagcuaagcugaacagagaggagauugacggggugaaacuugaaagcaccaggaucuaucaaauucuggcgauauacucuacagucgcaucaaguuuggugcucgucgugagccugggagccaucuccuuuuggaugugcucuaaugguucguuacagugccggauuuguaucuga

SEQ ID NO: 134171 - RNA, 1701 nt, Artificial Sequence; identical to SEQ ID NO: 132589
  derived and/or modified CDS sequence (opt3) from hemagglutinin__InfluenzaA__ADO25112

SEQ ID NO: 134172 - RNA, 1701 nt, Artificial Sequence; identical to SEQ ID NO: 132589
  derived and/or modified CDS sequence (opt3) from hemagglutinin__InfluenzaA__ADO25122

SEQ ID NO: 134173 - RNA, 1701 nt, Artificial Sequence
  derived and/or modified CDS sequence (opt3) from hemagglutinin__InfluenzaA__ADO25132
augaacgccauccuggugguccuccuuuacaccuucgcuacagcaaaugccgacacucugugcauuggcuaucacgcgaacaauagcacggauaccguugacacauuguuagagaagaacgugacuguaacccauuccgugaaucugcuagaagauaaacacaacgggaagcucuguaaacugagaggagucgcuccccuucaucuggguaagugcaauauagccggcuggaucuuggggaacccugagugugaaucucucucaacagcaaguagcugguccuacauuguggagaccucuucgucagacaauggaacuugcuauccaggcgauuuuaucgacuacgaagaacugagggagcagcugagcaguguuuccucuuucgaacgguuugagauuuucccgaaaacaagcuccuggcccaaccacgauucaaauaagggugugaccgccgcuuguccucaugcaggggccaagaguuuuuauaaaaaccucaucugguuagucaagaaaggaaauagcuacccaaagcugucuaaauccuauauaaacgacaagggcaaggaagugcuuguauuguggggcauccaccaccccucaacgagcgcugaucaacagagucuguaccagaaugccgacgcguacguuuucguggggacuucucgcuauuccaaaaaguuuaaaccugagauugcaauccgaccaaagguccgugaucaggagggaagaaugaacuacuauuggacccuaguggaacccggugacaaaauuacauucgaggccacuggcaaccucguggucccuagguacgcuuuugccauggaacggaaugcagggagcgauaucauaauuucggacaccccaguucaugacugcaacacaaccugucaaacgccgaagggagcuaucaauacuucucugcccuuccagaacauucacccuaucacaaucggcaaaugcccaaaguaugugaaguccaccaaacuucgccuggccacugguuugagaaauguacccucaauucagaguagggggcucuuuggagcgauagccggcuucaucgagggcggguggacaggaaugguggaugguugguacggcuaucaucaccagaacgaacaagggagcggauacgcagcugaccugaaguccacccagaaugccauugaugagaucacgaacaaaauaaauucugucauugagaagaugaacacccaguuuacagcugugggcaaagaguucaaucacuuagagaagcggaucgaaaaccugaauaagaaaguugacgaugguuuccucgacaucuggacuuacaacgccgagcuucugguguugcuagaaaaugagcgcacccuggauuaucaugacagcaacgucaagaaccucuacgagaaagugcgaucacagcugaagaauaacgcaaaagaaauugggaauggcuguuuugaguucuaucacaagugcgauaacacauguauggaaaguguaaagaauggaacuuacgacuauccuaaauacuccgaggaagccaaacuuaacagagaggagaucgauggcguuaagcuggaaagcaccaggauuuaucaaauauuggcuaucuacucuacaguggcgucaagucucguccugguggucagcuuaggggcaauuuccuuuuggaugugcucuaauggaucgcugcagugccggaucuguaucuga

SEQ ID NO: 134174 - RNA, 1701 nt, Artificial Sequence; identical to SEQ ID NO: 132330
  derived and/or modified CDS sequence (opt3) from hemagglutinin__InfluenzaA__ADO25142

SEQ ID NO: 134175 - RNA, 1701 nt, Artificial Sequence
  derived and/or modified CDS sequence (opt3) from hemagglutinin__InfluenzaA__ADO25152
augaaggccauccuggugguccuccuuuacaccuucgcugcagccaacgcggacacacugugcauuggcuaucacgcuaauaacagcacugauacgguugacaccguguuggagaaaaauguaacagugacucauuccgucaacuuacuggaagauaagcacaaugggaaacuauguaagcucagaggaguggcaccccugcaucuugguaaaugcaacauagccggcuggauccuggggaauccugagugugaaucuuugucaaccgccaguagcugguccuacauuguugagacaucuucgucagacaacggaaccugcuauccaggcgauuuuaucaauuacgaggagcucagggagcagcugagcagugugucccuguucgaacgguuugagauuuucccgaagacuucuagcuggcccaaccacgacuccaauaagggugucacagcugcauguccucaugccggggcuaaaucauuuuauaagaaccucaucugguuagugaaaaagggaaauaguuacccaaaacugagcaagucuuauauaaacgauaagggcaaagaaguacuuguuuuguggggcauccaccaccccuccaccucagccgaccaacagagccuguaccagaaugcggaugcauacguguucgucgggacgagucgcuauucuaagaaauuuaagccugagauugccauccgaccaaaagugcgugaccaggagggaagaaugaacuacuauuggacucuaguggaacccggugauaagauuaccuucgaggcuacaggcaaccucgucguuccuagguacgccuuugcaauggaacggaaugcuggguccggaaucauaauuagcgacacuccagugcaugauugcaacaccacaugucaaaccccgaaaggcgccaucaauacgucgcugcccuuccagaacauucacccuaucacuaucgguaagugcccaaaguauguaaaaucuacaaagcugcgccuugcgaccggguugagaaaugugcccuccauucagucaaggggacucuuuggcgccauagcaggcuucaucgaagggggauggacugguauggucgacggcugguacggguaucaucaccagaacgaacaaggaaguggcuacgcugccgaccugaaaagcacacagaaugcuauugauaagaucaccaacaaaguuaauuccgugauagagaagaugaacacgcaguuuaccgccguggguaaggaguucaaucacuuagaaaaacggauugagaaccugaauaagaaagucgacgauggguuccucgacaucuggacauacaacgcagaacuucugguguugcuagagaaugaacgcacucuggauuaucaugacucuaacguaaagaaccucuacgagaaaguucgaagccagcugaagaauaacgccaaggagaucggcaauggauguuuugaguucuaucacaaaugcgauaacaccuguauggaaucagugaagaauggcacauacgacuauccuaaauacagugaagaggcuaaacuuaacagagaagagauugauggggucaagcuggaguccacuaggaucuaucaaauuuuggcgauauacagcaccguggcaucuucacucguccuggugguuaguuuaggagccaucagcuuuuggaugugcuccaaugguucucugcagugccggauuuguaucuga

SEQ ID NO: 134176 - RNA, 1701 nt, Artificial Sequence; identical to SEQ ID NO: 132269
  derived and/or modified CDS sequence (opt3) from hemagglutinin__InfluenzaA__ADO25162

SEQ ID NO: 134177 - RNA, 1701 nt, Artificial Sequence; identical to SEQ ID NO: 132269
  derived and/or modified CDS sequence (opt3) from hemagglutinin__InfluenzaA__ADO25172

SEQ ID NO: 134178 - RNA, 1701 nt, Artificial Sequence; identical to SEQ ID NO: 132269
  derived and/or modified CDS sequence (opt3) from hemagglutinin__InfluenzaA__ADO25182

SEQ ID NO: 134179 - RNA, 1701 nt, Artificial Sequence; identical to SEQ ID NO: 130717
  derived and/or modified CDS sequence (opt3) from hemagglutinin__InfluenzaA__ADO25192

SEQ ID NO: 134180 - RNA, 1701 nt, Artificial Sequence; identical to SEQ ID NO: 130717
  derived and/or modified CDS sequence (opt3) from hemagglutinin__InfluenzaA__ADO25202

SEQ ID NO: 134181 - RNA, 1701 nt, Artificial Sequence
  derived and/or modified CDS sequence (opt3) from hemagglutinin__InfluenzaA__ADO25212
augaaggccauccuggugguccuccuuuacaccuucgcuacagcaaacgccgacacucugugcauuggauaucacgcgaauaacagcacggauaccguugacacaguguuggagaaaaauguaacugugacccauuccgucaacuuacuggaagauaagcacaaugggaaacuauguaagcucagaggaguggcuccccugcaucuugguaaaugcaacauagccggcuggauccuggggaauccugagugugaaucuuugucaacagcaaguagcugguccuacauuguugagaccucuucgucagacaacggaacuugcuauccaggcgauuuuaucgacuacgaagaacucagggagcagcugagcaguguguccucuuucgaacgguuugagauuuucccgaagacaagcuccuggcccaaucacgauucaaacaagggugucaccgccgcuuguccucaugcaggggccaaaaguuuuuauaagaaucugaucuggcucgugaaaaagggaaacagcuacccaaaauuaucuaaguccuauauaaaugacaagcgcaaagaaguacugguucuuuggggcauccaccaccccucaacgagcgcugaucaacagaguuuguaccagaacgccgacucuuacguguucgucggcacuucccgauauagcaagaaauuuaagccugagauugcgauccguccaaaagugagagaucaggaggggaggaugaauuacuauuggacccugguggaacccggagacaagauuacauucgaggcaacugguaaccuagucguuccucgguacgccuuugcuauggaacgcaacgccggcucggggaucauaauuucugauaccccagugcaugacugcaauacaaccugucaaacgccggagggagcaaucaacacuucccuccccuuccagaauauucacccuaucacaaucggcaaaugcccaaaguauguaaagucaaccaaacugagacuugcuacuggucugaggaacgugcccaguauucagagccggggguuguuuggagccauagcgggcuucaucgaaggcggguggacaggaauggucgacgguugguacggcuaucaucaccagaaugagcaaggguccggauacgccgcagaucucaagucuacccagaacgcuauugacgagaucacgaauaaagugaacagcguuauagaaaagaugaauacccaguuuacagccgugggcaaagaguucaaccaccuggaaaagcgcauugagaauuuaaacaagaaagucgaugacgguuuccuggauaucuggacuuacaaugcugaacuccuugugcuguuggagaacgagcgaacccuagacuaucaugauucaaauguaaagaaccuguacgaaaaaguuagaagucagcucaagaacaaugccaaagagaucgggaacggcuguuuugaguucuaucacaagugcgacaauacauguauggaguccgugaagaacggaacuuacgauuauccuaaauacagcgaagaggcaaagcugaauagggaggaaauugacggcgucaaacuugagucuacccggaucuaucaaauucuggccauauacucaacaguggcuaguagcuugguccucgugguuucccugggggcgaucucuuuuuggaugugcucgaacggcagcuuacagugccguauuuguaucuga

SEQ ID NO: 134182 - RNA, 1701 nt, Artificial Sequence
  derived and/or modified CDS sequence (opt3) from hemagglutinin__InfluenzaA__ADO25222
augaaggccauccuggugguccuccuuuacaccuucgcuacagcaaacgccgacacucugugcauuggcuaucacgcgaauaacagcacggauaccguugacacaguguuggagaaaaauguaacugugacccauuccgucaacuuacuggaagauaagcacaaugggaaacuauguaagcucagaggaguggcuccccugcaucuugguaaaugcaacauagccggcuggauccuggggaauccugagugugaaucuuugucaacagcaaguagcugguccuacauuguugagaccucuucgucagacaacggaacuugcuauccaggcgauuuuaucgacuacgaggagcucagggagcagcugagcaguguguccucuuucgaacgguuugagauuuucccgaagacaagcuccuggcccaaucacgauucaaacaagggugucaccgccgcuuguccucaugcaggggccaaaaguuuuuauaagaaucugaucuggcucgugaaaaagggaaacagcuacccaaaauuaaauaagucuuauauaaacgacaagggcaaagaaguacugguucuuuggggcauccaccaccccuccacgucagcugaucaacagagcuuguaccagaaugccgacgcguacguguucgucgggacuucccgcuauucuaagaaauuuaagccugagauugcaauccgaccaaaagugcgugaucaggagggaagaaugaacuacuauuggacccugguggaacccggugacaagauuacauucgaggccacuggcaaccuagucguuccuagguacgcuuuugccauggaacggaaugcaggguccggaaucauaauuagcgauaccccagugcaugacugcaacacaaccugucaaacgccgaaaggcgcuaucaauacuucgcuccccuuccagaacauucacccuaucacaaucgguaagugcccaaaguauguaaaaucuaccaagcugcgccuugccacugggcugagaaaugugcccuccauucagucaaggggauuguuuggcgcgauagccggcuucaucgaagggggauggacagguauggucgacggcugguacggguaucaucaccagaacgaacaaggaaguggcuacgcagcugaucucaaaagcacccagaaugccauugacaagaucacgaacaaagugaauaguguuauagagaagaugaacacccaguuuacagcuguggguaaggaguucaaucaccuggaaaaacggauugagaacuuaaauaagaaagucgaugacggguuccuggauaucuggacuuacaacgccgaacuccuugugcuguuggagaaugaacgcacccuagacuaucaugauucuaacguaaagaaccuguacgagaaaguucgaagccagcucaagaauaacgcaaaggagaucggcaauggauguuuugaguucuaucacaaaugcgacaacacauguauggaaucagugaagaauggcacuuacgauuauccuaaauacagugaagaggccaagcugaacagagaagagauugacggggucaaacuugaguccaccaggaucuaucaaauucuggcuauauacagcacaguggcgucuucauugguccucgugguuagucugggagcaaucagcuuuuggaugugcuccaaugguucuuuacagugccggauuuguaucuga

SEQ ID NO: 134183 - RNA, 1701 nt, Artificial Sequence; identical to SEQ ID NO: 132330
  derived and/or modified CDS sequence (opt3) from hemagglutinin__InfluenzaA__ADO25232

SEQ ID NO: 134184 - RNA, 1701 nt, Artificial Sequence; identical to SEQ ID NO: 132269
  derived and/or modified CDS sequence (opt3) from hemagglutinin__InfluenzaA__ADO25242

SEQ ID NO: 134185 - RNA, 1701 nt, Artificial Sequence; identical to SEQ ID NO: 132347
  derived and/or modified CDS sequence (opt3) from hemagglutinin__InfluenzaA__ADO25252

SEQ ID NO: 134186 - RNA, 1701 nt, Artificial Sequence; identical to SEQ ID NO: 132589
  derived and/or modified CDS sequence (opt3) from hemagglutinin__InfluenzaA__ADO25262

SEQ ID NO: 134187 - RNA, 1701 nt, Artificial Sequence
  derived and/or modified CDS sequence (opt3) from hemagglutinin__InfluenzaA__ADO25272
augaaggccauccuggugguccuccuuuacaccuucgcuacagcaaacgccgacacucugugcauuggcuaucacgcgaauaacagcacggauaccguugacacaguguuggagaaaaauguaacugugacccauuccgucaacuuacuggaagauaagcacaaugggaaacuauguaagcucagaggaguggcuccccugcaucuugguaaaugcaacauagccggcuggauccuggggaauccugagugugaaucuuugucaacagcaaguagcugguccuacauuguugagaccucuucgucagacaacggaacuugcuauccaggcgauuuuaucgacuacgaggagcucagggagcagcugagcaguguguccucuuucgaacgguuugagauguucccgaagacaagcuccuggcccaaucacgauucaaacaagggugucaccgccgcuuguccucaugcaggggugaaaaguuuuuauaagaaucugauuuggcucguaaagaagggaaacagcuacccaaaauuaucuaaguccuauaucaaugacaagggcaaagaaguucuggugcuuuggggcauacaccaccccucaacgagcgccgaucaacagaguuuguaccagaacgcugacgccuacgucuucguggggacuucucgcuauuccaagaaauuuaagccugagaucgcgauucgaccaaaagugcgugaucaggagggaagaaugaauuacuauuggacccuggucgaacccggugacaagaucacauucgaggcaacuggcaaccuaguugugccuagguacgccuuugcuauggaacggaacgccgggagcggaauuaucauaucggauaccccaguacaugacugcaauacaaccugucaaacgccgaaaggcgcaauuaacacuucucuccccuuccagaauauccacccuauuacaaucgguaagugcccaaaguaugugaaauccaccaagcugcgccuugcuacugggcugagaaacguccccucaauccagaguaggggauuguuuggcgccauugcgggcuucauagaagggggauggacagguaugguggacggcugguacggguaucaucaccagaaugaacaaggaagcggcuacgccgcagaucucaaauccacccagaacgcuaucgacgagauuacgaauaagguuaacucugugaucgagaaaaugaauacccaguuuacagccgucgguaaggaguucaaccaccuggaaaagcggauagaaaauuuaaacaaaaagguggaugacggguuccuggauauuuggacuuacaaugcugagcuccuuguacuguuggaaaacgagcgcacccuagacuaucaugauagcaauguuaaaaaccuguacgagaaggugcgaucacagcucaaaaacaaugccaaggaaaucggcaacggauguuuugaguucuaucacaagugcgacaauacauguauggaaagugucaaaaacggcacuuacgauuauccuaaguacuccgaggaagcaaaacugaauagagaggagaucgacggggugaaacuugaaagcaccaggauuuaucaaauccuggccauuuacucuacagucgcuucaaguuuggugcucguugugagccugggagcgauauccuuuuggaugugcucuaacgguucguuacagugccggaucuguauuuga

SEQ ID NO: 134188 - RNA, 1701 nt, Artificial Sequence; identical to SEQ ID NO: 132330
  derived and/or modified CDS sequence (opt3) from hemagglutinin__InfluenzaA__ADO25282

SEQ ID NO: 134189 - RNA, 1698 nt, Artificial Sequence; identical to SEQ ID NO: 130536
  derived and/or modified CDS sequence (opt3) from hemagglutinin__InfluenzaA__ADO27622

SEQ ID NO: 134190 - RNA, 1701 nt, Artificial Sequence; identical to SEQ ID NO: 130717
  derived and/or modified CDS sequence (opt3) from hemagglutinin__InfluenzaA__ADO29887

SEQ ID NO: 134191 - RNA, 1701 nt, Artificial Sequence
  derived and/or modified CDS sequence (opt3) from hemagglutinin__InfluenzaA__ADO29888
augaaggccauccuggugguccuccuuuacaccuucgcuacagcaaacgccgacacucugugcauuggcuaucacgcgaauaacagcacggauaccguugacacaguguuggagaaaaauguaacugugacccauuccgucaacuuacuggaagauaagcacaaugggaaacuauguagacucaggggaguggcuccccugcaucuugguaagugcaacauagccggcuggauccuggggaauccugagugugaaucuuugucaacagcaaguagcugguccuacauuguugagaccucuucgucagacaacggaacuugcuauccaggcgauuuuaucgacuacgaggagcuccgggagcagcugagcaguguguccucuuucgaacgcuuugagauuuucccgaaaacaagcuccuggcccaaucacgauccuaacaagggugucaccgccgcuuguccacaugcaggggccaagucauuuuauaaaaaucugaucuggcucgugaagaaaggaaacaguuaccccaaguuaagcaaaucuuauauaaaugacaagggcaaggaaguacugguucuuuggggcauccaccacccuuccacgucagcugaucaacagagcuuguaccagaacgccgacgcguacguguucgucgggaccagucgauauucuaaaaaguuuaaaccagagauugcaauccgucccaaggugagagaucaggagggaaggaugaauuacuauuggacucugguggaaccuggugacaaaauuacauucgaggccacuggcaaccuagucguuccacgguacgcuuuugccauggaacgcaacgcaggguccggaaucauaauuagcgauaccccggugcaugacugcaauacaaccugucaaacgcccaagggcgcuaucaacacuucgcucccuuuccagaauauucacccaaucacaaucgguaaaugccccaaguauguaaagucuaccaaacugagacuugccacugggcugaggaacgugccuuccauucagucacggggauuguuuggcgcgauagccggcuucaucgaagggggauggacagguauggucgacggcugguacggguaucaucaccagaaugaacaaggaaguggcuacgcagcugaucucaagagcacccagaacgccauugacgagaucacgaauaaagugaacuccguuauagagaagaugaauacccaguuuacagcuguggguaaagaguucaaccaccuggaaaagcgcauugaaaauuuaaacaagaaagucgaugacggguuccuggauaucuggacuuacaaugccgagcuccuugugcuguuggaaaacgagcgaacccuagacuaucaugauucuaauguaaagaaccuguacgagaaaguuagaagccagcucaagaacaaugcaaaagaaaucggcaacggauguuuugaguucuaucacaagugcgacaauacauguauggaaucagugaagaacggcacuuacgauuauccaaaauacagugaggaagccaagcugaauagggaggagauugacggggucaaacuugaauccacccggaucuaucaaauucuggcuauauacagcacaguggcgucuucauugguccucgugguuagucugggagcaaucagcuuuuggaugugcuccaacgguucuuuacagugccguauuuguaucuga

SEQ ID NO: 134192 - RNA, 1701 nt, Artificial Sequence
  derived and/or modified CDS sequence (opt3) from hemagglutinin__InfluenzaA__ADO29889
augaaggccauccuggugguccuccuuuacaccuucgcuacagcaaacgccgacauucugugcauaggcuaucacgcgaauaacagcacugauacgguugacaccguguuggagaaaaauguaacagugacucauuccgucaacuuacuggaagauaagcacaaugggaaacuauguaagcucagaggaguggcuccccugcaucuugguaaaugcaacaucgccggcuggauucuggggaauccugagugugaaucuuuuucaaccaguagcuccuggucuuacaucguugagacaucgucaagcgacaacggaaccugcuauccaggcgauuucauugacuacgaagaguugagggagcagcucaguuccgugucuagcuuugaacgguucgagaucuuuccgaagacuuccucauggcccaaucacgauaguaacaagggugucacagcagccuguccucaugcuggggcaaagagcuucuauaaaaaucugauauggcuggugaaaaagggaaacucuuacccaaaacucuccaagucauauaucaaugacaagggcaaagaaguauuaguucuguggggcauucaccaccccagcaccagugccgaucaacagucucuuuaccagaacgcugacgccuacguguuugucgggacgucccgcuauagcaagaaauucaagccugagaucgcgauucgaccaaaagugcgugaucaggagggaagaaugaauuacuauuggacuuugguggaacccggugacaagaucaccuuugaggcaacaggcaaccuggucguuccuagguacgccuucgcuauggaacggaacgccgggucgggaauaauuaucucugauacuccagugcaugacugcaauaccacaugucaaaccccgaaaggcgcaauuaacacgucccuacccuuucagaauauccacccuaucacuauugguaagugcccaaaguauguaaaaucaacaaagcuccgccuggcuaccgggcuuagaaacgugcccaguauacagagcaggggacuguucggcgccaucgcgggcuuuauugaagggggauggacugguauggucgacggcugguacggguaucaucaccagaaugaacaaggauccggcuacgccgcagauuugaaaucuacacagaacgcuaucgacgagauaaccaauaaggugaacagcguuauugagaaaaugaauacgcaguucaccgccguggguaaggaguucaaccaccucgagaagcggaucgaaaaucugaacaaaaaggucgaugacggguuuuuagauaucuggacauacaaugcugagcugcucgugcuucuggaaaacgagcgcacuuuggacuaucaugauucaaauguuaaaaaccuauacgagaagguacgaagucagcugaaaaacaaugccaaggaaauuggcaacggauguuucgaguuuuaucacaagugcgacaauaccuguauggaauccgugaaaaacggcacauacgauuauccuaaguacagcgaggaagcaaaacucaauagagaggagaucgacggggucaagcuggaaucuacuaggauuuaucaaauacuugccaucuacucaaccguggcuaguagccuggucuuggugguuucccucggagcgauuucuuucuggaugugcucgaacgguagccugcagugccggaucuguaucuga

SEQ ID NO: 134193 - RNA, 1701 nt, Artificial Sequence
  derived and/or modified CDS sequence (opt3) from hemagglutinin__InfluenzaA__ADO29890
augaaggccauccuggugguccuccuuuacaccuucgcuacagcaaaagccgacacucugugcauuggcuaucacgcgaacaauagcgcugauacgguugacaccguguuggagaagaacguaacagugacucauuccgucaauuuacuggaagauaaacacaacgggaagcuauguaaacucagaggaguggcaccccugcaucuugguaagugcaauauagccggcuggauccuggggaacccugagugugaaucuuugucaaccgccaguagcugguccuacauuguugagacaucuucgucagacaauggaaccugcuauccaggcgauuuuaucgacuacgaggagcucagggagcagcugagcaguguguccucuuucgaacgguuugagauuuucccgaagacuagcuccuggcccaaccacgauccuaauaaaggugucacagcugcauguccacaugccggggcuaagucauuuuauaaaaaccugaucuggcucgugaagaaaggaaauaguuaccccaaguuaagcaagucuuauauaaacgacaaaggcaaggaaguacugguucuuuggggcauccaccacccuuccaccucaguggaucaacagagcuuguaccagaaugccgacgcguacgucuucguggggacgagucgcuauucuaaaaaguuuaaaccagagauugcaauccgacccaaggugcgugaucaggagggaagaaugaacuacuauuggacucuggucgaaccuggugacaaaauuaccuucgaggccacaggcaaucuaguugugccaagguacgcuuuugccauggaacggaacgcaggguccggaaucauaauuagcgauacuccgguacaugacugcaacaccacaugucaaacccccaagggcgcuaucaauacgucgcucccuuuccagaacauucacccaaucacuaucgguaagugccccaaauaugugaagucuacaaaacugcgccuugccaccgggcugagaaaugucccuuccauucagucaaggggauuguuuggcgcgauagccggcuucaucgaagggggauggacugguaugguggacggcugguacggguaucaucaccagaacgaacaaggaaguggcuacgcagcugaucucaagagcacacagaaugccauugacgagaucaccaacaaaguuaauuccgugauagagaagaugaacacgcaguuuaccgcugucgguaaggaguucaaucaccuggaaaaacggauugaaaacuuaaauaagaaaguggaugacggguuccuggauaucuggacauacaacgccgagcuccuuguacuguuggaaaaugagcgcacucuagacuaucaugauucuaacguuaagaaucuguacgagaaagugcgaagccagcucaagaacaacgcaaaggaaaucggcaauggauguuuugaguucuaucacaaaugcgacaacaccuguauggaaucagucaagaauggcacauacgauuauccaaaauacagugaggaagccaagcugaacagagaggagauugacggggugaaacuugaauccacuaggaucuaucaaauucuggcuauauacagcaccgucgcgucuucauuggugcucguugugagucugggagcaaucagcuuuuggaugugcuccaaugguucuuuacagugccggauuuguaucuga

SEQ ID NO: 134194 - RNA, 1701 nt, Artificial Sequence
  derived and/or modified CDS sequence (opt3) from hemagglutinin__InfluenzaA__ADO29891
augaaggccauccuggugguccuccuuuacaccuucgcuacagcaaacgccgacacucugugcauuggcuaucacgcgaauaacagcacggauaccguugacacaguguuggagaaaaauguaacugugacccauuccgucaacuuacuggaagauaagcacaaugggaaacuauguaagcucagaggaguggcuccccugcaucuugguaaaugcaacauagccggcuggauccuggggaauccugagugugaaucuuugucaacagcaaguagcugguccuacauuguugagaccucuucgucagacaacggaacuugcuauccaggcgauuuuaucgacuacgaggagcucagggagcagcugagcaguguguccucuuucgaacgguuugagauuuucccgaagacaagcuccuggcccaaucacgauucaaacaagggugucaccgccgcuuguccucaugcaggggccaaaaguuuuuauaagaaucugaucuggcucgugaaaaagggaaacagcuacccaaaauuaucuaaguccuauauaaaugacaagggcaaagaaguacugguucuuuggggcauccaccaccccucaacgagcgcugaucaacagaguuuguaccagaacgccgacgcguacguguucgucgggacuucucgcuauuccaagaaauuuaagccugagauugcaauccgaccaaaagugcgugaucaggagggaagaaugaauuacuauuggacccugguggaacccggugacaagacaacuuucgaggccaccggcaaccuagucguuccuagguacgcuuuugccauggaacggaacgcagggagcggaauuaucauaucggauacaccagugcaugacugcaauaccacgugucaaacuccgaaaggcgcuauuaacacaucucuccccuuccagaauauccacccuauuaccaucgguaagugcccaaaguauguaaaauccacuaagcugcgccuugccacagggcugagaaacgugcccucaauccagaguaggggauuguuuggcgcgauugccggcuucauagaagggggauggaccgguauggucgacggcugguacggguaucaucaccagaaugaacaaggaagcggcuacgcagcugaucucaaauccacgcagaacgccaucgacaagauuaccaauaaagugaacucuguuaucgagaagaugaauacacaguuuacugcuguggguaaggaguucaaccaccuggaaaaacggauagagaauuuaaacaagaaagucgaugacggguuccuggauauuuggaccuacaaugccgaacuccuugugcugagcgagaacgaacgcacauuggacuaucaugauucaaauguaaagaaccuauacgagaaaguucgaagucagcugaagaacaaugcaaaggagaucggcaacggauguuuugaguucuaucacaaaugcgacaauacuuguauggaauccgugaagaacggcaccuacgauuauccuaaauacagcgaagaggccaagcucaauagagaagagaucgacggggucaaacuggagucuacaaggauuuaucaaauccuugcuauuuacucaaccguggcgaguagccuggucuuggugguuucccucggagcaauaucuuuuuggaugugcucgaacgguagccugcagugccggaucuguauuuga

SEQ ID NO: 134195 - RNA, 1701 nt, Artificial Sequence
  derived and/or modified CDS sequence (opt3) from hemagglutinin__InfluenzaA__ADO29892
augaaggccauccuggugguccuccuuuacaccuucgcuacagcaaaagccgacacucugugcauuggcuaucacgcgaacaauagcacggauaccguugacacaguguuggagaagaacguaacugugacccauuccgucaauuuacuggaagauaaacacaacgggaagcuauguaaacucagaggaguggcuccccugcaucuugguaagugcaauauagccggcaggauccuggggaacccugagugugaaucuuugucaacagcaaguagcugguccuacauuguugagaccucuucgucagacaauggaacuugcuauccaggcgauuuuaucgacuacgaggagcuccgggagcagcugagcaguguguccucuuucgaacgcuuugagauuuucccgaagacaagcuccuggcccaaccacgauccuaauaaaggugucaccgccgcuuguccacaugcaggggccaagucauuuuauaaaaaccugaucuggcucgugaagaaaggaaauaguuaccccaaguuaagcaagucuuauauaaacgacaaaggcaaggaaguacugguucuuuggggcauccaccacccuuccacgucaguggaucaacagagcuuguaccagaaugcugacgccuacgucuucguggggaccagucgauauucuaaaaaguuuaaaccagagauugcgauccgucccaaggugagagaucaggagggaaggaugaacuacuauuggacucuggucgaaccuggugacaaaauuacauucgaggcaacuggcaaucuaguugugccacgguacgccuuugcuauggaacgcaacgccggguccggaaucauaauuagcgauaccccgguacaugacugcaacacaaccugucaaacgcccaagggcgcaaucaauacuucgcucccuuuccagaacauucacccaaucacaaucgguaagugccccaaauaugugaagucuaccaaacugagacuugcuacugggcugaggaaugucccuuccauucagucacggggauuguuuggcgccauagcgggcuucaucgaagggggauggacagguaugguggacggcugguacggguaucaucaccagaacgaacaaggaaguggcuacgccgcagaucucaagagcacccagaaugcuauugacgagaucacgaacaaaguuaauuccgugauagagaagaugaacacccaguuuacagccgucgguaaggaguucaaucaccuggaaaaacgcauugaaaacuuaaauaagaaaguggaugacggguuccuggauaucuggacuuacaacgcugagcuccuuguacuguuggaaaaugagcgaacccuagacuaucaugauucuaacguuaagaaucuguacgagaaagugagaagccagcucaagaacaacgccaaggaaaucggcaauggauguuuugaguucuaucacaaaugcgacaacacauguauggaaucagucaagaauggcacuuacgauuauccaaaauacagugaggaagcaaagcugaacagggaggagauugacggggugaaacuugaauccacccggaucuaucaaauucuggccauauacagcacagucgcuucuucauuggugcucguugugagucugggagcgaucagcuuuuggaugugcuccaaugguucuuuacagugccguauuuguaucuga

SEQ ID NO: 134196 - RNA, 1701 nt, Artificial Sequence; identical to SEQ ID NO: 131515
  derived and/or modified CDS sequence (opt3) from hemagglutinin__InfluenzaA__ADO29893

SEQ ID NO: 134197 - RNA, 1701 nt, Artificial Sequence
  derived and/or modified CDS sequence (opt3) from hemagglutinin__InfluenzaA__ADO29894
augaaggccauccuggugguccuccuuuacaccuucgcuacagcaaacgccgacacucugugcauuggcuaucacgcgaauaacagcacggauaccguugacacaguguuggagaugaauguaacugugacccauuccgucaacuuacuggaagauaaacacaaugggaagcuauguaaacucagaggaguggcuccccugcaucuugguaagugcaacauagccggcuggauccuggggaauccugagugugaaucuuuuucaacaaguagcuccuggucuuacauuguugagaccucgucaagcgacaacggaacuugcuauccaggcgauuucaucgacuacgaagaguugagggagcagcucaguuccgugucuagcuuugaacgguucgagauuuuuccgaaaacauccucauggcccaaucacgauaguaacaagggugucaccgcagccuguccucaugcuggggcaaagagcuucuauaaaaaucugaucuggcuggugaagaaaggaucuuccuacccaaagcucucaaaaagcuauauaaacgacaagggcaaggaaguauuaguucuguggggcauccaccaccccaguacgucugccgaucaacagucccuuuaccagaaugcugacgccuacguguuugucgggacuagccgcuauucgaaaaaguucaaaccugagauugcgauccgaccaaaggugcgugaucaggagggaagaaugaacuacuauuggaccuugguggaacccggugacaaaauuacauuugaggcaacuggcaaucuggucguuccuagguacgccuucgcuauggaacggaacgccgggucuggaaucauaauuuccgauaccccagugcaugacugcaacacaaccugucaaacgccgaagggcgcaaucaauacuucacuacccuuucagaacauucacccuaucacaaucgguaaaugcccaaaguauguaaagaguaccaaacuccgccuggcuacugggcuuagaaaugugcccagcauucaguccaggggacuguucggcgccauagcgggcuuuaucgaagggggauggacagguauggucgacggcugguacggguaucaucaccagaacgaacaaggaucuggcuacgccgcagauuugaagucaacccagaaugcuauugacgagaucacgaacaaagugaauagcguuauagagaagaugaacacccaguucacagccguggguaaagaguucaaucaccucgagaagcggauugaaaaccugaauaagaaagucgaugacggguuuuuagauaucuggacuuacaacgcugagcugcucgugcuucuggaaaaugagcgcaccuuggacuaucaugauaguaacguaaagaaucuauacgagaaaguucgaucccagcugaagaacaacgccaaagaaaucggcaauggauguuucgaguuuuaucacaagugcgacaacacauguauggaaagcgugaagaauggcacuuacgauuauccuaaauacucugaggaagcaaagcucaacagagaggagauugacggggucaaacuggaaucaaccaggaucuaucaaauucuugccauauacaguacaguggcuagcucccuggucuuggugguuucucucggagcgaucucguucuggaugugcagcaaugguucccugcagugccggauuuguaucuga

SEQ ID NO: 134198 - RNA, 1701 nt, Artificial Sequence
  derived and/or modified CDS sequence (opt3) from hemagglutinin__InfluenzaA__ADO29895
augaaggccauccugguggcucuccuuuacaccuucgcaacagccaacgcggacacucugugcauuggcuaucacgcuaauaacagcacggauaccgucgacacaguuuuggagaaaaaugugacuguaacccauuccgugaacuuacuggaagauaagcacaaugggaaacuauguaagcucagaggagucgcaccccugcaucuugguaaaugcaacauagccggcuggauccuggggaauccugagugugaaucuuuuucaacaaguagcuccuggucuuacauuguggagaccucgucaagcgacaacggaacuugcuauccaggcgauuucaucgacuacgaagaguugagggagcagcucaguuccguuucuagcuuugaacgguucgagauuuuuccgaagacauccucauggcccaaucacgauaguaacaagggugugaccgccgcuuguccucaugcaggggccaagagcuucuauaaaaaucugaucuggcuggucaaaaagggaucuuccuacccaaaacucucaaagagcuauauaaacgacaagggcaaagaaguguuaguacuguggggcauccaccaccccaguacgucugcugaucaacagucccuuuaccagaaugccgacgcguacguuuuuguggggacuagccgcuauucgaagaaauucaagccugagauugcaauccgaccaaaaguccgugaucaggagggaagaaugaacuacuauuggaccuugguggaacccggugacaagauuacauuugaggccacuggcaaucugguggucccuagguacgcuuucgccauggaacggaacgcagggucuggaaucauaauuuccgauaccccaguucaugacugcaacacaaccugucaaacgccgaaaggcgcuaucaauacuucacuacccuuucagaacauucacccuaucacaaucgguaagugcccaaaguaugugaaagggaccaagcuccgccuggccacuggacuuagaaauguacccaguauucagagcaggggccuguucggcgcgauagccggguuuaucgagggagguuggacaggcaugguggacgggugguacggauaucaucaccagaacgaacaaggcuccgguuacgcagcugauuugaaaucuacccagaaugccauugacgagaucacgaacaaggucaauagcgugauagagaaaaugaacacccaguucacagcuguugggaaggaguucaaucaccucgaaaagcggauugaaaaccugaauaaaaagguggaugacggcuuuuuagauaucuggacuuacaacgccgagcugcucguccuucuggaaaaugagcgcaccuuggacuaucaugauucaaacgugaaaaaucuauacgagaagguacgaagucagcugaaaaacaacgcaaaggaaaucggaaauggcuguuucgaguuuuaucacaagugcgacaacacauguauggaaagaguuaaaaaugggacuuacgauuauccuaaguacuccgaggaagccaaacucaacagggaggagauugacggagugaagcuggaaagcacccggaucuaucaaauucuugcuauauacucuacagucgcgucaagucugguguuggucgugagccucggugcaaucuccuucuggaugugcucuaauggcucgcugcagugccguauuuguaucuga

SEQ ID NO: 134199 - RNA, 1701 nt, Artificial Sequence
  derived and/or modified CDS sequence (opt3) from hemagglutinin__InfluenzaA__ADO29897
augaaggccauccuggugguccuccuuuacaccuucgcuacagcaaacgccgacauucugugcauaggcuaucacgcgaauaacagcacugauacgguugacaccguguuggagaaaaauguaacagugacucauuccgucaacuuacuggaagauaagcacaaugggaaacuauguaagcucagaggaguggcuccccugcaucuugguaaaugcaacaucgccggcuggauucuggggaauccugagugugaaucuuuuucaaccaguagcuccuggucuuacaucguugagacaucgucaagcgacaacggaaagugcuauccaggcgauuucauugacuacgaagaguugagggagcagcucaguuccgugucuagcuuugaacgguucgagaucuuuccgaagaccuccucauggcccaaucacgauaguaacaaaggugucacuacagcauguccucaugccggggcuaagagcuucuauaaaaaucugauauggcuggugaagaaaggaaacucuuacccacgccucuccaagucauauaucaaugacaagggcaaagaaguauuaguucuguggggcauucaccaccccagcaccagugcagaucaacagucucuuuaccagaacgccgacgcuuacguguuugucgggacgucccgauauagcaagaaauucaagccugagaucgccauucguccaaaagugagagaucaggagggaaggaugaauuacuauuggacuuugguggaacccggugacaagaucaccuuugaggcgacaggcaaccuggucguuccucgguacgcauucgccauggaacgcaacgcugggucgggaauaauuaucucugauacuccagugcauggcugcaauaccacaugucaaaccccgaaaggugccauuaacacgucccuacccuuucagaauauccacccuaucacuauugggaagugcccaaaguauguaaaaucaacaaagcucagacuggcaaccggacuuaggaacgugcccaguauacagagccggggccuguucggcgcugucgccggguuuaucgagggagguuggacuggcaugguggacgggugguacggauaucaucaccagaaugaacaaggcuccgguuacgcggccgacuugaaaucuacacagaacgcaauugaugagaucaccaauaagguuaacagcgugauagagaaaaugaauacgcaguucaccgcugucgggaaggaguucaaccaccucgaaaagcgcauugaaaaucugaacaaaaagguggacgauggcuuuuuagacaucuggacauacaaugccgagcugcucguacuucuggaaaacgagcgaacuuuggauuaucaugacucaaauguuaaaaaccuauacgagaaggugagaagucagcugaaaaacaaugcuaaggaaaucggaaacggcuguuucgaguuuuaucacaagugcgauaauaccuguauggaauccgucaaaaacgggacauacgacuauccuaaguacagcgaggaagccaaacucaauagggaggagauugauggagugaagcuggaaucuacucggaucuaucaaauucuugcaauauacucaaccgucgccaguagccugguguugguugugucccucggugcuaucucuuucuggaugugcucgaacggcagccugcagugccguauuuguaucuga

SEQ ID NO: 134200 - RNA, 1701 nt, Artificial Sequence; identical to SEQ ID NO: 131515
  derived and/or modified CDS sequence (opt3) from hemagglutinin__InfluenzaA__ADO29898

SEQ ID NO: 134201 - RNA, 1701 nt, Artificial Sequence
  derived and/or modified CDS sequence (opt3) from hemagglutinin__InfluenzaA__ADO29899
augaaggccauccuggugguccuccuuuacaccuucgcuacagcaaacgccgacacucugugcauuggcuaucacgcgaauaacagcacggauaccguugacacaguguuggagaaaaauguaacugugacccauuccgucaacuuacuggaagauaagcacaaugggaaacuauguaagcucagaggaguggcuccccugcaucuugguaaaugcaacauagccggcuggauccuggggaauccugagugugaaucuuugucaacagcaaguagcugguccuacauuguugagaccucuucgucagacaacggaacuugcuauccaggcgauuuuaucgacuacgaggagcucagggagcagcugagcaguguguccucuuucgaacgguuugagauuuucccgaagacaagcuccuggcccaaucacgauucaaacaagggugucaccgccgcuuguccucaugcaggggccaaaaguuuuuauaagaaucugaucuggcucgugaaaaagggaaacagcuacccaaaauuaucuaaguccuauauaaaugacaagggcaaagaaguacugguucuuuggggcauccaccaccccucaacgagcgcugaucaacagaguuuguaccagaacgccgacgcguacguguucgucgggacuucucgcuauuccaagaaauuuaagccugagauugcaauccgaccaaaagugcgugaucaggagggaagaaugaauuacuauuggacccugguggaacccggugacaagauuacauucgaggccacuggcaaccuagucguuccuagguacgcuuuugccauggaacggaacgcagggagcggaaucauaauuucggauaccccagugcaugacugcaauacaaccugucaaacgccgaaaggcgcuaucaacacuucucuccccuuccagaauauucacccuaucacaaucgguaagugcccaaaguauguaaaauccaccaagcugcgccuugccacugggcugagaaacgugcccucaauucagaguaggggauuguuuggcgcgauagccggcuucaucgaagggggauggacagguauggucgacggcugguacggguaucaucaccagaaugaacaaggaagcggcuacgcagcugaucucaaauccacccagaacgccauugacaagaucacgaauaaagugaacucuguuauagagaagaugaauacccaguuuacagcuguggguaaggaguucaaccaccuggaaaaacggauugagaauuuaaacaagaaagucgaugacggguuccuggauaucuggacuuacaaugccgaacuccuugugcuguuggagaacgaacgcacccuagacuaucaugauagcaauguaaagaaccuguacgagaaaguucgaucacagcucaagaacaaugcaaaggagaucggcaacggauguuuugaguucuaucacaaaugcgacaauacauguauggaaagugugaagaacggcacuuacgauuauccuaaauacuccgaagaggccaagcugaauagagaagagauugacggggucaaacuugagagcaccaggaucuaucaaauucuggcuauauacucuacaguggcgucaaguuugguccucgugguuagccugggagcaaucuccuuuuggaugugcucuaacgguucguuacagugccggaccuguauuuga

SEQ ID NO: 134202 - RNA, 1701 nt, Artificial Sequence
  derived and/or modified CDS sequence (opt3) from hemagglutinin__InfluenzaA__ADO29900
augaaggccauccuggugguccuccuuuacaccuucgcuacagcaaacgccgacacucugugcauuggcuaucacgcgaauaacagcacggauaccguugacacaguguuggagaaaaauguaacugugacccauuccgucaacuuacuggaagauaagcacaaugggaaacuauguaagcucagaggaguggcuccccugcaucuugguaaaugcaacauagccggcuggauccuggggaauccugagugugaaucuuugucaacagcaaguagcugguccuacauuguugagaccucuucgucagacaacggaacuugcuauccaggcgaucucaucgacuacgaggagcugagggagcagcugagcaguguguccucuuuugaacgguucgagauuuuuccgaagacaagcuccuggcccaaucacgaucucaacaagggugucaccgccgcuuguccucaugcaggggccaaaucauucuauaagaauuuaaucuggcuggugaaaaagggaaacaguuacccaaaacuuagcaagucuuauauaaaugacaagggcaaagaaguauugguucuguggggcauccaccaccccuccacgucagcugaucaacagagccuauaccagaacgccgacgcguacguguuugucgggaccagucgcuauucuaagaaauccaagccugagauugcaauccgaccaaaagugcgugaucaggagggaagaaugaauuacuauuggacucucguggaacccggugacaagauuacauucgaggccacuggcaaccuggucguuccuagguacgcuuuugccauggaacggaacgcagggagcggaaucauaauuucggauaccccagugcaugacugcaauacaaccugucaaacgccgaaaggcgcuaucaacacuucucuucccuuccagaauauucacccuaucacaaucgguaagugcccaaaguauguacgcuccaccaaacugagauuggccacugggcucaggaacgugcccucaauucagagucggggacuguuuggcgcgauagccggcuucaucgaagggggauggacagguauggucgacggcugguacggguaucaucaccagaaugaacaaggaagcggcuacgcagcugauuuaaaguccacccagaacgccauugacgagaucacgaauaaagugaacucuguuauagagaagaugaauacccaguuuacagcuguggguaaagaguucaaccaccuggaaaagcgcauugaaaaucucaacaagaaagucgaugacggguuucuugauaucugggccuacaaugcagagcuguuggugcuacuggaaaacgagcgaacucucgacuaucaugauagcaauguaaagaaccuguacgagaaaguuagaucacagcuuaagaacaaugccaaagaaaucggcaacggauguuucgaguucuaucacaagugcgacaauaccuguauggaaagugugaagaacggcacauacgauuauccuaaauacuccgaggaagcuaagcugaauagggaggagauugacggggucaaauuggaaagcacucggaucuaucaaauucucgcgauauacucuaccguggcaucaagucuggucuuagugguuagccugggagccaucuccuuuuggaugugcucuaacgguucgcuacagugccguauuuguaucuga

SEQ ID NO: 134203 - RNA, 1701 nt, Artificial Sequence
  derived and/or modified CDS sequence (opt3) from hemagglutinin__InfluenzaA__ADO29901
augaaggccauccuggugguccuccuuuacaccuucgcuacagcaaacgccgacacucugugcauuggcuaucacgcgaauaacagcacggauaccguugacacaguguuggagaaaaauguaacugugacccauuccgucaacuuacuggaagauaagcacaaugagaaacuauguaagcucagagggguggcuccccugcaucuuggaaaaugcaacauagccgguuggauccugggcaauccugaaugugagucuuugucaacagcaaguagcugguccuacauuguugaaaccucuucgucagacaacgggacuugcuauccaggagauuuuaucgacuacgaggagcucagggaacagcugagcaguguguccucuuucgagcgguuugaaauuuucccgaagacaagcuccuggcccaaucacgauucaaacaagggcgucaccgccgcuuguccucaugccggugcaaaaaguuuuuauaagaaucugaucuggcucgcuaaaaaggggaacagcuacccaaaagugucuaaguccuauauaaaugacaagggaaaagagguauuaguucuguggggcauccaccaccccucaacgagcgccgaucaacagagucuuuaccagaacgcggacgcauacguguucgucggcacuucucgcuauuccaagaaauuuaagccugagauugccauccgaccaaaagugcgugaucaggaagggagaaugaauuacuauuggaccuugguggagcccggagacaagauuacauucgaagcuacugguaaccuggucguuccuagguacgccuuugcaauggagcggaacgcuggcagcgggaucauaauuucggauaccccagugcaugacugcaauacaaccugucaaacgccgaaaggagccaucaacacuucucuacccuuccagaauauucacccuaucacaaucggcaagugcccaaaguauguaaaauccaccaagcuccgccuggcgacuggucuuagaaacgugcccucaauucagaguagggggcuguuuggagccauagcaggcuucaucgaaggcggguggacaggaauggucgacgguugguacggcuaucaucaccagaaugagcaagggagcggauacgcugccgauuugaaauccacccagaacgcuauugacgagaucacgaauaaggugaacucuguuauagaaaagaugaauacccaguuuacagccgugggcaaagaguucaaccaccucgaaaagcggauugagaaucugaacaaaaaggucgaugacgguuucuuagauaucuggacuuacaaugcagaacugcucgugcuucuggagaacgagcgcaccuuggacuaucaugauagcaauguuaaaaaccuauacgaaaagguacgaucacagcugaaaaacaaugccaaggagaucgggaacggcuguuuugaguucuaucacaagugcgacaauacauguauggaaagugugaaaaacggaacuuacgauuauccuaaguacuccgaagaggcuaaacucaauagagaggaaauugacggcgucaagcuggagagcaccaggaucuaucaaauucuugcgauauacucuacaguggcaucaagucuggucuuggugguuagccucggggccaucuccuuuuggaugugcuucaacggaucucugcagugccggauuuguaucuga

SEQ ID NO: 134204 - RNA, 1701 nt, Artificial Sequence
  derived and/or modified CDS sequence (opt3) from hemagglutinin__InfluenzaA__ADO29902
augaaggccauccuggugguccuccuuuacaccuucgcuacagcaaacgccgacacucugugcauuggcuaucacgcgaauaacagcacggauaccguugacacaguguuggagaaaaauguaacugugacccauuccgucaacuuacuggaagauaagcacaaugggaaacuauguaagcucagaggaguggcuccccugcaucuugguaaaugcaacauagccggcuggauccuggggaauccugagugugaaucuuugucaacagcaaguagcugguccuacauuguugagaccucuucgucagacaacggaacuugcuauccaggcgauuuuaucgacuacgaggagcucagggagcagcugagcaguguguccucuuucgaacgguuugagauuuucccgaagacaagcuccuggcccaaucacgauucaaacaagggugucaccgccgcuuguccucaugcaggggccaaaaguuuuuauaagaaucugaucuggcucgugaaaaagggaaacagcuacccaaaauuaucuaaguccuauauaaaugacaagggcaaagaaguacugguucuuuggggcauccaccaccccucaacgagcgcugaucaacagaguuuguaccagaacgccgacgcguacguguucgucgggacuucucgcuauuccaagaaauuuaagccugagauugcaauccgaccaaaagugcgugaucaggagggaagaaugaauuacuauuggacccugguggaacccggugacaagauuacauucgaggccacuggcaaccuagucguuccuagguacgcuuuugccauggaacggaacgcagggagcggaaucauaauuucggauaccccagugcaugacugcaauacaaccugucaaacgccgaaaggcgcuaucaacacuucucuccccuuccagaauauucacccuaucacaaucgguaagugcccaaaguauguaaaauccaccaagcugcgccuugccacugggcugagaaacgugcccucaauucagaguaggggauuguuuggcgcgauagccggcuucaucgaagggggauggacagguauggucgacggcugguacggguaucaucaccagaaugaacaaggaagcggcuacgcagcugaucucaaauccacccagaacgccauugacaagaucacgaauaaagugaacucuguuauagagaagaugaauacccaguuuacagcuguggguaaggaguucaaccaccuggaaaaacggauugagaauuuaaacaagaaagucgaugacggguuccuggauaucuggacuuacaaugccgaacuccuugugcuguuggagaacgaacgcacccuagacuaucaugauagcaauguaaagaaccuguacgagaaaguucgaucacagcucaagaacaaugcaaaggagaucggcaacggauguuuugaguucuaucacaaaugcgacaauacauguauggaaggcgugaagaacgggacuuacgauuauccuaaauacagugaagaggccaagcugaauagagaagagauugacggagucaaacuugaguccaccaggaucuaucaaauucuggcuauauacagcacaguggcgucuucauugguccucgugguuagucugggugcaaucagcuuuuggaugugcuccaacggcucuuuacagugccggauuuguaucuga

SEQ ID NO: 134205 - RNA, 1701 nt, Artificial Sequence
  derived and/or modified CDS sequence (opt3) from hemagglutinin__InfluenzaA__ADO29903
augaaggccauccuggugguccuccuuuacaccuucgcuacagcaaacgccgacacucugugcauuggcuaucacgcgaauaacagcacggauaccguugacacaguguuggagaaaaauguaacugugacccauuccgucaacuuacuggaagauaagcacaaugggaaacuauguaagcucagaggaguggcuccccugcaucuugguaaaugcaacacagccggcuggauacuggggaauccugagugugaaucuuugucaaccgcaaguagcugguccuacaucguugagacuucuucgucagacaacggaacaugcuauccaggcgauuuuauugacuacgaggagcucagggagcagcugagcaguguguccucuuucgaacgguuugagaucuucccgaagaccagcuccuggcccaaucacgauccuaacaagggugucacggccgcuuguccacaugcaggggccaaaucauuuuauaagaaucugauuuggcucgugaaaaagggaaacaguuaccccaaauuaagcaagucuuauaucaaugacaagggcaaagaaguacugguucuuuggggcauacaccacccuuccacuucagcugaucaacagagcuuguaccagaacgccgacgcguacguguucgucgggaccagucgcuauucuaagaaauuuaagccagagaucgcaauucgacccaaagugcgugaucaggagggaagaaugaauuacuauuggacacugguggaaccuggugacaagaucacuuucgaggccaccggcaaccuagucguuccaagguacgcuuuugccauggaacggaacgcaggguccggaauuaucauaagcgauacaccggugcaugacugcaauaccacgugucaaacucccaaaggcgcuauuaacacaucgcucccuuuccagaauauccacccaauuaccaucgguaagugccccaaguauguaaaaucuacuaagcugcgccuugccacagggcugagaaacgugccuuccauccagucaaggggauuguuuggcgcgauugccggcuucauagaagggggauggaccgguauggucgacggcugguacggguaucaucaccagaaugaacaaggaaguggcuacgcagcugaucucaaaagcacgcagaacgccaucgacgagauuaccaauaaggugaacuccguuaucgagaaaaugaauacacaguuuacugcuguggguaaggaguucaaccaccuggaaaagcggauagaaaauuuaaacaaaaaggucgaugacggguuccuggauauuuggaccuacaaugccgagcuccuugugcuguuggaaaacgagcgcacacuagacuaucaugauucuaauguaaagaaccuguacgagaagguucgaagccagcucaaaaacaaugcaaaggaaaucggcaacggauguuuugaguucuaucacaagugcgacaauacuuguauggaaucagugaaaaacggcaccuacgauuauccaaaguacagugaggaagccaaacugaauagagaggagaucgacggggucaaacuugaauccacaaggauuuaucaaauccuggcuauuuacagcaccguggcgucuucauugguccucgugguuagucugggagcaaucagcuuuuggaugugcuccaacgguucuuuacagugccggauauguauuuga

SEQ ID NO: 134206 - RNA, 1701 nt, Artificial Sequence
  derived and/or modified CDS sequence (opt3) from hemagglutinin__InfluenzaA__ADO29904
augaaggccauccuggugguccuccuuuacaccuucgcuacagcaaacgccgacacucugugcauuggcuaucacgcgaauaacagcacggauaccguugacacaguguuggagaaaaauguaacugugacccauuccgucaacuuacuggaagauaagcacaaugggaaacuauguaagcucagaggaguggcuccccugcaucuugguaggugcaacauagccggcuggauccuggggaauccugagugugaaucuuugucaacagcaaguagcugguccuacauuguugagaccucuucgucagacaacggaacuugcuauccaggcgauuuuaucgacuacgaagaacuccgggagcagcugagcaguguguccucuuucgaacgcuuugagauuuucccgaaaacaagcuccuggcccaaucacgauccuaacaagggugucaccgccgcuuguccacaugcaggggccaagucauuuuauaaaaaucugaucuggcucgugaagaaaggaaacaguuaccccaaguuaagcaaaucuuauauaaaugacaagggcaaggaaguacugguucuuuggggcauccaccgaccuuccacgucagcugaucaacagagcuuguaccagaacgccgacgcguacguguucgucgggacuucccguuauucuaaaaaguuuaaaccagagauugcaaucagacccaaggugggagaucaggaggguaggaugaauuacuauuggacccugguggaaccuggcgacaaaauuacauucgaggccacugggaaccuagucguuccacgguacgcuuuugccauggaacgcaacgcaggauccggcaucauaauuagcaauaccccggugcacgauugcaacacaaccugucaaacgcccaagggugcuaucaauacuucgcucccuuuccagaacauucauccaaucacaaucgggaaaugccccaaguauguaaagucuaccaaacugagacuugccacuggacugaggaaugugccuuccauucagucacggggcuuguuuggcgcgauagccggguucaucgagggagguuggacaggcauggucgacgggugguacggauaucaccaucagaacgaacaaggcagugguuacgcagcugaccucaagagcacccagaaugccauugaugagaucacgaacaaagugaauaguguuauagagaagaugaacacccaguuuacagcuguggggaaagaguucaaucaccuggagaagcgcauugaaaacuuaaauaagaaagucgacgauggcuuccuggacaucuggacuuacaacgccgagcuccuugugcuguuggaaaaugagcgaacccuagauuaucacgacucuaacguaaagaaccuguacgagaaaguuagaagccagcucaagaauaacgcaaaagaaaucggaaauggcuguuuugaguucuaucauaagugcgauaacacauguauggaaucagugaagaaugggacuuacgacuauccaaaauacagugaggaagccaagcugaacagggaggagauugauggagucaaacuugaauccacccggaucuaucaaauucuggcuauauacagcacaguggcgucuucauugguccucgugguuagucugggugcaaucagcuuuuggaugugcuccaauggcucuuuacagugccguauuuguaucuga

SEQ ID NO: 134207 - RNA, 1701 nt, Artificial Sequence
  derived and/or modified CDS sequence (opt3) from hemagglutinin__InfluenzaA__ADO29905
augaaggccauccuggugguccuccuuuacaccuucgcuacagcaaacgccgacacucugugcauuggcuaucacgcgaauaacagcacggauaccguugacacaguguuggagaaaaauguaacugugaccagauccgucaacuuacuggaagauaagcauaaugggaaacuauguaagcucaggggaguggcuccccugcaccuugguaaaugcaacauagccggcuggauccuggggaauccugagugugaaucuuugucaacagcaaguagcugguccuacauuguugagaccucuucgucagacaacggaacuugcuauccaggcgauuuuaucgacuacgaggagcuccgggagcagcugagcaguguguccucuuucgaacgcuuugagauuuucccgaagacaagcuccuggcccaaucaugauccuaacaagggugucaccgccgcuuguccacacgcaggggccaaaucauuuuauaagaaucugaucuggcucgugaaaaagggaaacaguuaccccaaauuaagcaagucuuauauaaaugacaagggcaaagaaguacugguucuuuggggcauccaucacccuuccacgucagcugaucaacagagcuuguaccagaacgccgacgcguacguguucgucgggacuucccgauauucuaagaaauuuaagccagagauugcaauccgucccaaagugagagaucaggagggaaggaugaauuacuauuggacccugguggaaccuggugacaagauuacauucgaggccacuggcaaccuagucguuccacgguacgcuuuugccauggaacgcaacgcaggguccggaaucauaauuagcaauaccccggugcacgauugcaacacaaccugucaaacgcccaaaggcgcuaucaauacuucgcucccuuuccagaacauucauccaaucacaaucgguaagugccccaaguauguaaaaucuaccaagcugagacuugccacugggcugaggaaugugccuuccauucagucacggggauuguuuggcgcgauagccggcuucaucgaagggggauggacagguauggucgacggcugguacggguaucaccaucagaacgaacaaggaaguggcuacgcagcugaccucaaaagcacccagaaugccauugaugagaucacgaacaaggugaauaguguuauagagaaaaugaacacccaguuuacagcuguggguaaggaguucaaucaccuggaaaagcgcauugaaaacuuaaauaaaaaggucgacgauggguuccuggacaucuggacuuacaacgccgagcuccuugugcuguuggaaaaugagcgaacccuagauuaucacgacucuaacguaaagaaccuguacgagaagguuagaagccagcucaaaaauaacgcaaaggaaaucggcaauggauguuuugaguucuaucauaagugcgauaacacauguauggaaucagugaaaaauggcacuuacgacuauccaaaguacagugaggaagccaaacugaacagggaggagauugauggggucaaacuugaauccacccggaucuaucaaauucuggcuauauacagcacaguggcgucuucauugguccucgugguuagucugggagcaaucagcuuuuggaugugcuccaaugguucuuuacagugccguauuuguaucuga

SEQ ID NO: 134208 - RNA, 1701 nt, Artificial Sequence
  derived and/or modified CDS sequence (opt3) from hemagglutinin__InfluenzaA__ADO29906
augaaggccauccuggugguccuccuuuacaccuucgcuacagcaaacgccgacacucugugcauuggcuaucacgcgaauaacagcacggauaccguugacacaguguuggagaaaaauguaacugugacccauuccgucaacuuacuggaagauaagcacaauagaaaacuauguaagcucagggguguggcuccccugcaucuuggaaaaugcaacauagccgguuggauccugggcaauccugagugugaaucuuugucaacagcaaguagcugguccuacauuguugagaccucuucgucagacaacgggacuugcuauccaggagauuuuaucgacuacgaagaacuccgggagcagcugagcaguguguccucuuucgaacgcuuugagauuuucccgaagacaagcuccuggcccaaucacgauccuaacaagggcgucaccgccgcuuguccacaugcaggggccaaaucauuuuauaagaaucugaucuggcucgugaaaaaggggaacaguuaccccaaauuaagcaagucuuauauaaaugacaagggaaaagaaguacugguucuuuggggcauccaccacccuuccacgucagcugaucaacagagcuuguaccagaacgccgacgcguacguguucgucggcaccagucgauauucuaagaaauuuaagccagagauugcaauccgucccaaagugagagaucaggaggggaggaugaauuacuauuggacucugguggaaccuggagacaagauuacauucgaggccacugguaaccuagucguuccacgguacgcuuuugccauggaacgcaacgcaggcuccgggaucauaauuagcgauaccccggugcaugacugcaauacaaccugucaaacgcccaaaggagcuaucaacacuucgcucccuuuccagaauauucacccaaucacaaucggcaagugccccaaguauguaaaaucuaccaagcugagacuugccacuggucugaggaacgugccuuccauucagucacggggguuguuuggagcgauagccggcuucaucgagggcggguggacaggaauggucgacgguugguacggcuaucaucaccagaaugaacaagggaguggauacgcagcugaucucaaaagcacccagaacgccauugacgagaucacgaauaaggugaacuccguuauagagaaaaugaauacccaguuuacagcugugggcaaggaguucaaccaccuggagaagcgcauugaaaauuuaaacaaaaaggucgaugacgguuuccuggauaucuggacuuacaaugccgagcuccuugugcuguuggaaaacgagcgaacccuagacuaucaugauucuaauguaaagaaccuguacgagaagguuagaagccagcucaaaaacaaugcaaaggaaaucgggaacggcuguuuugaguucuaucacaagugcgacaauacauguauggaaucagugaaaaacggaacuuacgauuauccaaaguacagugaggaagccaaacugaauagggaggagauugacggcgucaaacuugaauccacccggaucuaucaaauucuggcuauauacagcacaguggcgucuucauugguccucgugguuagucugggggcaaucagcuuuuggaugugcuccaacggaucuuuacagugccguauuuguaucuga

SEQ ID NO: 134209 - RNA, 1701 nt, Artificial Sequence
  derived and/or modified CDS sequence (opt3) from hemagglutinin__InfluenzaA__ADO29907
augaaggccauccuggugguccuccuuuacaccuucgcuacagcaaacgccgacacucugugcauuggcuaucacgcgaauaacagcacggauaccguugacacaguguuggagaaaaauguaacugugacccauuccgucaacuuacuggaagauaagcacaaugggaaacuauguaagcucagaggaguggcuccccugcaucuugguaaaugcaacauagccggcuggauccuggggaauccugagugugaaucuuugucaacagcaaguagcugguccuacauuguugagaccucuucgucagacaacggaacuugcuauccaggcgauuuuaucgacuacgaggagcucagggagcagcugagcaguguguccucuuucgaacgguuugagauuuucccgaagacaagcuccuggcccaaucacgauccuaacaagggugucaccgccgcuuguccacaugcaggggccaaaucauuuuauaagaaucugaucuggcucgugaaaaagggaaacaguuaccccaaauuaagcaagucuuauauaaaugacaagggcaaagaaguacugguucuuuggggcauccaccacccuuccacgucagcugaucaacagagcuuguaccagaacgccgacgcguacguguucgucgggaccagucgcuauucuaagaaacugaagccagagauugcaauccgacccaaagugcgugaucaggagggaagaaugaauuaccauuggacucuaguggaaccuggugacaagauuacauuugaggccacuggcaaccucgucguuccaagguaugcuuucgccauggaacggaacgcaggguccggaaucauaauuagcgauaccccggugcacgacugcaauacaaccugucaaacgcccaaaggcgcuaucaacacuucgcugccuuuucagaauauucauccaaucacaaucgguaagugccccaaguacguaaaaucuaccaaacuucgccuggccacuggguugagaaacgugccuuccauucagucaaggggacucuucggcgcgauagccggcuuuaucgaagggggauggacagguauggucgacggcugguauggguaccaccaccagaaugaacaaggaaguggcuaugcagcugaucugaaaagcacccagaacgccauugacgagaucacgaauaaggugaacuccguuauagagaaaaugaauacccaguucacagcuguggguaaggaauuuaaccauuuagagaagcggauugaaaaucugaacaaaaaggucgaugacggguuccucgauaucuggacuuacaaugccgagcuucugguguugcuagaaaacgagcgcacccuggacuaccacgauucuaauguaaagaaccucuaugagaagguucgaagccagcugaaaaacaaugcaaaggaaaucggcaacggauguuucgaguuuuaccauaagugcgacaauacauguauggaaucagugaaaaacggcacuuaugauuacccaaaguauagugaggaagccaaacuuaauagagaggagauugacggggucaagcuggaauccaccaggaucuaccaaauuuuggcuauauauagcacaguggcgucuucacucguccuggugguuaguuuaggagcaaucagcuucuggaugugcuccaacgguucucugcagugccggauuuguaucuga

SEQ ID NO: 134210 - RNA, 1701 nt, Artificial Sequence
  derived and/or modified CDS sequence (opt3) from hemagglutinin__InfluenzaA__ADO29908
augaaggccauccuggugguccuccuuuacaccuucgcuacagcaaacgccgacacucugugcauuggcuaucacgcgaauaacagcacggauaccguugacacaguguuggagaaaaauguaacugugacccauuccgucaacuuacuggaagauaagcacaaugggaaacuauguaagcucagaggaguggcuccccugcaucuugguaaaugcaacauagccggcuggauccuggggaauccugagugugaaucuuugucaacagcaaguagcugguccuacauuguugagaccucuucgucagacaacggaacuugcuauccaggcgauuuuaucgacuacgaagaacucagggagcagcugagcaguguguccucuuucgaacgguuugagauuuucccgaagacaagcuccuggcccaaucacgauccuaacaagggugucaccgccgcuuguccacaugcaggggccaaaucauuuuauaagaaucugaucuggcucgugaaaaagggaaacaguuaccccaaauuaagcaagucuuauauaaaugacaagggcaaagaaguacugguucuuuggggcauccaccacccuuccacgucagcugaucaacagagcuuguaccagaacgccgacgcguacguguucgucgggaccagucgcuauucuaagaaauuuaagccagagauugcaauccgacccaaagugcgugaucaggaguggagaaugaauuacuauuggacucugguggaaccuggagacaagauuacauucgaggccacugguaaccuagucguuccaagguacgcuuuugccauggaacggaacgcaggcuccgggaucauaauuagcgauaccccggugcaugacugcaauacaaccugucaaacgcccaaaggagcuaucaacacuucgcucccuuuccagaauauucacccaaucacaaucggcaagugccccaaguauguaaaaucuaccaagcugcgccuugccacuggucugagaaacgugccuuccauucagucaaggggguuguuuggagcgauagccggcuucaucgagggcggguggacaggaauggucgacgguugguacggcuaucaucaccagaaugaacaagggaguggauacgcagcugaucucaaaagcacccagaacgccauugacgagaucacgaauaaggugaacuccguuauagagaaaaugaauacccaguuuacagcugugggcaaggaguucaaccaccuggagaagcggauugaaaauuuaaacaaaaaggucgaugacgguuuccuggauaucuggacuuacaaugccgagcuccuugugcuguuggaaaacgagcgcacccuagacuaucaugauucuaauguaaagaaccuguacgagaagguucgaagccagcucaaaaacaaugcaaaggaaaucgggaacggcuguuuugaguucuaucacaagugcgacaauacauguauggaaucagugaaaaacggaacuuacgauuauccaaaguacagugaggaagccaaacugaauagagaggagauugacggcgucaaacuugaauccaccaggguguaucaaauccuggcuacauacagcaccgucgcgucuucauuggugcucguugugagucugggggcaauuagcuuuuggaugugcuccaacggaucuuuacagugccggauauguaucuga

SEQ ID NO: 134211 - RNA, 1701 nt, Artificial Sequence
  derived and/or modified CDS sequence (opt3) from hemagglutinin__InfluenzaA__ADO29909
augaaggccauccuggugguccuccuuuacaccuucgcuacagcaaacgccgacacucugagaauuggcuaucacgcgaauaacagcacggauaccguugacacaguguuggagaaaaauguaacugugacccauuccgucaacuuacuggaagauaagcacaaugggaaacuaugcaagcucaggggaguggcuccccugcaucuugguaaauguaacauagccggcuggauccuggggaauccugagugcgaaucuuugucaacagcaaguagcugguccuacauuguugagaccucuucgucagacaacggaacuuguuauccaggcgauuuuaucgacuacgaggagcuccgggagcagcugagcaguguguccucuuucgaacgcuuugagauuuucccgaagacaagcuccuggcccaaucacgauccuaacaagggugucaccgccgcuugcccacaugcaggggccaaaucauuuuauaagaaucugaucuggcucgugaaaaagggaaacaguuaccccaaauuaagcaagucuuauauaaaugacaagggcaaagaaguacugguucuuuggggcauccaccacccuuccacgucagcugaucaacagagcuuguaccagaacgccgacgcguacguguucgucgggaccagucgauauucuaagaaauuuaagccagagauugcaauccgucccaaagugagagaucaggagggaaggaugaauuacuauuggacucugguggaaccuggugacaagauuacauucgaggccacuggcaaccuagucguuccacgguacgcuuuugccauggaacgcaacgcaggguccggaaucauaauuagcgauaccccggugcaugacuguaauacaaccugccaaacgcccaaaggcgcuaucaacacuucgcucccuuuccagaauauucacccaaucacaaucgguaagugucccaaguauguaaaaucuaccaagcugagacuugccacugggcugaggaacgugccuuccauucagucacggggauuguuuggcgcgauagccggcuucaucgaagggggauggacagguauggucgacggcugguacggguaucaucaccagaaugaacaaggaaguggcuacgcagcugaucucaaaagcauucagaacgccaucgacgagauaaccaauaaggugaacuccguuauugagaaaaugaauacgcaguuuaccgcuguggguaaggaguucaaccaccuggaaaagcgcaucgaaaauuuaaacaaaaaggucgaugacggguuccuggauaucuggacauacaaugccgagcuccuugugcuguuggaaaacgagcgaacucuagacuaucaugauucuaauguaaagaaccuguacgagaagguuagaagccagcucaaaaacaaugcaaaggaaauuggcaacggaugcuuugaguucuaucacaagugugacaauaccugcauggaaucagugaaaaacggcacauacgauuauccaaaguacagugaggaagccaaacugaauagggaggagaucgacggggucaaacuugaauccacucggauuuaucaaauacuggcuaucuacagcaccguggcgucuucauugauucucgucgugagucugggagcaaucagcuuuuggauguguuccaacgguucuuuacagugccguaucugcauuuga

SEQ ID NO: 134212 - RNA, 1701 nt, Artificial Sequence
  derived and/or modified CDS sequence (opt3) from hemagglutinin__InfluenzaA__ADO29910
augaaggccauccuggugguccuccuuuacaccuucgcuacagcaaacgccgacacucugugcauuggcuaucacgcgaauaacagcacggauaccguugacacaguguuggagaaaaauguaacugugacccauuccgucaacuuacuggaagauaagcacaaugggaaacuauguaagcccagaggaguggcuccucuccaucuggguaaaugcaacauagccggcuggauccuugggaauccagagugugaaucucugucaacagcaaguagcugguccuacauuguugagaccucuucgucagacaacggaacuugcuauccgggcgauuuuaucgacuacgaagaguugagggagcagcucagcaguguguccucuuucgaacgguuugagauuuuccccaagacaagcuccuggccuaaucacgauccaaacaagggugucaccgccgcuuguccccaugcaggggccaaaucauuuuauaagaaucugaucuggcuggugaaaaagggaaacaguuacccuaaacucagcaagucuuauauaaaugacaagggcaaagaaguauuaguucuguggggcauccaccacccauccacgucagcugaucaacagagccuuuaccagaacgccgacgcguacguguucgucgggaccagucgcuauucuaagaaauuuaagcccgagauugcaauccgaccuaaagugcgugaucaggagggaagaaugaauuacuauuggacuuugguggaaccaggugacaagauuacauucgaggccaucggcaaccuggucguuccgagguacgcuuuugccauggaacggaacgcaggguccggaauaauuaucagcgauacucccgugcaugacugcaauaccacaugucaaaccccuaaaggcgcuauuaacacgucgcuaccauuccagaauauccaccccaucacuauugguaagugcccuaaguauguaaaaucuacaaagcuccgccuggccaccgggcuuagaaacgugccauccauacagucaaggggacuguuuggcgcgaucgccggcuucauugaagggggauggacugguauggucgacggcugguacggguaucaucaccagaaugaacaaggaaguggcuacgcagcugauuugaaaagcacacagaacgccaucgacgagauaaccaauaaggugaacuccguuauugagaaaaugaauacgcaguuuaccgcuguggguaaggaguucaaccaccucgagaagcggaucgaaaaucugaacaaaaaggucgaugacggguucuuagauaucuggacauacaaugccgagcugcucgugcuucuggaaaacgagcgcacuuuggacuaucaugauucuaauguuaaaaaccuauacgagaagguacgaagccagcugaaaaacaaugcaaaggaaauuggcaacggauguuuugaguucuaucacaagugcgacaauaccuguauggaaucagugaaaaacggcacauacgauuaucccaaguacagugaggaagccaaacucaauagaggggagaucgacggagucaagcuggaguccacuaggauuuaucaaauacuugcuaucuacagcaccguggcgucuucacuggucuuggugguuagucucggugcaauuagcuuuuggaugugcuccaacggcucucugcagugccggaucuguaucuga

SEQ ID NO: 134213 - RNA, 1701 nt, Artificial Sequence; identical to SEQ ID NO: 132439
  derived and/or modified CDS sequence (opt3) from hemagglutinin__InfluenzaA__ADO30407

SEQ ID NO: 134214 - RNA, 1701 nt, Artificial Sequence; identical to SEQ ID NO: 132330
  derived and/or modified CDS sequence (opt3) from hemagglutinin__InfluenzaA__ADO30417

SEQ ID NO: 134215 - RNA, 1701 nt, Artificial Sequence; identical to SEQ ID NO: 132052
  derived and/or modified CDS sequence (opt3) from hemagglutinin__InfluenzaA__ADO33202

SEQ ID NO: 134216 - RNA, 1701 nt, Artificial Sequence; identical to SEQ ID NO: 131560
  derived and/or modified CDS sequence (opt3) from hemagglutinin__InfluenzaA__ADO33240

SEQ ID NO: 134217 - RNA, 1701 nt, Artificial Sequence; identical to SEQ ID NO: 130717
  derived and/or modified CDS sequence (opt3) from hemagglutinin__InfluenzaA__ADO33247

SEQ ID NO: 134218 - RNA, 1701 nt, Artificial Sequence; identical to SEQ ID NO: 131560
  derived and/or modified CDS sequence (opt3) from hemagglutinin__InfluenzaA__ADO33254

SEQ ID NO: 134219 - RNA, 1701 nt, Artificial Sequence; identical to SEQ ID NO: 131560
  derived and/or modified CDS sequence (opt3) from hemagglutinin__InfluenzaA__ADO33261

SEQ ID NO: 134220 - RNA, 1701 nt, Artificial Sequence; identical to SEQ ID NO: 131560
  derived and/or modified CDS sequence (opt3) from hemagglutinin__InfluenzaA__ADO33269

SEQ ID NO: 134221 - RNA, 1701 nt, Artificial Sequence; identical to SEQ ID NO: 132052
  derived and/or modified CDS sequence (opt3) from hemagglutinin__InfluenzaA__ADO33277

SEQ ID NO: 134222 - RNA, 1701 nt, Artificial Sequence; identical to SEQ ID NO: 131560
  derived and/or modified CDS sequence (opt3) from hemagglutinin__InfluenzaA__ADO33285

SEQ ID NO: 134223 - RNA, 1701 nt, Artificial Sequence; identical to SEQ ID NO: 132052
  derived and/or modified CDS sequence (opt3) from hemagglutinin__InfluenzaA__ADO33293

SEQ ID NO: 134224 - RNA, 1701 nt, Artificial Sequence; identical to SEQ ID NO: 132052
  derived and/or modified CDS sequence (opt3) from hemagglutinin__InfluenzaA__ADO33307

SEQ ID NO: 134225 - RNA, 1701 nt, Artificial Sequence; identical to SEQ ID NO: 131560
  derived and/or modified CDS sequence (opt3) from hemagglutinin__InfluenzaA__ADO33313

SEQ ID NO: 134226 - RNA, 1701 nt, Artificial Sequence; identical to SEQ ID NO: 133810
  derived and/or modified CDS sequence (opt3) from hemagglutinin__InfluenzaA__ADO33329

SEQ ID NO: 134227 - RNA, 1701 nt, Artificial Sequence; identical to SEQ ID NO: 131560
  derived and/or modified CDS sequence (opt3) from hemagglutinin__InfluenzaA__ADO33337

SEQ ID NO: 134228 - RNA, 1701 nt, Artificial Sequence; identical to SEQ ID NO: 131560
  derived and/or modified CDS sequence (opt3) from hemagglutinin__InfluenzaA__ADO33345

SEQ ID NO: 134229 - RNA, 1701 nt, Artificial Sequence; identical to SEQ ID NO: 132052
  derived and/or modified CDS sequence (opt3) from hemagglutinin__InfluenzaA__ADO33352

SEQ ID NO: 134230 - RNA, 1701 nt, Artificial Sequence; identical to SEQ ID NO: 130717
  derived and/or modified CDS sequence (opt3) from hemagglutinin__InfluenzaA__ADO33360

SEQ ID NO: 134231 - RNA, 1701 nt, Artificial Sequence; identical to SEQ ID NO: 131560
  derived and/or modified CDS sequence (opt3) from hemagglutinin__InfluenzaA__ADO33368

SEQ ID NO: 134232 - RNA, 1701 nt, Artificial Sequence; identical to SEQ ID NO: 131560
  derived and/or modified CDS sequence (opt3) from hemagglutinin__InfluenzaA__ADO33376

SEQ ID NO: 134233 - RNA, 1701 nt, Artificial Sequence; identical to SEQ ID NO: 130704
  derived and/or modified CDS sequence (opt3) from hemagglutinin__InfluenzaA__ADO33384

SEQ ID NO: 134234 - RNA, 1701 nt, Artificial Sequence; identical to SEQ ID NO: 130717
  derived and/or modified CDS sequence (opt3) from hemagglutinin__InfluenzaA__ADO33391

SEQ ID NO: 134235 - RNA, 1701 nt, Artificial Sequence
  derived and/or modified CDS sequence (opt3) from hemagglutinin__InfluenzaA__ADO79917
augaaggccauccuggugguccuccuuuacaccuucgcuacagcaaacgccgacacucugugcauuggcuaucacgcgaauaacagcacggauaccguugacacaguguuggagaagaauguaacugugacccauuccgucaacuuacuggaagauaagcacaaugggaaacuauguaagcucagaggaguggcuccccugcaucuugguaaaugcaacauagccggcuggauccuggggaauccugagugugaaucuuugucaacagcaaguagcugguccuacauuguugagaccucuucgucagacaacggaacuugcuauccaggcgauuuuaucgacuacgaggagcucagggagcagcugagcaguguguccucuuucgaacgguuugagauuuucccgaagacaagcuccuggcccaaucacgauucaaacaagggugucaccgccgcuuguccucaugcaggggccaaaaguuuuuauaagaaucugaucuggcucgugaaaaagggaaacagcuacccaaaauuaucuaaguccuauauaaaugacaagggcaaagaaguacugguucuuuggggcauccaccaccccucaacgagcgcugaucaacagaguuuguaccagaacgccgacgcguacguguucgucgggacuucucgcuauuccaagaaauuuaagccugagauugcaauccgaccaaaagugcgugauagagagggaaggaugaauuacuauuggacccugguggaacccggugacaagauuacauucgaggccacuggcaaccuagucguuccucgguacgcuuuugccauggaacgcaacgcagggagcggaaucauaauuucggauaccccagugcauaauugcaacacaaccugucagacgccgaaaggcgcuaucaauacuucucuccccuuccaaaacauucacccuaucacaaucgguaagugcccaaaguauguaaaauccaccaagcugagacuugccacugggcugaggaaugugcccucaauucagagucggggauuguuuggcgcgauagccggcuucaucgaagggggauggacagguauggucgacggcugguacggguaucaucaccagaacgaacagggaagcggcuacgcagcugaccucaaauccacccaaaaugccauugaugagaucacgaacaagguaaauucuguuauagagaaaaugaacacccaguuuacagcuguggguaaggaguucaaucaccuggaaaagcgcauugaaaacuuaaauaaaaaggucgacgauggguuccuggacaucuggacuuacaacgccgagcuccuugugcuguuggaaaaugagcgaacccuagauuaucaugacagcaacgugaaaaaccuguacgagaagguuagaucacagcucaaaaauaacgcaaaggaaaucggcaauggauguuuugaguucuaucacaagugcgauaacacauguauggaaagugugaaaaauggcacuuacgacuauccuaaguacuccgaggaagccaaacugaacagggaggagauugauggggucaaacuugaaagcacccggaucuaucagauucuggcuauauacucuacaguggcgucaaguuugguccucgugguuagccugggagcaaucuccuuuuggaugugcucuaaugguucguuacaaugccguauuuguaucuga

SEQ ID NO: 134236 - RNA, 1701 nt, Artificial Sequence
  derived and/or modified CDS sequence (opt3) from hemagglutinin__InfluenzaA__ADO79923
augaaggccauccuggugguccuccuuuacaccuucgcuacagcaaacgccgacacucugugcauuggcuaucacgcgaauaacagcacggauaccguugacacaguguuggagaaaaauguaacugugacccauuccgucaacuuacuggaagauaagcacaaugggaaacuauguaagcucagaggaguggcuccccugcaucuugguaaaugcaacauagccggcuggauccuggggaauccugagugugaaucuuugucaacagcaaguagcugguccuacauuguugagaccucuucgacugacaaguggacaugcuauccaggagauuuuaucgacuacgaggaacucagggagcagcugucaagcgugaguuccuucgaacgguuugagauuuucccgaagaccucuagcuggcccaaccacgauuccaauaaaggcgucacggccgcuuguccucaugccggugcaaagucauuuuauaaaaaccugaucuggcucgugaagaaagggaauaguuacccaaaguuaagcaagucuuauauaaacgacaaaggaaaggaaguacugguucuuuggggcauccaccaccccuccacuucagcugaucaacagagcuuguaccagaaugccgacgcguacguguucgucggcaccagucgcuauucuaaaaaguuuaaaccugagauugcaauccgaccaaaggugcgugaucaggagagaaggaugaacuacuauuggacacuggugcaacccggggacaaaauuacuuuccaggccaccggaaaucuagucguuccucgguacgcuuuugccauggaacgcaacgcagguuccggcaucauaauuagcgauacaccagugcauaacugcaauaccacgugucagacuccgaagggggcuaucaacacaucgcuccccuuccagaauauucacccuaucaccaucggaaagugcccaaaauauguaaagucuacuaaacugagacuugccacaggccugaggaacgugcccuccauucaaucacgggguuuguuuggggcgauagccggauucaucgagggcggcuggaccgggauggucgacggaugguacgguuaucaucaccagaaugaacagggcaguggguacgcagcugaccucaagagcacgcagaacgccauugaugagaucaccaauaaagugaacuccguuauagaaaagaugaauacacaauuuacugcugugggaaaggaguucaaccaccuggagaaacgcauugaaaauuuaaacaagaaagucgacgauggcuuccuggacaucuggaccuacaaugccgagcuccuugugcuguuggaaaacgagcgaacacuagauuaucaugacucuaauguaaagaaccuguacgaaaaaguuagaagccagcucaagaacaaugcaaaggagaucgguaacggguguuuugaguucuaucacaaaugcgauaauacuuguauggaaucagugaagaacggcaccuacgacuauccuaaauacagugaggaagccaagcugaauagggaggaaauugauggagucaaacuugaguccacacggaucuaucagauucuggcuauauacagcaccguggcgucuucauugguccucgugguuagucugggcgcaaucagcuuuuggaugugcuccaacgggucuuuacaaugccguauuuguaucuga

SEQ ID NO: 134237 - RNA, 1701 nt, Artificial Sequence
  derived and/or modified CDS sequence (opt3) from hemagglutinin__InfluenzaA__ADO79924
augaaggccauccuggugguccuccuuuacaccuucgcuacagcaaacgccgacacucugugcauuggcuaucacgcgaauaacagcacggauaccguugacacaguguuggagaaaaauguaacugugacccauuccgucaacuuacuggaagauaagcacaaugggaaacuauguaagcucagaggaguggcuccccugcaucuugguaaaugcaacauagccggcuggauccuggggaauccugagugugaaucuuugucaacagcaaguagcugguccuacauuguugagaccucuucgacugacaaguggacaugcuauccaggagauuuuaucgacuacgaagaacucagggagcagcugucaagcgugaguuccuucgaacgguuugagauuuucccgaagaccucuagcuggcccaaccacgauuccaauaaaggcgucacggccgcuuguccucaugccggugcaaagucauuuuauaaaaaccugaucuggcucgugaagaaagggaauaguuacccaaaguuaagcaagucuuauauaaacgacaaaggaaaggaaguacugguucuuuggggcauccaccaccccuccacuucagcugaucaacagagcuuguaccagaaugccgacgcguacguguucgucggcaccagucgcuauucuaaaaaguuuaaaccugagauugcaauccgaccaaaggugcgugauagagaggggaggaugaacuacuauuggacacugauugaacccggagacaaaaucacuuucgagccuaccgguaaucuaguggucccacgguacgccuuugcuauggaacgcaacgccggcuccgggauaauuaucagcgauacaccgguucauaacugcaauaccacgugucagacucccaagggagcaauuaacacaucgcucccuuuccaaaauauccacccaaucaccauuggcaagugccccaaauaugugaagucuacuaaacugagacuugcuacaggucugaggaacguaccuuccauacagucacggggguuguuuggagccaucgcgggcuucauugagggcggguggaccggaaugguggacgguugguacggcuaucaucaccagaaugaacaggggaguggauacgccgcagaccucaagagcacgcaaaacgcuaucgaugagauaaccaauaaagucaacuccgugauugagaagaugaauacacaguuuacugccguuggcaaggaguucaaccaccuggagaaacgcaucgaaaauuuaaacaagaaaguggacgaugguuuccuggacaucuggaccuacaaugcugagcuccuuguccuguuggaaaacgagcgaacacuagauuaucaugacucuaaugugaagaaccuguacgagaaaguaagaagccagcucaagaacaaugccaaggaaauugggaacggcuguuuugaguucuaucacaaaugcgauaauacuuguauggaaucaguuaagaacggaaccuacgacuauccaaaauacagugaggaagcaaagcugaauagggaggagaucgauggcgugaaacuugaauccacacggauuuaucagauacuggccaucuacagcaccgucgcuucuucauuggugcucgucgugagucugggggcgauuagcuuuuggaugugcuccaacggaucuuuacaaugccguaucuguaucuga

SEQ ID NO: 134238 - RNA, 1701 nt, Artificial Sequence
  derived and/or modified CDS sequence (opt3) from hemagglutinin__InfluenzaA__ADO79925
augaaggccauccuggugguccuccuuuacaccuucgcuacagcaaacgccgacacucugugcauuggcuaucacgcgaauaacagcacggauaccguugacacaguguuggagaaaaauguaacugugacccauuccgucaacuuacuggaagauaagcacaaugggaaacuauguaagcucagaggaguggcuccccugcaucuugguaaaugcaacauagccggcuggauccuggggaauccugagugugaaucuuugucaacagcaaguagcugguccuacauuguugagaccucuucgacucacgaauggacaugcuauccaggagacuuuaucgauuacgaggagcucagggaacagcugucaagcgugaguuccuucgagcgguuugaaauuuucccgaagaccucuagcuggcccaaccaugacuccaauaagggcgucacggccgcuuguccucacgccggugcaaaaucauuuuauaagaaccugaucuggcucgugaaaaaggggaauaguuacccaaaauuaagcaagucuuauauaaacgauaagggaaaagagguacugguucuuuggggcauccaccaucccuccacuucagcugaccaacagagcuuguaccagaaugccgaugcguacguguucgucggcaccagucgcuauucuaagaaauuuaagccugagauugcaauccgaccaaaagugcgugacagagaagggaggaugaacuacuauuggacacugguggagcccggagauaagauuacuuucgaagccccugguaaucuagucguuccacgguacgcuuuugccauggagcgcaacgcaggcuccgggaucauaauuagcgacaccccggugcacaacugcaauacaaccugucagacgcccaaaggagcuaucaacacuucgcucccuuuccaaaauauucauccaaucaagaucggcaagugcucuaaauauguaaaguccacaaaacugagacuugccaccggucugaggaacgugcccucaauucagagucggggguuguuuggagcgauagccggcuucaucgaaggcggguggacuggaauggucgaugguugguacggcuaucaccaccagaaugagcaggggagcggauacgcagcugaccucaaguccacacaaaacgccauugacgagaucaccaauaaagugaacucuguuauagaaaagaugaauacgcaguuuaccgcugugggcaaggaguucaaccaucuggaaaaacgcauugagaauuuaaacaagaaagucgaugacgguuuccuggauaucuggacauacaaugccgaacuccuugugcuguuggagaacgagcgaacucuagacuaucacgauagcaauguaaagaaccuguacgaaaaaguuagaucacagcucaagaacaaugcaaaggagaucgggaacggcuguuuugaguucuaucauaaaugcgacaauaccuguauggaaagugugaagaacggaacauacgauuauccuaaauacuccgaagaggccaagcugaauagggaggaaauugacggcgucaaacuugagagcacucggaucuaucagauucuggcuauauacucuaccguggcgucaaguuugguccucgugguuagccugggggcaaucuccuuuuggaugugcucuaacggaucguuacaaugccguauuuguaucuga

SEQ ID NO: 134239 - RNA, 1701 nt, Artificial Sequence
  derived and/or modified CDS sequence (opt3) from hemagglutinin__InfluenzaA__ADO79926
augaaggccauccuggugguccuccuuuacaccuucgcuacagcaaacgccgacacucugugcauuggcuaucacgcgaauaacagcacggauaccguugacacaguguuggagaaaaauguaacugugacccauuccgucaacuuacuggaagauaagcacaaugggaaacuauguaagcucagaggaguggcuccccugcaucuugguaaaugcaacauagccggcuggauccuggggaauccugagugugaaucuuugucaacagcaaguagcugguccuacauuguugagaccucuucgacugacaaguggacaugcuauccaggagauuuuaucgacuacgaggaacucagggagcagcugucaagcgugaguuccuucgaacgguuugagauuuucccgaagaccucuagcuggcccaaccacgauuccaauaaaggcgucacggccgcuuguccucaugcaggggccaagucauuuuauaaaaaccugaucuggcucgugaagaaagggaauaguuucagcaaguuaucuaagacuuaccugaacgacaaaggaaaggaaguacuuguuuuguggggcauacaccacccauccaccucagcugaucaacagagccuguaucagaaugccgacgcguacguguuugucggcacaagucgcuacucuaaaaaguucaaacccgagaucgcaauucgaccuaaggugcgugaucaggaggggagaaugaacuauuacuggacucuaguggaaccaggagacaaaaucaccuuugaggccacagguaaucucgucguucccagguaugcuuucgccauggaacggaacgugggcuccgggauuaucauaagcgauaccccuguacaugacugcaacacgacuugucaaacaccaaagggagcaauuaauaccucgcugccguuucagaacauccaccccauuacuaucggcaagugcccuaaauacgugaagucuacaaaacuucgccuggcuaccgguuugagaaaugucccauccauccagucaaggggucucuucggagccauugcgggcuuuauagagggcggguggacgggaaugguggacgguugguauggcuaccaucaccagaacgaacaagggaguggauaugccgcagaucuuaagagcacccagaaugcuaucgacaaaauuacaaacaagguuaauuccgugaucgagaagaugaacacucaguucaccgccgucggcaaagaguucaaucacuuagaaaagcggauagagaaccugaauaaaaagguggaugacgguuuucucgauauuuggacauacaacgcugaacuucugguauugcuagagaaugaacgcacucuggacuaccaugauucuaacguuaaaaaucucuaugagaaggugcgaagccagcugaagaacaacgccaaagagaugaagaauggguguuucgaauuuuaccacaaaugcgacaacaccuguauggagucagucaagaauggcacauaugauuaccccaaauauagugaagaggcaaagcugaacagagaagagaucgacggagugaagcuggaguccaccaggaucuaccaaauuuuggccaucuauagcacugucgcuucuucacucgugcugguugugaguuuaggcgcgauuagcuucuggaugugcuccaaugggucucugcagugccggauauguaucuga

SEQ ID NO: 134240 - RNA, 1701 nt, Artificial Sequence
  derived and/or modified CDS sequence (opt3) from hemagglutinin__InfluenzaA__ADO79927
augaaggccauccuggugguccuccuuuacaccuucgcuacagcaaacgccgacacucugugcauuggcuaucacgcgaauaacagcacggauaccguugacacaguguuggagaaaaauguaacugugacccauuccgucaacuuacuggaagauaagcacaaugggaaacuauguaagcucagaggaguggcuccccugcaucuugguaaaugcaacauagccggcuggauccuggggaauccugagugugaaucuuugucaacagcaaguagcugguccuacauuguugagaccucuucgacugacaaguggacaugcuauccaggagauuuuaucgacuacgaagaacucagggagcagcugucaagcgugaguuccuucgaacgguuugagauuuucccgaagaccucuagcuggcccaaccacgauuccaauaaaggcgucacggccgcuuguccucaugcagccgcuaagucauuuuauaaaaaccugaucuggcucgugaagaaagguaauaguuacccaaaguuaagcaagucuuauauaaacgacaaagggaaggaaguacugguucuuuggggaauccaccaccccuccacuucagccgaucaacagagcuuguaccagaaugcggacgcauacguguucgucggcaccagucgcuauucuaaaaaguuuaaaccugagauugccauccgaccaaaggugcgugaucaggagggcagaaugaacuacuauuggacacugguggaacccggggacaaaauuacuuucgaggcuaccggaaaucuagucguuccuagguacgccuuugcaauggaacggaacgcugguuccggcaucauaauuagcgauacaccagugcaugacugcaacaccacgugucaaacuccgaagggggccaucaauacaucgcuccccuuccagaacauucacccuaucaccaucggaaagugcccaaaauauguaaagucuacuaaacugcgccuugcgacaggccugagaaauauucccuccgugcagucaagggguuuguuuggggccauagcaggauucaucgagggcggcuggaccgggauggucgacggaugguacgguuaucaucaccagaacgaacaaggcaguggguacgcugccgaucucaagagcacgcagaaugcuauugacaaaaucaccaacaaggugaauagcguuauagagaagaugaacacacaguuuacugccgugggaaaagaguucaaucaccuggaaaagcggauugagaacuuaaauaaaaaggucgaugacggcuuccuggauaucuggaccuacaacgcagaacuccuugugcuguuggagaaugaacgcacacuagacuaucaugauucuaacguaaagaaucuguacgagaagguucgaagccagcucaagaacaacgccaaagagaugaagaaugguuguuuugaguucuaucacaaaugcgacaacacuuguauggagucagugaagaaugggaccuacgauuauccuaaauacagugaagaggcuaagcugaacagagaagagaucgacggcgucaaacuugaguccacaaggauuuaucaaauccuggcgauuuacagcaccguggcaucuucauugguccucgugguuagucugggagccauauccuuuuggaugugcuccaauggcucuuuacagugccggaucuguauuuga

SEQ ID NO: 134241 - RNA, 1701 nt, Artificial Sequence
  derived and/or modified CDS sequence (opt3) from hemagglutinin__InfluenzaA__ADO79928
augaaggccauccuggugguccuccuuuacaccuucgcuacagcaaacgccgacacucugugcauuggcuaucacgcgaauaacagcacggauaccguugacacaguguuggagaaaaauguaacugugacccauuccgucaacuuacuggaagauaagcacaaugggaaacuauguaagcucagaggaguggcuccccugcaucuugguaaaugcaacauagccggcuggauccuggggaauccugagugugaaucuuugucaacagcaaguagcugguccuacauuguugagaccucuucgacugacaaguggacaugcuauccaggagauuuuaucgacuacgaagaacucagggagcagcugucaagcgugaguuccuucgaacgguuugagauuuucccgaagaccaacucuuggcccaaucacgauagcaacaaaggcgucacggccgcuuguccucaugccggugcaaaguccuuuuauaaaaaucugaucuggcucgugaagaaagggaacucauacccaaaguuaaguaagagcuauauaaaugacaaaggaaaggaaguacugguucuuuggggcauccaccaccccucuacuuccgcugaucaacagucauuguaccagaacgccgacgcguacguguucgucggcaccagcaaauauaguaagaaauuuaagccugagauugcaauccgcccaaaagugcgagaucaggaggggcguaugaauuacuauuggacacugguggaacccggagacaagauuacuuucgaggccaccgguaaccuagucguuccuagauacgcuuuugccauggaaaggaacgcaggcucugggaucauaauuuccgauacaccagugcaugacugcaauaccacgugucaaacuccgaagggagcuaucaacacaagccuccccuuccagaauauucacccuaucaccaucggcaaaugcccaaaguauguaaaaucgacuaagcugcggcuugccacaggucugcgcaacgugcccucuauucaguccagaggguuguuuggagcgauagccggcuucaucgagggcggguggaccggaauggucgacgguugguacggcuaucaucaccagaaugaacaagggucaggauacgcagcugaucucaaaaguacgcagaacgccauugacgagaucaccaauaaggugaacagcguuauagagaagaugaauacacaguuuacugcugugggcaaagaguucaaccaccuggagaagaggauugaaaauuuaaacaaaaaggucgaugacgguuuccuggauaucuggaccuacaaugccgagcuccuugugcuguuggaaaacgagcggacacuagacuaucaugauuccaauguaaagaaccuguacgagaagguucgcucucagcucaagaacaaugcaaaagaaaucgggaacggcuguuuugaguucuaucacaagugcgacaauacuuguauggaaagcgugaaaaacggaaccuacgauuauccuaaguacucagaggaagccaaacugaaucgagaggagauugacggcgucaaacuugaaaguacaagaaucuaucaaauucuggcuauauacuccaccguggcgagcucuuugguccucgugguuucacugggggcaaucaguuuuuggaugugcagcaacggauccuuacagugcaggauuuguaucuga

SEQ ID NO: 134242 - RNA, 1701 nt, Artificial Sequence
  derived and/or modified CDS sequence (opt3) from hemagglutinin__InfluenzaA__ADO79929
augaaggccauccuggugguccuccuuuacaccuucgcuacagcaaacgccgacacucugugcauuggcuaucacgcgaauaacagcacggauaccguugacacaguguuggagaaaaauguaacugugacccauuccgucaacuuacuggaagauaagcacaaugggaaacuauguaagcucagaggaguggcuccccugcaucuugguaaaugcaacauagccggcuggauccuggggaauccugagugugaaucuuugucaacagcaaguagcugguccuacauuguugagaccucuucgacugacaaguggacaugcuauccaggagauuuuaucgacuacgaagaacucagggagcagcugucaagcgugaguuccuucgaacgguuugagauuuucccgaagaccucuagcuggcccaaccacgauuccaauaaaggcgucacggccgcuuguccucaugcaggggccaagucauuuuauaaaaaccugaucuggcucgugaagaaagggaauaguuacccaaaguuaagcaagucuuauauaaacgacaaaggaaaggaaguacugguucuuuggggcauccaccaccccuccacuucagcugaucaacagagcuuguaccagaaugccgacgcguacguguucgucggcaccagucgcuauucuaaaaaguuuaaaccugagauugcaauccgaccaaaggugcgugggcaggagggaagaaugaacuacuauuggacacugguggaacccggugauaaaauuacuuucgaggccaccggcaaucuagucguuccuagguacgcuuuugccauggaacggaacgcaggguccggaaucauaauuagcgacacaccagugcaugauugcaacaccacgugucaaacuccgaagggcgcuaucaauacaucgcuccccuuccagaacauucacccuaucaccaucgguaagugcccaaaauauguaaagucuacuaaacugcgccuugccacagggcugagaaauauucccuccauacagucaaggggauuguuuggcgcgaucgccggcuucauugaggguggauggaccgguaugguggacggcugguacggguaucaucaccagaacgaacaaggaaguggcuacgcagcugaccucaagagcacgcagaaugccaucgaugagauaaccaacaaagucaauuccgugauugagaagaugaacacacaguuuacugcuguugguaaggaguucaaucaccuggagaaacggaucgaaaacuuaaauaagaaaguggacgauggguuccuggacaucuggaccuacaacgccgagcuccuuguccuguuggaaaaugagcgcacacuagauuaucaugacucuaacgugaagaaucuguacgagaaaguacgaagccagcucaagaacaacgcaaaggaaauuggcaauggauguuuugaguucuaucacaaaugcgauaacacuuguauggaaucaguuaagaauggcaccuacgacuauccuaaauacagugaggaagccaagcugaacagagaggagaucgauggggugaaacuugaauccacaaggauuuaucaaauacuggcuaucuacagcaccgucgcgucuucauuggugcucgucgugagucugggagcaauuagcuuuuggaugugcuccaaugguucuuuacagugccggaucuguaucuga

SEQ ID NO: 134243 - RNA, 1701 nt, Artificial Sequence
  derived and/or modified CDS sequence (opt3) from hemagglutinin__InfluenzaA__ADO79930
augaaggccauccuggugguccuccuuuacaccuucgcuacagcaaacgccgacacucugugcauuggcuaucacgcgaauaacagcacggauaccguugacacaguguuggagaaaaauguaacugugacccauuccgucaacuuacuggaagauaagcacaaugggaaacuauguaagcucagaggaguggcuccccugcaucuugguaaaugcaacauagccggcuggauccuggggaauccugagugugaaucuuugucaacagcaaguagcugguccuacauuguugagaccucuucgacugacaaguggacaugcuauccaggagauuuuaucgacuacgaagaacucagggagcagcugucaagcgugaguuccuucgaacgguuugagauuuucccgaagaccucuagcuggcccaaccacgauuccaauaaaggcgucacggccgcuuguccucaugccggugcaaagucauuuuauaaaaaccugaucuggcucgugaagaaagggaauaguuacccaaaguuaagcaagucuuauauaaacgacaaaggaaaggaaguacugguucuuuggggcauccaccaccccuccacuucagcugaucaacagagcuuguaccagaaugccgacgcguacguguucgucggcaccagucgcuauucuaaaaaguuuaaaccugagauugcaauccgaccaaaggugcgugauagagaggggaggaugaacuacuauuggacacugguggaacccggagacaaaauuacuuucgaggccaccgguaaucuagucguuccucgguacgcuuuugccauggaacgcaacgcaggcuccgggaucauaauuagcgauacaccagugcauaacugcaauaccacgugucagacuccgaagggagcuaucaacacaucgcuccccuuccaaaauauucacccuaucaccaucggcaagugcccaaaauauguaaagucuacuaaacugagacuugccacaggucugaggaacgugcccuccauucagucacggggguuguuuggagcgauagccggcuucaucgagggcggguggaccggaauggucgacgguugguacggcuaucaucaccagaaugaacaggggaguggauacgcagcugaccucaagagcacgcaaaacgccauugaugagaucaccaauaaagugaacuccguuauagagaagaugaauacacaguuuacugcugugggcaaggaguucaaccaccuggagaaacgcauugaaaauuuaaacaagaaagucgacgaugguuuccuggacaucuggaccuacaaugccgagcuccuugugcuguuggaaaacgagcgaacacuagauuaucaugacucuaauguaaagaaccuguacgagaaaguuagaagccagcucaagaacaaugcaaaggaaaucgggaacggcuguuuugaguucuaucacaaaugcgauaauacuuguauggaaucagugaagaacggaaccuacgacuauccuaaauacagugaggaagccaagcugaauagggaggagauugauggcgucaaacuugaauccacacggaucuaucagauucuggcuauauacagcaccguggcgucuucauugguccucgugguuagucugggggcaaucagcuuuuggaugugcuccaacggaucuuuacaaugccguauuuguaucuga

SEQ ID NO: 134244 - RNA, 1701 nt, Artificial Sequence
  derived and/or modified CDS sequence (opt3) from hemagglutinin__InfluenzaA__ADO84715
augaaggccauccuggugguccuccuuuacaccuucgcuacagcaaacgccggcacucugugcauuggguaucacgcgaauaacagcacggacaccguugauacaguguuggagaaaaauguaacugugacccauuccgucaacuuacuggaagacaagcacaauggaaaacuauguaagcucagagguguggcuccccugcaucuuggcaaaugcaacauagccggguggauccugggaaauccugagugugaaucuuugucaacagcaaguagcugguccuacauuguugagaccuuuucuucggauaacggcacuugcuauccaggugacuucaucgauuacgaagaacucagggagcagcugucaagcgugaguuccuuugaacgguucgagauuuuuccgaagacaucuagcuggcccaaucacgacuccaacaagggggucaccgccgcuuguccucaugcaggagccaaaucauucuauaagaaucugaucuggcucgugaaaaagggcaacaguuacccaaaauuaagcaagucuuauauaaaugauaagggcaaagaaguacugguucuuugggggauccaccaccccuccacgucagcugaccaacagagcuuguaccagaacgccgaugcguacguguuugucggaaccagucgcuauucuaagaaauucaagccugagauugcaauccgaccaaaagugcgugaccaggaggguagaaugaauuacuauuggacucugguggaacccggcgauaagauuacauuugaggccacugggaaccuagucguuccuagguacgcuuucgccauggaacggaacgcaggauccggcaucauaauuagcgacaccccagugcaugauugcaauacaaccugucaaacgccgaaaggugcuaucaacacuucgcuccccuuucagaauauucacccuaucacaaucgggaagugcccaaaguauguaaaaucuaccaagcugcgccuugccacuggacugagaaacgugcccuccauucagucaaggggcuuguucggcgcgauagccggguuuaucgagggagguuggacaggcauggucgacgggugguacggauaucaucaccagaaugaacaaggcagugguuacgcagcugaccucaaaagcacccagaacgccauugaugagaucacgaauaaggugaacuccguuauagagaaaaugaauacccaguucacagcuguggggaaggaguucaaccaccuggagaagcggauugaaaauuuaaacaaaaaggucgacgauggcuuucuggacaucuggacuuacaaugccgagcuccuugugcuguuggaaaacgagcgcacccuagauuaucaugacucuaauguaaagaaccuguacgagaagguucgaagccagcucaaaaacaaugcaaaggaaaucggaaacggcuguuucgaguuuuaucacaagugcgauaauacauguauggaaucagugaaaaacgggacuuacgacuauccuaaguacagugaggaagccaaacugaauagagaggagauugauggagucaaacuugaauccaccaggaucuaucaaauucuggcuauauacagcacaguggcgucuucauugguccucgugguuagucugggugcaaucagcuucuggaugugcuccaacggcucuuuacagugccggauuuguaucuga

SEQ ID NO: 134245 - RNA, 1701 nt, Artificial Sequence; identical to SEQ ID NO: 130897
  derived and/or modified CDS sequence (opt3) from hemagglutinin__InfluenzaA__ADP95341

SEQ ID NO: 134246 - RNA, 1701 nt, Artificial Sequence; identical to SEQ ID NO: 130704
  derived and/or modified CDS sequence (opt3) from hemagglutinin__InfluenzaA__ADP95351

SEQ ID NO: 134247 - RNA, 1701 nt, Artificial Sequence; identical to SEQ ID NO: 130704
  derived and/or modified CDS sequence (opt3) from hemagglutinin__InfluenzaA__ADP95361

SEQ ID NO: 134248 - RNA, 1701 nt, Artificial Sequence; identical to SEQ ID NO: 130704
  derived and/or modified CDS sequence (opt3) from hemagglutinin__InfluenzaA__ADP95371

SEQ ID NO: 134249 - RNA, 1701 nt, Artificial Sequence; identical to SEQ ID NO: 130704
  derived and/or modified CDS sequence (opt3) from hemagglutinin__InfluenzaA__ADP95381

SEQ ID NO: 134250 - RNA, 1701 nt, Artificial Sequence; identical to SEQ ID NO: 130704
  derived and/or modified CDS sequence (opt3) from hemagglutinin__InfluenzaA__ADP95391

SEQ ID NO: 134251 - RNA, 1701 nt, Artificial Sequence; identical to SEQ ID NO: 130959
  derived and/or modified CDS sequence (opt3) from hemagglutinin__InfluenzaA__ADQ28007

SEQ ID NO: 134252 - RNA, 1701 nt, Artificial Sequence; identical to SEQ ID NO: 130717
  derived and/or modified CDS sequence (opt3) from hemagglutinin__InfluenzaA__ADQ28008

SEQ ID NO: 134253 - RNA, 1701 nt, Artificial Sequence; identical to SEQ ID NO: 132568
  derived and/or modified CDS sequence (opt3) from hemagglutinin__InfluenzaA__ADQ28009

SEQ ID NO: 134254 - RNA, 1701 nt, Artificial Sequence
  derived and/or modified CDS sequence (opt3) from hemagglutinin__InfluenzaA__ADQ28010
augaaggccauccuggugguccuccuuuacaccuucgcuacagcaaacgccgacacucugugcauuggcuaucacgcgaauaacagcacggauaccguugacacaguguuggagaaaaauguaacugugacccauuccgucaacuuacuggaagauaagcacaaugggaaacuauguaagcucagaggaguggcuccccugcaucuugguaaaugcaacauagccggcuggauccuggggaauccugagugugaaucuuugucaacagcaaguagcugguccuacauuguugagaccucuucgucagacaacggaacuugcuauccaggcgauuuuaucaauuacgaggagcucagggagcagcugagcaguguguccucuuucgaacgguuugagauuuucccgaagacaagcuccuggcccaaccacgacucaaauaagggugucaccgccgcuuguccucaugcaggggccaaaaguuuuuauaagagccugaucuggcucgugaaaaagggaaacucuuacccaaaauuauccaagucauauauaaaugauaagggcaaagaaguacugguucuuuggggcauccaccaccccagcacgagugcugaccaacagucuuuguaccagaacgccgaugcguacguguucgucgggacuucccgcuauagcaagaaauuuaagccugagauugcaauccgaccaaaagugcgugaccaggagggaagaaugaauuacuauuggacccugguggaacccggugauaagauuacauucgaggccacuggcaaccuagucguuccuagguacgcuuuugccauggaacggaacgcagggucgggaaucauaauuucugacaccccagugcaugauugcaauacaaccugucaaacgccgaaaggcgcuaucaacacuucccuccccuuccagaauauucacccuaucacaaucgguaagugcccaaaguauguaaaaucaaccaagcugcgccuugccacugggcugagaaacgugcccaguauucagagcaggggauuguuuggcgcgauagccggcuucaucgaagggggauggacagguauggucgacggcugguacggguaucaucaccagaaugaacaaggauccggcuacgcagcugaccucaaaucuacccagaacgccauugaugagaucacgaauaaggugaacagcguuauagagaaaaugaauacccaguuuacagcuguggguaaggaguucaaccaccuggaaaagcggauugaaaauuuaaacaaaaaggucgacgauggguuccuggacaucuggacuuacaaugccgagcuccuugugcuguuggaaaacgagcgcacccuagauuaucaugacucaaauguaaagaaccuguacgagaagguucgaagucagcucaaaaacaaugcaaaggaaaucggcaacggauguuuugaguucuaucacaagugcgauaauacauguauggaauccgugaaaaacggcacuuacgacuauccuaaguacagcgaggaagccaaacugaauagagaggagauugauggggucaaacuugaaucuaccaggaucuaucaaauucuggcuauauacucaacaguggcgaguagcuugguccucgugguuucccugggagcaaucucuuuuuggaugugcucgaacgguagcuuacagugccggauuuguaucuga

SEQ ID NO: 134255 - RNA, 1701 nt, Artificial Sequence; identical to SEQ ID NO: 130717
  derived and/or modified CDS sequence (opt3) from hemagglutinin__InfluenzaA__ADQ28011

SEQ ID NO: 134256 - RNA, 1701 nt, Artificial Sequence; identical to SEQ ID NO: 130717
  derived and/or modified CDS sequence (opt3) from hemagglutinin__InfluenzaA__ADQ28012

SEQ ID NO: 134257 - RNA, 1701 nt, Artificial Sequence; identical to SEQ ID NO: 130717
  derived and/or modified CDS sequence (opt3) from hemagglutinin__InfluenzaA__ADQ28013

SEQ ID NO: 134258 - RNA, 1701 nt, Artificial Sequence; identical to SEQ ID NO: 130959
  derived and/or modified CDS sequence (opt3) from hemagglutinin__InfluenzaA__ADQ28014

SEQ ID NO: 134259 - RNA, 1701 nt, Artificial Sequence; identical to SEQ ID NO: 130959
  derived and/or modified CDS sequence (opt3) from hemagglutinin__InfluenzaA__ADQ28015

SEQ ID NO: 134260 - RNA, 1701 nt, Artificial Sequence; identical to SEQ ID NO: 130717
  derived and/or modified CDS sequence (opt3) from hemagglutinin__InfluenzaA__ADQ28016

SEQ ID NO: 134261 - RNA, 1701 nt, Artificial Sequence; identical to SEQ ID NO: 130717
  derived and/or modified CDS sequence (opt3) from hemagglutinin__InfluenzaA__ADQ28017

SEQ ID NO: 134262 - RNA, 1701 nt, Artificial Sequence; identical to SEQ ID NO: 132963
  derived and/or modified CDS sequence (opt3) from hemagglutinin__InfluenzaA__ADQ28018

SEQ ID NO: 134263 - RNA, 1701 nt, Artificial Sequence; identical to SEQ ID NO: 130959
  derived and/or modified CDS sequence (opt3) from hemagglutinin__InfluenzaA__ADQ28019

SEQ ID NO: 134264 - RNA, 1701 nt, Artificial Sequence
  derived and/or modified CDS sequence (opt3) from hemagglutinin__InfluenzaA__ADQ28020
auggaggccauccuggugguccuccuuuacaccuucgcuacagcaaacgccgacacucugugcauuggcuaucacgcgaauaacagcacggauaccguugacacaguguuggaaaagaauguaacugugacccauuccgucaacuuacuggaggauaaacacaaugggaagcuauguaaacucagaggaguggcuccccugcaucuugguaagugcaacauagccggcuggauccuggggaauccugaaugugagucuuugucaacagcaaguagcugguccuacauuguugaaaccucuucgucagacaacggaacuugcuauccaggcgauuuuaucgacuacgaggagcucagggaacagcugagcaguguguccucuuucgagcgguuugaaauuuucccgaaaacaagcuccuggcccaaucacgauucaaacaagggugucaccgccgcuuguccucaagcaggggccaagaguuuuuauaaaaaucugaucuggcucgugaagaaaggaaacagcuacccaaaguuaucuaaauccuauauaaaugacaagggcaaggagguacugguucuuuggggcauccaucaccccucaacgagcgcugaucagcagaguuuguaccagaacgccgacgcguacguguucgucgggucuucccgcuauagcaaaaaguuuaaaccugagauugcaauccgaccaaaggugcgugaucaagaaggaagaaugaauuacuauuggacucugguggagcccggugacaaaauuaccuucgaagccacaggcaaccuagucguuccuagguacgcuuuugccauggagcggaacgcagggucgggaaucauaauuucugauacuccagugcacgacugcaauaccacaugucagaccccgaagggcgcuaucaacacgucccuccccuuccauaauauucacccuaucacuaucgguaaaugcccaaaguauguaaagucaacaaaacugcgccuugccaccgggcugagaaacgugcccaguauucagagcaggggauuguuuggcgcgauagccggcuucaucgaagggggauggacugguauggucgacggcugguacggguaucaucaccagaaugagcaaggauccggcuacgcagcugaucucaagucuacacagaacgccauugacgagaucaccaauaaagugaacagcguuauagaaaagaugaauacgcaguuuaccgcuguggguaaagaguucaaccaccuggaaaagcggauugagaauuuaaacaagaaagucgaugacggguuccuggauaucuggacauacaaugccgaacuccuugugcuguuggagaacgagcgcacucuagacuaucaugauucaaauguaaagaaccuguacgaaaaaguucgaagucagcucaagaacaaugcaaaagagaucggcaacggauguuuugaguucuaucacaagugcgacaauaccuguauggaauccgugaagaacggcacauacgauuauccuaaauacagcgaagaggccaagcugaauagagaggaaauugacggggucaaacuugagucuacuaggaucuaucaaauucuggcuauauacucaaccguggcgaguagcuugguccucgugguuucccugggagcaaucucuuuuuggaugugcucgaacgguagcuuacagugccggauuuguaucuga

SEQ ID NO: 134265 - RNA, 1701 nt, Artificial Sequence; identical to SEQ ID NO: 131911
  derived and/or modified CDS sequence (opt3) from hemagglutinin__InfluenzaA__ADQ28021

SEQ ID NO: 134266 - RNA, 1701 nt, Artificial Sequence
  derived and/or modified CDS sequence (opt3) from hemagglutinin__InfluenzaA__ADQ28022
augaaggccauccuggugguccuccuuuacaccuucgcuacagcaaacgccgacacucugugcauuggcuaucacgcgaauaacagcacggauaccguugacacaguguuggagaagaauguaacugugacccauuccgucaacuuacuggaagauaagcacaaugggaaacuauguaagcucagaggaguggcuccccugcaucuugguaaaugcaacauagccggcuggauccuggggaauccugagugugaaucuuugucaacagcaaguagcugguccuacauuguugagaccucuucgucagacaacggaacuugcuauccaggcaauuuuaucgauuacgaagaacucagggagcagcugagcaguguguccucuuucgaacgguuugagauuuucccgaagacaagcuccuggcccaaccacgacucaaauaagggugucaccgccgcuuguccucaugcaggggccaaaaguuuuuauaagaaccugaucuggcucgugaaaaagggaaauagcuacccaaaauuaucuaaguccuauauaaacgauaagggcaaagaaguacugguucuuuggggcauccaccaccccucaacgagcgcugaccaacagaguuuguaccagaaugccgaugcguacguguucgucgggacuucucgcuauuccaagaaauuuaagccugagauugcaauccgaccaaaagugcguggacaggaggguagaaugaacuacuauuggacccugguggaacccggcgacaagauuacauucgaggccacugggaaccuagucguuccuagguacgcuuuugccauggaacggaaugcaggaagcggcaucauaauuucggauaccccagugcaugacugcaacacaaccugucaaacgccgaaaggugcuaucaauacuucucuccccuuccagaacauucacccuaucacaaucgggaagugcccaaaguauguaaaauccaccaagcugcgccuugccacuggacugagaaaugugcccucaauucagaguaggggcuuguuuggcgcgauagccggguucaucgagggagguuggacaggcauggucgaugggugguacggauaucaucaccagaacgaacaaggcagcgguuacgcagcugaccucaaauccacccagaaugccauugacgagaucacgaacaagguaaauucuguuauagagaaaaugaacacccaguuuacagcuguggggaaggaguucaaucaccuggagaagcggauugaaaacuuaaauaaaaaggucgaugacggcuuccuggauaucuggacuuacaacgccgagcuccuugugcuguuggaaaaugagcgcacccuagacuaucaugauagcaacgugaaaaaccuguacgagaagguucgaucacagcucaaaaauaacgcaaaggaaaucggaaauggcuguuuugaguucuaucacaagugcgacaacacauguauggaaagugugaaaaaugggacuuacgauuauccuaaguacuccgaggaagccaaacugaacagagaggagauugacggagucaaacuugaaagcaccaggaucuaucaaauucuggcuauauacucuacaguggcgucaaguuugguccucgugguuagccugggugcaaucuccuuuuggaugugcucuaauggcucguuacagugccggauuuguaucuga

SEQ ID NO: 134267 - RNA, 1701 nt, Artificial Sequence; identical to SEQ ID NO: 130717
  derived and/or modified CDS sequence (opt3) from hemagglutinin__InfluenzaA__ADQ28023

SEQ ID NO: 134268 - RNA, 1701 nt, Artificial Sequence; identical to SEQ ID NO: 130959
  derived and/or modified CDS sequence (opt3) from hemagglutinin__InfluenzaA__ADQ28024

SEQ ID NO: 134269 - RNA, 1701 nt, Artificial Sequence; identical to SEQ ID NO: 130959
  derived and/or modified CDS sequence (opt3) from hemagglutinin__InfluenzaA__ADQ28025

SEQ ID NO: 134270 - RNA, 1701 nt, Artificial Sequence; identical to SEQ ID NO: 131462
  derived and/or modified CDS sequence (opt3) from hemagglutinin__InfluenzaA__ADQ28028

SEQ ID NO: 134271 - RNA, 1701 nt, Artificial Sequence; identical to SEQ ID NO: 132942
  derived and/or modified CDS sequence (opt3) from hemagglutinin__InfluenzaA__ADQ28029

SEQ ID NO: 134272 - RNA, 1701 nt, Artificial Sequence
  derived and/or modified CDS sequence (opt3) from hemagglutinin__InfluenzaA__ADQ28030
augaaggccauccuggugguccuccuuuacaccuucgcuacagcaaacgccgacacucugugcauuggcuaucacgcgaauaacagcacggauaccguugacacaguguuggagaagaauguaacugugacccauuccgucaacuuacuggaagauaagcacaaugggaaacuauguaagcucagaggaguggcuccccugcaucuugguaaaugcaacauagccggcuggauccuggggaauccugagugugaaucuuugucaacagcaaguagcugguccuacauuguugagaccucuucgucagacaacggaacuugcuauccaggcgauuuuaucaauuacgaggagcucagggagcagcugagcaguguguccucuuucgaacgguuugagauuuucccgaagacaagcuccuggcccaaccacgacucaaauaaggguaucaccgccgcuuguccucaugcaggggccaaaaguuuuuauaagaaccugauauggcucgucaaaaagggaaauagcuacccaaaauuaucuaaguccuauaucaacgauaagggcaaagaagugcugguacuuuggggcauucaccaccccucaacgagcgcugaccaacagaguuuguaccagaaugccgaugcguacguuuucguggggacuucucgcuauuccaagaaauuuaagccugagaucgcaauucgaccaaaaguccgugaccaggagggaagaaugaacuacuauuggacccugguggaacccggugauaagaucacauucgaggccacuggcaaccuaguggucccuagguacgcuuuugccauggaacggaaugcagggagcggaauaauuaucucggacaccccaguucaugauugcaacacaaccugucaaacgccgaaaggcgcuauuaauacuucucuccccuuccagaacauccacccuaucacaauugguaagugcccaaaguaugugaaauccaccaagcugcgccuugccacugggcugagaaauguacccucaauacagaguaggggauuguuuggcgcgaucgccggcuucauugaagggggauggacagguaugguggacggcugguacggguaucaucaccagaacgaacaaggaagcggcuacgcagcugaccucaaauccacccagaaugccaucgaugagauaacgaacaaggucaauucugugauugagaaaaugaacacccaguuuacagcuguugguaaggaguucaaucaccuggaaaagcggaucgaaaacuuaaauaaaaagguggacgauggguuccuggacaucuggacuuacaacgccgagcuccuuguccuguuggaaaaugagcgcacccuagauuaucaugacagcaacgugaaaaaccuguacgagaagguacgaucacagcucaaaaauaacgcaaaggaaauuggcaauggauguuuugaguucuaucacaagugcgauaacacauguauggaaaguguuaaaaauggcacuuacgacuauccuaaguacuccgaggaagccaaacugaacagagaggagaucgauggggugaaacuugaaagcaccaggauuuaucaaauacuggcuaucuacucuacagucgcgucaaguuuggugcucgucgugagccugggagcaauuuccuuuuggaugugcucuaaugguucguuacagugccggaucuguaucuga

SEQ ID NO: 134273 - RNA, 1701 nt, Artificial Sequence; identical to SEQ ID NO: 131911
  derived and/or modified CDS sequence (opt3) from hemagglutinin__InfluenzaA__ADQ28031

SEQ ID NO: 134274 - RNA, 1701 nt, Artificial Sequence; identical to SEQ ID NO: 130959
  derived and/or modified CDS sequence (opt3) from hemagglutinin__InfluenzaA__ADQ28032

SEQ ID NO: 134275 - RNA, 1701 nt, Artificial Sequence
  derived and/or modified CDS sequence (opt3) from hemagglutinin__InfluenzaA__ADQ28034
augaaggccauccuggugguccuccuuuacaccuucgcuacagcaaacgccgacacucugugcauuggcuaucacgcgaauaacagcacggauaccguugacacaguguuggagaaaaauguaacugugacccauuccgucaacuuacuggaagauaagcacaaugggaaacuauguaagcucagaggaguggcuccccugcaucuugguaaaugcaacauagccggcuggauccuggggaauccugagugugaaucuuugucaacagcaaguagcugguccuacauuguugagaccucuucgucagacaacggaacuugcuauccaggcgauuuuaucaauuacgaagaacucagggagcagcugagcaguguguccucuuucgaacgguuugagauuuucccgaagacaagcuccuggcccaaccacgacucaaauaagggugucaccgccgcuuguccucaugcaggggccaaaaguuuuuauaagaaccugaucuggcucgugaaaaagggaaauagcuacccaaaauuaucuaaguccuauauaaacgauaagggcaaagaaguacugguucuuuggggcauccaccaccccucaacgagcgcugaccaacagaguuuguaccagaaugccgaugcguacguguucgucgggacuucucgcuauuccaagaaauuuaagccugagauugcaauccgaccaaaagugcguggacaggaggguagaaugaacuacuauuggaccauuguggaacccggcgacaagaucacauucgaggccacugggaaccuggucguuccuagguacgcuuuugccauggaacggaaugcaggaagcggcauaauuaucucggauaccccagugcaugacugcaacacaaccugucaaacgccgaaaggugcuauuaauacuucucuacccuuccagaacauccacccuaucacaauugggaagugcccaaaguauguaaaauccaccaagcuccgccuggccacuggacuuagaaaugugcccucaauacagaguaggggccuguuuggcgcgaucgccggguucauugagggagguuggacaggcauggucgaugggugguacggauaucaucaccagaacgaacaaggcagcgguuacgcagcugacuugaaauccacccagaaugccaucgacgagauaacgaacaagguuaauucugugauugagaaaaugaacacccaguuuacagcuguggggaaggaguucaaucaccucgagaagcggaucgaaaaccugaaucgcaaagucgaugacggcuucuuagauaucuggacuuacaacgccgagcugcucgugcuucuggaaaaugagcgaaccuuggacuaucaugauagcaacguaaagaaccuauacgagaaaguuagaucacagcugaagaauaacgcaaaagaaauuggaaauggcuguuuugaguucuaucacaagugcgacaacacauguauggaaagugugaagaaugggacuuacgauuauccuaaauacuccgaggaagccaagcucaacagggaggagaucgacggagucaaacuggaaagcacccggauuuaucaaauacuugcuaucuacucuacaguggcgucaagucuggucuuggugguuagccucggugcaauuuccuuuuggaugugcucuaauggcucgcugcagugccguaucuguaucuga

SEQ ID NO: 134276 - RNA, 1701 nt, Artificial Sequence
  derived and/or modified CDS sequence (opt3) from hemagglutinin__InfluenzaA__ADQ28035
augaaggccauccuggugguccuccuuuacaccuucgcuacagcaaacgccgacacucugugcauuggcuaucacgcgaauaacagcacggauaccguugacacaguguuggagaaaaauguaacugugacccauuccgucaacuuacuggaagauaagcacaaugggaaacuauguagacucaggggaguggcuccccugcaucuugguaagugcaacauagccggcuggauccuggggaauccugagugugaaucuuugucaacagcaaguagcugguccuacauuguugagaccucuucgucagacaacggaacuugcuauccaggcgauuuuaucgacuacgaagaacuccgggagcagcugagcaguguguccucuuucgaacgcuuugagauuuucccgaaaacaagcuccuggcccaaucacgauucaaacaagggugucaccgccgcuuguccucaugcaggggccaagaguuuuuauaaaaaucugaucuggcucgugaagaaaggaaacagcuacccaaaguuaucuaaauccuauauaaaugacaagggcaaggaaguacugguucuuuggggcauccaccaccccucaacgagcgcugaucaacagaguuuguaccagaacgccgacgcguacguguucgucgggacuucucgauauuccaaaaaguuuaaaccugagauugcaauccguccaaaggugagaggacaggaggguaggaugaauuacuauuggacccugguggaacccggcgauaaaauuacauucgaggccacugggaaccuagucguuccucgguacgcuuuugccauggaacgcaacgcaggaagcggcaucauaauuucggacaccccagugcaugauugcaauacaaccugucaaacgccgaagggugcuaucaacacuucucuccccuuccagaauauucacccuaucacaaucgggaaaugcccaaaguauguaaaguccaccaaacugagacuugccacuggacugaggaacgugcccucaauucagagucggggcuuguuuggcgcgauagccggguucaucgagggagguuggacaggcauggucgacgggugguacggauaucaucaccagaaugaacaaggcagcgguuacgcagcugaccucaaguccacccagaacgccauugaugagaucacgaauaaagugaacucuguuauagagaagaugaauacccaguuuacagcuguggggaaagaguucaaccaccuggagaagcgcauugaaaauuuaaacaagaaagucgacgauggcuuccuggacaucuggacuuacaaugccgagcuccuugugcuguuggaaaacgagcgaacccuagauuaucaugacagcaauguaaagaaccuguacgagaaaguuagaucacagcucaagaacaaugcaaaagaaaucggaaacggcuguuuugaguucuaucacaagugcgauaauacauguauggaaagugugaagaacgggacuuacgacuauccuaaauacuccgaggaagccaagcugaauagggaggagauugauggagucaaacuugaaagcacccggaucuaucaaauucuggcuauauacucuacaguggcgucaaguuugguccucgugguuagccugggugcaaucuccuuuuggaugugcucuaacggcucguuacagugccguauuuguaucuga

SEQ ID NO: 134277 - RNA, 1701 nt, Artificial Sequence; identical to SEQ ID NO: 130717
  derived and/or modified CDS sequence (opt3) from hemagglutinin__InfluenzaA__ADQ28036

SEQ ID NO: 134278 - RNA, 1701 nt, Artificial Sequence; identical to SEQ ID NO: 130717
  derived and/or modified CDS sequence (opt3) from hemagglutinin__InfluenzaA__ADQ28037

SEQ ID NO: 134279 - RNA, 1701 nt, Artificial Sequence; identical to SEQ ID NO: 130959
  derived and/or modified CDS sequence (opt3) from hemagglutinin__InfluenzaA__ADQ28038

SEQ ID NO: 134280 - RNA, 1701 nt, Artificial Sequence; identical to SEQ ID NO: 130717
  derived and/or modified CDS sequence (opt3) from hemagglutinin__InfluenzaA__ADQ28039

SEQ ID NO: 134281 - RNA, 1701 nt, Artificial Sequence; identical to SEQ ID NO: 130959
  derived and/or modified CDS sequence (opt3) from hemagglutinin__InfluenzaA__ADQ28040

SEQ ID NO: 134282 - RNA, 1701 nt, Artificial Sequence; identical to SEQ ID NO: 130959
  derived and/or modified CDS sequence (opt3) from hemagglutinin__InfluenzaA__ADQ28041

SEQ ID NO: 134283 - RNA, 1701 nt, Artificial Sequence
  derived and/or modified CDS sequence (opt3) from hemagglutinin__InfluenzaA__ADQ28043
auggaggccauccuggugguccuccuuuacaccuucgcuacagcaaacgccgacacucugugcauuggcuaucacgcgaauaacagcacggauaccguugacacaguguuggaaaagaauguaacugugacccauuccgucaacuuacuggaggauaaacacaaugggaagcuauguaaacucagaggaguggcuccccugcaucuugguaagugcaacauagccggcuggauccuggggaauccugaaugugagucuuugucaacagcaaguagcugguccuacauuguugaaaccucuucgucagacaacggaacuugcuauccaggcgauuuuaucgacuacgaggagcucagggaacagcugagcaguguguccucuuucgagcgguuugaaauuuucccgaaaacaagcuccuggcccaaucacgauucaaacaagggugucaccgccgcuuguccucaugacggggcaaagaguuuuuauaaaaaucugaucuggcucgugaagaaaggaaacagcuacccaaaguuaucuaaauccuauauaaaugauaagggcaaggagguacugguucuuuggggcauccaccaccccucaacgagcgccgaccaacagaguuuguaccagaacgcugaugccuacguguucgucgggucuucccgcuauagcaaaaaguuuaaaccugagauugcgauccgaccaaaggugcgugaccaggaaggaagaaugaauuacuauuggacucugguggagcccggugauaaaauuaccuucgaagcaacaggcaaccuagucguuccuagguacgccuuugcuauggagcggaacgccgggucgggaaucauaauuucugacacuccagugcaugacugcaauaccacaugucaaaccccgaagggcgcaaucaacacgucccuccccuuccacaauauucauccuaucacuaucgguaaaugcccaaaguauguaaagucaacaaaacugcgccuugcuaccgggcugagaaacgugcccaguauucagagcaggggauuguuuggcgccauagcgggcuucaucgaagggggauggacugguauggucgauggcugguacggguaucaccaccagaaugagcagggauccggcuacgccgcagaccucaagucuacacaaaacgcuauugaugagaucaccaauaaagugaacagcguuauagaaaagaugaauacgcaguuuaccgccguggguaaagaguucaaccaucuggaaaagcggauugagaauuuaaacaagaaagucgacgauggguuccuggacaucuggacauacaaugcugaacuccuugugcuguuggagaacgagcgcacucuagauuaucacgacucaaauguaaagaaccuguacgaaaaaguucgaagucagcucaagaacaaugccaaagagaucggcaacggauguuuugaguucuaucauaagugcgauaauaccuguauggaauccgugaagaacggcacauacgacuauccuaaauacagcgaagaggcaaagcugaauagagaggaaauugauggggucaaacuugagucuacuaggaucuaucagauucuggccauauacucaaccguggcuaguagcuugguccucgugguuucccugggagcgaucucuuuuuggaugugcucgaacgguagcuuacaaugccggauuuguaucuga

SEQ ID NO: 134284 - RNA, 1701 nt, Artificial Sequence; identical to SEQ ID NO: 130959
  derived and/or modified CDS sequence (opt3) from hemagglutinin__InfluenzaA__ADQ28044

SEQ ID NO: 134285 - RNA, 1701 nt, Artificial Sequence
  derived and/or modified CDS sequence (opt3) from hemagglutinin__InfluenzaA__ADQ28045
augaaggccauccuggugguccuccuuuacaccuucgcuacagcaaacgccgacacucugugcauuggcuaucacgcgaauaacagcacggauaccguugacacaguguuggagaaaaauguaacugugacccauuccgucaacuuacuggaagauaagcacaaugggaaacuauguaagcucagaggaguggcuccccugcaucuugguaaaugcaacauagccggcuggauccuggggaauccugagugugaaucuuugucaacagcaaguagcugguccuacauuguugagaccucuucgucagacaacggaacuugcuauccaggcgauuuuaucgacuacgaggagcucagggagcagcugagcaguguguccucuuucgaacgguuugagauuuucccgaagacaagcuccuggcccaaucacgauucaaacaagggugucaccgccgcuuguagucaugcaggggccaagagcuuuuauaagaaucugaucuggcucgugaaaaagggaaacucuuacccuaaauuauccaagucauauauaaaugacaagggcaaagaaguacugguucuuuggggcauccaccacccaagcacgagugcugaucaacagucuuuguaccagaacgccgacgcguacguguucgucgggacuucccgcuauagcaagaaauuuaagcccgagauugcaauccgaccuaaagugcgugaucaggagggaagaaugaauuacuauuggacccugguggaaccaggugacaagauuacauucgaggccacuggcaaccuagucguucccagguacgcuuuugccauggaacggaacgcagggucgggaaucauaauuucugauaccccugugcaugacugcaauacaaccugucaaacgccaaaaggcgcuaucaacacuucccucccguuccagaauauucaccccaucacaaucgguaagugcccuaaguauguaaaaucaaccaagcugcgccuugccacugggcugagaaacgugccaaguauucagagcaggggauuguuuggcgcgauagccggcuucaucgaagggggauggacagguauggucgacggcugguacggguaucaucaccagaaugaacaaggauccggcuacgcagcugaucucaaaucuacccagaacgccauugacgagaucacgaauaaggugaacagcguuauagagaaaaugaauacccaguuuacagcuguggguaaggaguucaaccaccuggaaaagcggauugaaaauuuaaacaaaaaggucgaugacggguuccuggauaucuggacuuacaaugccgagcuccuugugcuguuggaaaacgagcgcacccuagacuaucaugauucaaauguuaaaaaccuguacgagaagguacgaaaccagcucaaaaauaacgcaaaggaaaucggcaauggauguuuugaguucuaucacaagugcgacaacacauguauggaaagugugaaaaauggcacuuacgauuaucccaaguacuccgaggaagccaaacugaacagagaggagauugacggggucaaacuugaaagcaccaggaucuaucaaauucuggcuauauacucuacaguggcgucaaguuugguccucgugguuagccugggagcaaucuccuuuuggaugugcucuaaugguucguuacagugccggauuuguaucuga

SEQ ID NO: 134286 - RNA, 1701 nt, Artificial Sequence; identical to SEQ ID NO: 131187
  derived and/or modified CDS sequence (opt3) from hemagglutinin__InfluenzaA__ADQ28047

SEQ ID NO: 134287 - RNA, 1701 nt, Artificial Sequence; identical to SEQ ID NO: 130717
  derived and/or modified CDS sequence (opt3) from hemagglutinin__InfluenzaA__ADQ28048

SEQ ID NO: 134288 - RNA, 1701 nt, Artificial Sequence; identical to SEQ ID NO: 130959
  derived and/or modified CDS sequence (opt3) from hemagglutinin__InfluenzaA__ADQ28049

SEQ ID NO: 134289 - RNA, 1701 nt, Artificial Sequence; identical to SEQ ID NO: 130717
  derived and/or modified CDS sequence (opt3) from hemagglutinin__InfluenzaA__ADQ28050

SEQ ID NO: 134290 - RNA, 1701 nt, Artificial Sequence
  derived and/or modified CDS sequence (opt3) from hemagglutinin__InfluenzaA__ADQ28051
augaaggccauccuggugguccuccuuuacaccuucgcuacagcaaacgccgacacucugugcauuggcuaucacgcgaauaacagcacggauaccguugacacaguguuggagaaaaauguaacugugacccauuccgucaacuuacuggaagauaagcacgacgggaaacuauguaagcucagaggaguggcuccccugcaucuugguaaaugcaauauagccggcuggauccuggggaacccugagugugaaucuuugucaacagcaaguagcugguccuacauuguugagaccucuucgucagauaauggaacuugcuauccaggcgacuuuaucaacuacgaggagcucagggagcagcugagcaguguguccucuuucgaacgguuugagauuuucccgaagacaagcuccuggcccaaucacgauucaaacaagggugucaccgccgcuuguccucaugcaggggccaaaaguuuuuauaagaaucugaucuggcucgugaaaaagggaaacagcuacccaaaauuaucuaaguccuauauaaaugacaagggcaaagaaguacugguucuuuggggcauccaccaccccucaacgagcgcugaucaacagaguuuguaccagaacgccgacgcguacguguucgucgggacuucucgcuauuccaagaaauuuaagccugagauugcaauccgaccaaaagugcgugaucaggagggaagaaugaauuacuauuggacccugguggaacccggugacaagauuacauucgaggccacuggcaaccuagucguuccuagguacgcuuuugccauggaacggaacgcagggagcggaaucauaauuucggauaccccagugcaugacugcaauacaaccugucaaacgccgaaaggcgcuaucaacacuucucuccccuuccagaauauucacccuaucacaaucgguaagugcccaaaguauguaaaauccaccaagcugcgccuugccacugggcugagaaacgugcccucaauucagaguaggggauuguuuggcgcgauagccggcuucaucgaagggggauggacagguauggucgacggcugguacggguaucaucaccagaaugaacaaggaagcggcuacgcagcugaucucaaauccacccagaacgccauugacgagaucacgaauaaggugaacucuguuauagagaaaaugaauacccaguuuacagcuguggguaaggaguucaaccaccuggaaaagcggauugaaaauuuaaacaaaaaggucgaugacggguuccuggauaucuggacuuacaaugccgagcuccuugugcuguuggaaaacgagcgcacccuagacuaucaugauagcaauguaaagaaccuguacgagaagguucgaucacagcucaaaaacaaugcaaaggaaaucggcaacggauguuuugaguucuaucacaagugcgacaauacauguauggaaagugugaaaaacggcacuuacgauuauccuaaguacuccgaggaagccaaacugaauagagaggagauugacggggucaaacuugaaagcaccaggaucuaucaaauucuggcuauauacucuacaguggcgucaaguuugguccucgugguuagccugggagcaaucuccuuuuggaugugcucuaacgguucguuacagugccggauuuguaucuga

SEQ ID NO: 134291 - RNA, 1701 nt, Artificial Sequence; identical to SEQ ID NO: 130717
  derived and/or modified CDS sequence (opt3) from hemagglutinin__InfluenzaA__ADQ28053

SEQ ID NO: 134292 - RNA, 1701 nt, Artificial Sequence; identical to SEQ ID NO: 130959
  derived and/or modified CDS sequence (opt3) from hemagglutinin__InfluenzaA__ADQ28055

SEQ ID NO: 134293 - RNA, 1701 nt, Artificial Sequence
  derived and/or modified CDS sequence (opt3) from hemagglutinin__InfluenzaA__ADQ28056
auggaggccauccuggugguccuccuuuacaccuucgcuacagcagacgccgauacucugugcauuggcuaucacgcgaacaauagcacggacaccguugauacaguguuggaaaagaacguaacugugacccauuccgucaauuuacuggaggacaaacacaacgggaagcuauguaaacucagaggaguggcuccccugcaucuugguaagugcaauauagccggcuggauccuggggaacccugaaugugagucuuugucaacagcaaguagcugguccuacauuguugaaaccucuucgucagauaauggaacuugcuauccaggcgacuuuaucgauuacgaggagcucagggaacagcugagcaguguguccucuuucgagcgguuugaaauuuucccgaaaacaagcuccuggcccaaccacgacucaaauaagggugucaccgccgcuuguccucaugcaggggccaagaguuuuuauaaaaaccugaucuggcucgugaagaaaggaaauagcuacccaaaguuaucuaaauccuauauaaacgauaagggcaaggagguacugguucuuuggggcauccaccaccccucaacgagcgcugaccaacagaguuuguaccagaaugccgaugcguacguguucgucgggucuucccgcuauagcaaaaaguuuaaaccugagauugcaauccgaccaaaggugcgugaccaggaaggaagaaugaacuacuauuggacucugguggagcccggugauaaaauuaccuucgaagccacaggcaaucuagucguuccuagguacgcuuuugccauggagcggaacgcagggucgggaaucauaauuucugacacuccagugcaugacugcaacaccacaugucaaaccccgaagggcgcuaucaauacgucccuccccuuccacaacauucauccuaucacuaucgguaaaugcccaaaguauguaaagucaacaaaacugcgccuugccaccgggcugagaaaugugcccaguauucagagcaggggauuguuuggcgcgauagccggcuucaucgaagggggauggacugguauggucgauggcugguacggguaucaccaccagaacgagcagggauccggcuacgcagcugaccucaagucuacacaaaaugccauugaugagaucaccaacaaagugaauagcguuauagaaaagaugaacacgcaguuuaccgcuguggguaaagaguucaaucaucuggaaaagcggauugagaacuuaaauaagaaagucgacgauggguuccuggacaucuggacauacaacgccgaacuccuugugcuguuggagaaugagcgcacucuagauuaucacgacucaaacguaaagaaucuguacgaaaaaguucgaagucagcucaagaacaacgcaaaagagaucggcaauggauguuuugaguucuaucauaagugcgauaacaccuguauggaauccgugaagaauggcacauacgacuauccuaaauacagcgaagaggccaagcugaacagagaggaaauugauggggucaaacuugagucuacuaggaucuaucagauucuggcuauauacucaaccguggcgaguagcuugguccucgugguuucccugggagcaaucucuuuuuggaugugcucgaaugguagcuuacaaugccggauuuguaucuga

SEQ ID NO: 134294 - RNA, 1701 nt, Artificial Sequence; identical to SEQ ID NO: 130717
  derived and/or modified CDS sequence (opt3) from hemagglutinin__InfluenzaA__ADQ28057

SEQ ID NO: 134295 - RNA, 1701 nt, Artificial Sequence; identical to SEQ ID NO: 130717
  derived and/or modified CDS sequence (opt3) from hemagglutinin__InfluenzaA__ADQ28058

SEQ ID NO: 134296 - RNA, 1701 nt, Artificial Sequence
  derived and/or modified CDS sequence (opt3) from hemagglutinin__InfluenzaA__ADQ28059
augaaggccauccuggugguccuccuuuacacccuggcuacagcaaacgccgacacuuugugcauuggcuaucacgcgaauaacagcacggauaccguugacacaguguuagagaaaaauguaacugugacccauuccgucaaccugcuagaagauaagcacaaugggaaacucuguaagcugagaggaguggcuccccuucaucuggguaaaugcaacauagccggcuggaucuuggggaauccugagugugaaucucucucaacagcaaguagcugguccuacauuguugagaccucuucgucagacaacggaacuugcuauccaggcgauuucaucgacuacgaggagcugagggagcagcugagcaguguguccucuuuugaacgguucgagauuuuuccgaagacaagcuccuggcccaaucacgauucaaacaagggugucaccgccgcuuguccucaugcaggggccaaaaguuucuauaagaaucucaucugguuagugaaaaagggaaacagcuacccaaaacugucuaaguccuauauaaaugacaagggcaaagaaguacuuguuuuguggggcauccaccaccccucaacgagcgcugaucaacagagucuguaccagaacgccgacgcguacguguuugucgggacuucuaaguauuccaaaaaguucaaaccugagauugcaauccgcccaaaggugcgagaucaggagggacguaugaauuacuauuggacccuaguggaacccggugacaaaauuacauuugaggccacuggcaaccucgucguuccuagauacgcuuucgccauggaaaggaacgcagggagcggaaucauaauuucggauaccccagugcaugacugcaauacaaccugucaaacgccgaagggcgcuaucaacacuucucugcccuuucagaauauucacccuaucacaaucgguaagugcccaaaauauguaaaguccaccaaacuucggcuggccacuggguugcgcaacgugcccucaauucagaguagaggacucuucggcgcgauagccggcuuuaucgaagggggauggacagguauggucgacggcugguacggguaucaucaccagaaugaacaaggaagcggcuacgcagcugaucugaaguccacccagaacgccauugacgagaucacgaauaaagugaacucuguuauagagaagaugaauacccaguucacagcuguggguaaggaauuuaaccacuuagagaaaaggauugaaaaucugaacaagaaagucgaugacggguuccucgauaucuggacuuacaaugccgagcuucugguguugcuagaaaacgagcggacccuggacuaucaugauagcaauguaaagaaccucuacgagaaaguucgcucacagcugaagaacaaugcaaaggaaaucggcaacggauguuucgaguuuuaucacaaaugcgacaauacauguauggaaagugugaagaacggcacuuacgauuauccuaaauacuccgaggaagccaaacuuaaucgagaggagauugacggggucaagcuggaaagcaccagaaucuaucaaauuuuggcuauauacucuacaguggcgucaagucucguccuggugguuagcuuaggagcaaucuccuucuggaugugcucuaacgguucgcugcagugcaggauuuguaucuga

SEQ ID NO: 134297 - RNA, 1701 nt, Artificial Sequence; identical to SEQ ID NO: 130717
  derived and/or modified CDS sequence (opt3) from hemagglutinin__InfluenzaA__ADQ28060

SEQ ID NO: 134298 - RNA, 1701 nt, Artificial Sequence
  derived and/or modified CDS sequence (opt3) from hemagglutinin__InfluenzaA__ADQ28061
augaaggccauccuggugguccuccuuuacaccuucgcuacagcaaacgccgacacucugugcauuggcuaucacgcgaauaacagcacggauaccguugacacaguguuggagaaaaauguaacugugacccauuccgucaacuuacuggaagauaagcacaaugggaaacuauguaagcucagaggaguggcuccccugcaucuugguaggugcaacauagccggcuggauccuggggaauccugagugugaaucuuugucaacagcaaguagcugguccuacauuguugagaccucuucgucagacaacggaacuugcuauccaggcgauuuuaucgacuacgaggagcuccgggagcagcugagcaguguguccucuuucgaacgcuuugagauuuucccgaaaacaagcuccuggcccaaucacgauucaaacaagggugucaccgccgcuuguccucaugcaggggccaagaguuuuuauaaaaaucugaucuggcucgugaagaaaggaaacagcuacccaaaguuaucuaaauccuauauaaaugacaagggcaaggaaguacugguucuuuggggcauccaccaccccucaacgagcgcugaucaacagaguuuguaccagaacgccgacgcgaauguguucgucgggacuucucgauacuccaaaaaguuuaaaccugagauugcaauccguccaaaggugagagaucaggagggaaggaugaacuauuacuggacccugguggaacccggugacaaaauuacauucgaggccacuggcaaccuagucguuccucgguaugcuuuugccauggaacgcaaugcagggagcggaaucauaauuucggauaccccagugcaugacugcaacacaaccugucaaacgccgaagggcgcuaucaauacuucucuccccuuccagaacauucacccuaucacaaucgguaaaugcccaaaguacguaaaguccaccaaacugagacuugccacugggcugaggaaugugcccucaauucagagucggggauuguuuggcgcgauagccggcuucaucgaagggggauggacagguauggucgacggcugguauggguaccaucaccagaacgaacaaggaagcggcuaugcagcugaucucaaguccacccagaaugccauugacgagaucacgaacaaaguuaauucugugauagagaagaugaacacccaguuuacagcuguggguaaagaguucaaucaccuggaaaagcgcauugaaaacuuaaauaagaaagucgaugacggguuccuggauaucuggacuuacaacgccgagcuccuugugcuguuggaaaaugagcgaacccuagacuaccaugauagcaacguaaagaaccuguaugagaaaguuagaucacagcucaagaauaacgcaaaagaaaucggcaauggauguuuugaguucuaccacaagugcgacaacacauguauggaaagugugaagaauggcacuuaugauuacccuaaauauuccgaggaagccaagcugaacagggaggagauugacggggucaaacuugaaagcacccggaucuaccaaauucuggcuauauauucuacaguggcgucaaguuugguccucgugguuagccugggagcaaucuccuuuuggaugugcucuaaugguucguuacagugccguauuuguaucuga

SEQ ID NO: 134299 - RNA, 1701 nt, Artificial Sequence
  derived and/or modified CDS sequence (opt3) from hemagglutinin__InfluenzaA__ADQ28063
augaaggccauccuggugguccuccuuuacaccuucgcuacagcaaacgccgacacucugugcauuggcuaucacgcgaauaacagcacggauaccguugacacaguguuggagaaaaauguaacugugacccauuccgucaacuuacuggaagauaagcacaaugggaaacuauguaagcucagaggaguggcuccccugcaucuugguaaaugcaacauagccggcuggauccuggggaauccugagugugaaucuuugucaacagcaaguagcugguccuacauuguugagaccucuucgucagacaacggaacuugcuauccaggcgauuuuaucaauuacgaagaacucagggagcagcugagcaguguguccucuuucgaacgguuugagauuuucccgaagacaagcuccuggcccaaccacgacucaaauaagggugucaccgccgcuuguccucaugcaggggccaaaaguuuuuauaagaaccugaucuggcucgugaaaaagggaaauagcuacccaaaauuaucuaaguccuauauaaacgauaagggcaaagaaguacugguucuuuggggcauccaccaccccucaacgagcgcugaccaacagaguuuguaccagaaugccgaugcguacguguucgucgggacuucucgcuauuccaagaaauuuaagccugagauugcaauccgaccaaaagugcguaaccaggagggaagaaugaacuaccauuggacccuggugaagcccggugacaaaauuacauucgaagccacuggcaaucuagucguuccuagguaugcuuuugccguggagcggaacgcagggagcggaaucauaauuucggauaccccaguacacgacugcaauacaaccugucaaacgccgaagggcgcuaucaacacuucucuccccuuccagaauauucauccuaucacaaucgguaagugcccaaaauacgugaaguccaccaaacugcgccuugccacugggcugagaaacguccccucaauucagaguaggggauuguuuggcgcgauagccggcuucaucgaagggggauggacagguaugguggauggcugguauggguaccaccaccagaaugagcaaggaagcggcuaugcagcugaccucaaguccacccagaacgccauugacgaaaucacgaauaaaguuaacucugugauagagaagaugaauacccaguuuacagcugucgguaaggaguucaaccaucuggaaaaacggauugagaauuuaaacaagaaaguggaugacggguuccuggauaucuggacuuacaaugccgaacuccuuguacuguuggagaacgaacgcacccuagacuaccacgauagcaacguuaagaaucuguaugagaaagugcgaucacagcucaagaacaaugcaaaggagaucggcaacggauguuuugaguucuaccauaaaugcgacaauacauguauggagagugucaagaacggcacuuaugauuacccuaaauauuccgaagaggccaagcugaauagagaagagauugacggggugaaacuugagagcaccaggaucuaccaaauucuggcuauauauucuacagucgcgucaaguuuggugcucguugugagccugggagcaaucuccuuuuggaugugcucuaacgguucguuacagugccggauuuguaucuga

SEQ ID NO: 134300 - RNA, 1701 nt, Artificial Sequence; identical to SEQ ID NO: 131465
  derived and/or modified CDS sequence (opt3) from hemagglutinin__InfluenzaA__ADQ28064

SEQ ID NO: 134301 - RNA, 1701 nt, Artificial Sequence
  derived and/or modified CDS sequence (opt3) from hemagglutinin__InfluenzaA__ADQ28065
augaaggccauccuggugguccuccuuuacaccuucgcuacagcaaacgccgacacucugugcauuggcuaucacgcgaauaacagcacggauaccguugacacaguguuggagaaaaauguaacugugacccauuccgucaacuuacuggaagauaagcacaaugggaaacuauguaagcucagaggaguggcuccccugcaucuugguaaaugcaacauagccggcuggauccuggggaauccugagugugaaucuuugucaacagcaaguagcugguccuacauuguugagaccucuucgucagacaacggaacuugcuauccaggcgauuuuaucgacuacgaagaacucagggagcagcugagcaguguguccucuuucgaacgguuugagauuuucccgaagacaagcuccuggcccaaucacgauucaaacaagggugucaccgccgcuuguccucaugcaggggccaaaaguuuuuauaagaaucugaucuggcucgugaaaaagggaaacagcuacccaaaauuaucuaaguccuauauaaaugacaagggcaaagaaguacugguucuuuggggcauccaccaccccucaacgagcgcugggcaacagaguuuguaccagaacgccgaugcguacguguucgucggaacuucucgcuauuccaagaaauuuaagccugagauugcaauccgaccaaaagugcgugaccaggaggguagaaugaauuacuauuggacccugguggaacccggcgauaagauuacauucgaggccacugggaaccuagucguuccuagguacgcuuuugccauggaacggaacgcaggaagcggcaucauaauuucggacacccaagugcaugauugcaauacaaccugucagacgccaaaaggugcuaucaacacuucucucccguuccagaauauucaccccaucacaaucgggaagugcccuaaguauguaaaauccaccaagcugcgccuugccacuggacugagaaacgugccaucaauucagaguaggggcuuguuuggcgcgauagccggguucaucgagggagguuggacaggcauggucgacgggugguacggauaucaucaccaaaaugaacagggcagcgguuacgcagcugaccucaaauccacccagaacgccauugauaagaucacgaauaaagugaacucuguuauagagaagaugaauacccaguuuacagcuguggggaaggaguucaaccaccuggaaaaacggauugagaauuuaaacaagaaagucgacgauggcuuccuggacaucuggacuuacaaugccgaacuccuugugcuguuggagaacgaacgcacccuagauuaucaugacagcaauguaaagaaccuguacgagaaaguucgaucacaacucaagaacaaugcaaaggagaucggaaacggcuguuuugaguucuaucacaaaugcgauaauacauguauggagagugugaagaacgggacuuacgacuaucccaaauacuccgaagaggccaagcugaauagagaagagauugauggagucaaacuugagagcaccaggaucuaucagauucuggcuauauacucuacaguggcgucaaguuugguccucgugguuagccugggugcaaucuccuuuuggaugugcucuaacggcucguuacagugccggauuuguaucuga

SEQ ID NO: 134302 - RNA, 1701 nt, Artificial Sequence
  derived and/or modified CDS sequence (opt3) from hemagglutinin__InfluenzaA__ADQ28066
augaaggccauccuggugguccuccuuuacaccuucgcuacagcaaacgccgacacucugugcauuggcuaucacgcgaauaacagcacggauaccguugacacaguguuggagaaaaauguaacugugacccauuccgucaacuuacuggaagauaagcacaaugggaaacuauguaagcucagaggaguggcuccccugcaucuugguaaaugcaacauagccggcuggauccuggggaauccugagugugaaucuuugucaacagcaaguagcugguccuacauuguugagaccucuucgucagacaacggaacuugcuauccaggcgauuuuaucgacuacgaggagcucagggagcagcugagcaguguguccucuuucgaacgguuugagauuuucccgaagacaagcuccuggcccaaucacgauucaaacaagggugucaccgccgcuuguccucaugcaggggccaaaaguuuuuauaagaaucugaucuggcucgugaaaaagggaaacagcuacccaaaauuaucuaaguccuauauaaaugacaagggcaaagaaguacugguucuuuggggcauccaccaccccucaacgagcgcugaucaacagaguuuguaccagaacgccgacgcguacguguucgucgggacuucucgcuauuccaagaaauuuaagccugagauugcaauccgaccacgugugagagaucaggagggaaggaugaauuacuauuggacccugguggaacccggugacaaaauuacauucgaggccacuggcaaccuagucguuccucgguacgcuuuugccauggaacgcaacgcagggagcggaaucauaauuucggauaccccagugcaugacugcaauacaaccugucaaacgccgaagggcgcuaucaacacuucucuccccuuccagaauauucacccuaucacaaucgguaaaugcccaaaguauguaaaguccaccaaacugagacuugccacugggcugaggaacgugcccucaauucagagucggggauuguuuggcgcgauagccggcuucaucgaagggggauggacagguauggucgacggcugguacggguaucaucaccagaaugaacaaggaagcggcuacgcagcugaucucaaguccacccagaacgccauugacaaaaucacgaauaaggugaacucuguuauagagaaaaugaauacccaguuuacagcuguggguaaggaguucaaccaccuggaaaagcgcauugagaauuuaaacaaaaaggucgaugacggguuccuggauaucuggacuuacaaugccgaacuccuugugcuguuggagaacgaacgaacccuagacuaucaugauagcaauguaaagaaccuguacgagaagguuagaucacagcucaaaaacaaugcaaaggagaucggcaacggauguuuugaguucuaucacaagugcgacaauacauguauggaaagugugaaaaacggcacuuacgauuauccuaaguacuccgaagaggccaaacugaauagggaagagauugacggggucaaacuugagagcacccggaucuaucaaauucuggcuauauacucuacaguggcgucaaguuugguccucgugguuagccugggagcaaucuccuuuuggaugugcucuaacgguucguuacagugccguauuuguaucuga

SEQ ID NO: 134303 - RNA, 1701 nt, Artificial Sequence
  derived and/or modified CDS sequence (opt3) from hemagglutinin__InfluenzaA__ADQ28067
augaaggccauccuggugguccuccuuuacaccuucgcuacagcaaacgccgacacucugugcauuggcuaucacgcgaauaacagcacggauaccguugacacaguguuggagaaaaauguaacugugacccauuccgucaacuuacuggaagauaagcacaaugggaaacuauguaagcucagaggaguggcuccccugcaucuugguaaaugcaacauagccggcuggauccuggggaauccugagugugaaucuuugucaacagcaaguagcugguccuacauuguugagaccucuucgucagacaacggaacuugcuauccaggcgauuuuaucgacuacgaggagcucagggagcagcugagcaguguguccucuuucgaacgguuugagauuuucccgaagacaagcuccuggcccaaucacgauucaaacaagggugucaccgccgcuuguccucaugcaggggccaaaaguuuuuauaagaaucugaucuggcucgugaaaaagggaaacagcuacccaaaauuaucuaaguccuauauaaaugacaagggcaaagaaguacugguucuuuggggcauccaccaccccucaacgagcgcugaucaacagaguuuguaccagaacgccgacgcguacguguucgucgggacuucucgcuauuccaagaaauuuaagccugagauugcaauccgaccaaaagugcgugaucaggagggaagaaugaauuacuauuggacccugguggaacccggugacaagauuacauucgaggccacuggcaaccuagucguuccuagguacgcuuuugccauggaacggaacgcagggagcggaaucauaauuucggauaccccagugcaugacugcaauacaaccugucaaacgccgaaaggcgcuaucaacacuucucuccccuuccagaauauucacccuaucacaaucgguaagugcccaaaguauguaaaauccaccaagcugcgccuugccacugggcugagaaacgugcccucaauucagaguaggggauuguuuggcgcgauagccggcuucaucgaagggggauggacagguauggucgacggcugguacggguaucaucaccagaaugaacaaggaagcggcuacgcagcugaucucaaauccacccagaacgccauugacaagaucacgaauaaagugaacucuguuauagagaagaugaauacccaguuuacagcuguggguaaggaguucaaccaccuggaaaaacggauugagaauuuaaacaagaaagucgaugacggguuccuggauaucuggacuuacaaugccgaacuccuugugcuguuggagaacgaacgcacccuagacuaucaugauagcaauguaaagaaccuguacgagaaaguucgaucacagcucaagaacaaugcaaaggagaucggcaacggauguuuugaguucuaucacaaaugcgacaauacauguauggaaagugugaagaacggcacuuacgauuauccuaaauacuccgaagaggccaagcugaauagagaagagauuaacggggucaaacuugagagcaccaggaucuaucaaauucuggcuauauacucuacaguggcgucaaguuugguccucgugguuagccugggagcaaucuccuuuuggaugugcucuaaugguucguuacagugccggauuuguaucuga

SEQ ID NO: 134304 - RNA, 1701 nt, Artificial Sequence
  derived and/or modified CDS sequence (opt3) from hemagglutinin__InfluenzaA__ADQ28068
augaaggccauccuggugguccuccuuuacaccuucacaacugcuaacgcagacacgcugugcauuggcuaucacgccaauaacagcaccgauacaguugacacuguguuggagaaaaauguaaccgugacacauuccgucaacuuacuggaagauaagcacaaugggaaacuauguaagcucagaggaguggcgccccugcaucuugguaaaugcaacauagcuggcuggauccuggggaauccugagugugaaucuuugucaaccgccaguagcugguccuacauuguugagacuucuucgucagacaacggaacaugcuauccaggcgauuuuaucaauuacgaggagcucagggagcagcugagcaguguguccucuuucgaacgguuugagauuuucccgaagaccagcuccuggcccaaccacgacucaaauaagggugucacggcagccuguccucaugcuggggaaaaaucuuuuuauaagaaccugaucuggcucgugaaaaagggaaauagcuacccaaaauuaucuaaguccuauauaaacgauaagggcaaagagguacugguucuuuggggcauccaccaccccucaacuagcgcagaccaacagaguuuguaccagaaugccgaugcuuacguguucgucgggaccucucgcuauuccaagaaauuuaagccugagauugccauccgaccaaaagugcgugaccaggaaggaagaaugaacuaccauuggacacuggugaagcccggugauaaaauuacuuucgaggcgaccggcaaccuagucguuccuagguaugcauuugccauggaacggaaugcugggagcggaaucauaauuucggacacaccagugcacgauugcaacaccacgugucaaacuccgaagggcgccaucaauacaucucuccccuuccagaacauucauccuaucaccaucgguaagugcccaaaauacguaaaguccacuaaacugcgccuugcaacagggcugagaaaugugcccucaauucagaguaggggauuguuuggcgcuauagccggcuucaucgaagggggauggaccgguauggucgacggcugguauggguaccaccaccagaacgaacaaggaagcggcuaugcggccgaccucaaguccacgcagaaugcaauugaugagaucaccaacaaagugaauaguguuauagagaagaugaacacacaguuuacugcuguggguaaggaguucaaucaucuggaaaaacggauugaaaacuuaaauaagaaagucgacgauggguuccuggacaucuggaccuacaacgccgagcuccuugugcuguuggaaaaugagcgcacacuagauuaccacgacagcaacguaaagaaccuguaugagaaaguucgaucacagcucaagaauaacgcuaaggaaaucggcaauggauguuuugaguucuaccauaaaugcgauaacacuuguauggaaagugugaagaauggcaccuaugacuacccuaaauauuccgaggaagccaagcugaacagagaggagauugauggggucaaacuugaaagcacaaggaucuaccaaauucuggcaauauauucuaccguggccucaaguuugguccucgugguuagccugggagcuaucuccuuuuggaugugcucuaaugguucguuacagugccggauuuguaucuga

SEQ ID NO: 134305 - RNA, 1701 nt, Artificial Sequence; identical to SEQ ID NO: 134303
  derived and/or modified CDS sequence (opt3) from hemagglutinin__InfluenzaA__ADQ28069

SEQ ID NO: 134306 - RNA, 1701 nt, Artificial Sequence
  derived and/or modified CDS sequence (opt3) from hemagglutinin__InfluenzaA__ADQ28070
augaaggccauccuggugguccuccuuuacaccuucgcuacagcaaacgccgacacucugugcauuggcuaucacgcgaauaacagcacggauaccguugacacaguguuggagaaaaauguaacugugacccauuccgucaacuuacuggaagauaagcacaaugggaaacuauguaagcucagaggaguggcuccccugcaucuugguaaaugcaacauagccggcuggauccuggggaauccugagugugaaucuuugucaacagcaaguagcugguccuacauuguugagaccucuucgucagacaacggaacuugcuauccaggcgauuuuaucgacuacgaggagcucagggagcagcugagcaguguguccucuuucgaacgguuugagauuuucccgaagacaagcuccuggcccaaucacgauucaaacaagggugucaccgccgcuuguccucaugcaggggccaaaaguuuuuauaagaaucugaucuggcucgugaaaaagggaaacagcuacccaaaauuaucuaaguccuauauaaaugacaagggcaaagaaguacugguucuuuggggcauccaccaccccucaacgagcgcugaucaacagaguuuguaccagaacgccgacgcguacguguucgucgggacuucucgcuauuccaagaaauuuaagccugagauugcaauccgaccaaaagugcgugaucaggagggaagaaugaauuacuauuggacccugguggaacccggugacaagauuacauucgaggccacuggcaaccuagucguuccuagguacgcuuuugccauggaacggaacgcagggagcggaaucauaauuucggauaccccagugcaugacugcaauacaaccugucaaacgccgaaaggcgcuaucaacacuucucuccccuuccagaauauucacccuaucacaaucgguaagugcccaaaguauguaaaauccaccaagcugcgccuugccacugggcugagaaacgugcccucaauucagaguaggggauuguuuggcgcgauagccggcuucaucgaagggggauggacagguauggucgacggcugguacggguaucaucaccagaaugaacaaggaagcggcuacgcagcugaucucaaauccacccagaacgccauugacaagaucacgaauaaagugaacucuguuauagagaagaugaauacccaguuuacagcuguggguaaggaguucaaccaccuggaaaaacggauugagaauuuaaacaagaaagucgaugacggguuccuggauaucuggacuuacaaugccgaacuccuugugcuguuggagaacgaacgcacccuagacuaucaugauagcaauguaaagaaccuguacgagaaaguucgaagacagcucaagaacaaugcaaaggagaucggcaacggauguuuugaguucuaucacaaaugcgacaauacauguauggaaucagugaagaacggcacuuacgauuauccuaaauacagugaagaggccaagcugaauagggaagagauugacggggucaaacuugaguccacccggaucuaucaaauucuggcuauauacagcacaguggcgucuucauugguccucgugguuagucugggagcaaucagcuuuuggaugugcuccaacgguucuuuacagugccguauuuguaucuga

SEQ ID NO: 134307 - RNA, 1701 nt, Artificial Sequence
  derived and/or modified CDS sequence (opt3) from hemagglutinin__InfluenzaA__ADQ28071
augaaggccauccuggugguccuccuuuacacccuggcuacagcaaacgccgacacuuugugcauuggcuaucacgcgaauaacagcacggauaccguugacacaguguuagagaaaaauguaacugugacccauuccgucaaccugcuagaagauaagcacaaugggaaacucuguaagcugagaggaguggcuccccuucaucuggguaaaugcaacauagccggcuggaucuuggggaauccugagugugaaucucucucaacagcaaguagcugguccuacauuguugagaccucuucgucagacaacggaacuugcuauccaggcgauuucaucgacuacgaggagcugagggagcagcugagcaguguguccucuuuugaacgguucgagauuuuuccgaagacaagcuccuggcccaaucacgauucaaacaagggugucaccgccgcuuguccucaugcaggggccaaaaguuucuauaagaaucucaucugguuagugaaaaagggaaacagcuacccaaaacugucuaaguccuauauaaaugacaagggcaaagaaguacuuguuuuguggggcauccaccaccccucaacgagcgcugaucaacagagucuguaccagaacgccgacgcguacguguuugucgggacuucucgcuauuccaagaaauucaagccugagauugcaauccgaccaaaagugcgugaucaggagggaagaaugaauuacuauuggacccuaguggaacccggugacaagauuacauuugaggccacuggcaaccucgucguuccuagguacgcuuucgccauggaacggaacgcagggagcggaaucauaauuucggauaccccagugcaugacugcaauacaaccugucaaacgccgaaaggcgcuaucaacacuucucugcccuuucagaauauucacccuaucacaaucgguaagugcccaaaguauguaaaauccaccaaacuucgccuggccacuggguugagaaacgugcccucaauucagaguaggggacucuucggcgcgauagccggcuuuaucgaagggggauggacagguauggucgacggcugguacggguaucaucaccagaaugaacaaggaagcggcuacgcagcugaucugaaguccacccagaacgccauugacaagaucacgaauaaagugaacucuguuauagagaagaugaauacccaguucacagcuguggguaaggaguuuaaccacuuagaaaaacggauugagaaucugaacaagaaagucgaugacggguuccucgauaucuggacuuacaaugccgaacuucugguguugcuagagaacgaacgcacccuggacuaucaugauagcaauguaaagaaccucuacgagaaaguucgaucacagcugaagaacaaugcaaaggagaucggcaacggauguuucgaauuuuaucacaaaugcgacaauacauguauggagagugugaagaacggcacuuacgauuauccuaaauacuccgaagaggccaaacuuaauagagaagagauugacggggucaagcuggagagcaccaggaucuaucaaauuuuggcuauauacucuacaguggcgucaagucucguccuggugguuagcuuaggagcaaucuccuucuggaugugcucuaacgguucgcugcagugccggauuuguaucuga

SEQ ID NO: 134308 - RNA, 1701 nt, Artificial Sequence; identical to SEQ ID NO: 131661
  derived and/or modified CDS sequence (opt3) from hemagglutinin__InfluenzaA__ADR32361

SEQ ID NO: 134309 - RNA, 1689 nt, Artificial Sequence
  derived and/or modified CDS sequence (opt3) from hemagglutinin__InfluenzaA__ADT78887
auggcccugaucuaccucauucuucuguucaccagcgugagaggcgaccagauaugcaucggguaucacgcuaacaauuccacagagaaggucgauacuauuuuggaaaggaacguuacggugacccaugcaaaagacaucuuagagaagacacacaauggaaaacuguguaagcuaaacgguauucccccucucgaacugggcgauugcucuaucgccggguggcuucugggaaauccagagugugaccgguugcuccgcguaccggaauggucauacauaauggagaaagagaaccccaaguauagucugugcuacccuggcagcuuuaaugauuaugaggaacugaagcaucucaucuccucugugaaacacuucgaaaaggucaaaauuuuaccaaaggacgguuggacucaacauaccacaaccgggggaucgcgagcgugugcugugucaggcaaccccagcuuuuuccguaauaugguuuggcugacuaaaaagggcccuaacuacccaguggccaaggggaguuauaauaacacauccggagagcagaugcuuaucauuugggguguccaccaccccaaugaugaggcagaacagagagccuuguaccagaaagugggcaccuacguaucugcuagcacguccacucugaacaagaggucaaccccugagaucgcagcccggccagaaguuaaugggcuaggaagucgcauggaguuuagcuggacacuccuggacaugugggauacuauaaacuucgaaucuaccggcaaccuuguggcuccggaguaugguuuuaaaauuuccaagagagggucaagcggagucaugaaaacagagggcacccuggaaaauugcgagacgaagugucaaacucccuugggcgccaucaacacaacccucccuuuccauaaugugcacccacugacuauuggggaaugccccaaauacgugaagagugagaaguuaguccuggcgacaggacucaggaacguuccucagaucgaaucucggggucuuuuuggcgcaaucgccggguucauugagggaggcuggcaggguaugguggacgggugguauggcuaccaucacuccaaugaucagggaagcggcuaugcugccgacaaagagucgacccaaaaggcauuugaugggauaacgaacaaaguaaauucugugaucgaaaagaugaacacccaguucgaggcugucggaaaagaauuuuccaaucuggagaagcgcuuggaaaaccuaaauaagaaaauggaggacgguuuccuggacguguggacauacaacgccgagcuccugguucuuauggaaaaugagcgaacucuggauuuccacgacucaaacgugaagaauuuguaugauaaagucagaaugcagcucagggacaacgugaaggaacugggcaacggguguuuugaguucuaccauaaaugcgaugacgaguguauggauaguguaaagaauggaaccuacgacuauccaaaguacgaagaggaaagcaaauuaaaccggaaugagauuaagggcguuaaacuguccucuauggguguguaucagauccuagcgauauacgccacagucgcagggagccucucacuggcuauuaugauggccggcaucaguuuuuggaugugcuccaacggaagccuucaaugccguaucuguauuuga

SEQ ID NO: 134310 - RNA, 1701 nt, Artificial Sequence
  derived and/or modified CDS sequence (opt3) from hemagglutinin__InfluenzaA__ADT78908
augaaggccaaacugcucauccuucugugcgcuuugagcgcaaccgacgccgauacaauuuguauaggcuaccacgcgaacaauuccacugacacgguggauaccgucuuagagaagaacguuacagugacucauucuguaaaucugcuagaagacucacacaacgggaaacucugcagacugaagggaaaagcuccccuucagcuggguaaguguaauaucgccggcuggguguuggggaacccugagugcgaaagucuccugagcaauagguccuggucuuauauugcagagaccccaaacucggaaaauggaacauguuacccgggcgauuucgccgacuaugaggagcugcgggaacaacucucaagcgucaguuccuuugagcgcuucgaaaucuuucccaaggagcgaucuuggccuaaacauaacaccacucguggugugacagcugcaugcagccacgccagaaaguccucauucuacaaaaauuuaguuuggcugaccgaggcuaacgggaguuauccaaaucuuagcaagucuuacgugaacaaucaggaaaaagaggucuuggugcuguggggaguacaucaccccuccaacauugaagaucagaggacgcuauaucggaaggacaacgccuacguuucaguggucagcaguaauuacaaccgcagauuuacuccugagaucgcgaagaggccaaaagugcgggaucagcccggccgcaugaauuauuacuggacccuccuggaaccuggcgacacaauaaucuucgaggcaacugggaaccuuauugccccaugguaugcuuuugcccugucucgaggaccggguuccggcaucauuaccagcaaugcacccauggaugagugugacacaaagugccaaaccccucagggggcuaucaacucgucuuugccauuccagaauauacaccccgugacgauuggagaauguccuaaauacgucagauccacuaagcucaggaugguuacaggccugcggaacaucccaucaauucagagucgugguuuauuuggggccaucgcgggauucaucgagggcggcuggaccgggaugauggauggaugguaugguuaccaucaccaaaaugaacagggcagcggguaugccgcagaccagaaauccacucagaacgcuauuaauggaauaacaaacaagguaaauucugugaucgagaaaaugaacacccaauuuacggccgugggcaaggaguucaauaagcuggaaaaacgcauggagaaccucaacaagaaagucgacgaugguuuucuugacauuuggaccuacaaugcugaacuguuggugcuacuggagaacgaaagaacacucgauuuccaugacagcaauguuaagaaccuguacgagaaagugaagaaucagcuuaggaacaaugccaaggaacuggggaacggcugcuucgaguuuuaucacaaaugugauaaugagugcauggaaucagucaagaacggaacuuacgacuaucccaaauacagugaggaauccaaguugaaucgggagaaaaucgauggcgugaagcucgagagcauggggguauaucgaauacuggcaauuuacucuaccguugccucaaguuuagugcugcuagucagccucggagcuaucuccuucuggaugugcucuaacgguucgcugcagugucgcaucugcauuuga

SEQ ID NO: 134311 - RNA, 1701 nt, Artificial Sequence
  derived and/or modified CDS sequence (opt3) from hemagglutinin__InfluenzaA__ADT78929
augaaggccaaacugcucauccuucugugcgcuuugagcgcaaccgacgccgauacaauuuguauaggcuaccacgcgaacaauuccacugacacgguggauaccgucuuagagaagaacguuacagugacucauucuguaaaucugcuagaagacucacacaacgggaaacucugcagacugaagggaaucgcuccccuucagcuggguaaauguaauauugccggcuggaucuuggggaacccugagugcgaaagucuccugagcaagagguccuggucuuauauugcagagaccccaaauucggaaaacggaacauguuacccgggcgauuucgccgacuaugaggagcugcgggaacaacucucaagcgugaguuccuuugagcgcuucgaaaucuuucccaaggagcgaucuuggccuaaacauaauauaacccguggugucacugcugcaugcagccacgccgggaaguccucauucuacaaaaacuuacuguggcuuacagagaccaagggaaguuauccaaauuugagcaaaucuuacgugaacaauaaggaaaaggagguucuggugcuauggggcguccaucaccccuccaacaucgaagaucagaaaacgcucuauagaaaggagaaugcuuacgugucaguaguuagcaguaacuacaacaggcgguuuacuccugaaauugccgagcgcccaaaagugagaggccaggcggggaggaugaauuauuacuggacccugcuugagcccggagacacaaucauuuucgaagcaaacgguaaucugaucgccccuugguaugcuuuugccuugucucggggccucggguccggaauaauuacuagcaacgcaucgauggaugagugugacaccaagugccagacaccacaaggcgcuaucaauucuucccugccguuccagaacauucaccccgucaccaucggugaauguccuaaauacgugaagucaacgaaauuacgcauggugacugggcugcgaaauaucccaaguauucagagcagaggacucuuuggcgccauagcgggcuucaucgaagggggauggacagguaugauugauggcugguauggguaccaucaccagaacgaacaaggauccggcuaugccgcagaccagaagucuacccagaaugcuaucaacgguauaacuaauaaggucaacagcguuauugagaaaaugaauacacaguuuaccgccguggggaaggaguucaacaaacuugaaaagaggauggagaaucugaacaaaaagguagaugacggcuuuuuggacaucuggacguacaacgcugaacuacuggugcuccuggagaaugaacggacccuugauuuccaugacucaaacgucaagaaucuguacgagaaagugaagaaccaauugcguaauaacgccaaagagaucggaaauggcugcuucgaauuuuaucacaaguguaacaaugagugcauggaaaguguuaaaaacgggacauacgauuaucccaaguacuccgaggagagcaagcucaaucgcgagaaaauugacggagugaagcuggagucuaugggugucuaucagaucuuagcaauuuacucaacuguggccaguagccugguacuacucguuucccugggcgcuauaucuuucuggaugugcucgaacgggagccuucaguguagaaucugcauuuga

SEQ ID NO: 134312 - RNA, 1701 nt, Artificial Sequence
  derived and/or modified CDS sequence (opt3) from hemagglutinin__InfluenzaA__ADT78936
augaaggccaaacugcucgugcuucugugcgcuuugagcgcaaccuacgccgacacaaucuguauuggcuaucacgcgaacaauuccacugauacggucgacaccguuuuagagaagaacgugacaguaacucauucugugaaucugcuagaagauucacacaacgggaaacucugcagacugaagggaaaagcuccccuucagcuggguaaguguaauauagccggcuggaucuuggggaacccugagugcgaaagucuccugagcaagagguccuggucuuacauugcagagaccccaaauucggaaaacggaacauguuauccgggcgacuucgccgauuacgaggagcugcgggaacaacucucaagcgucaguuccuuugagcgcuucgaaaucuuucccaaagagucuagcuggccuaagcauaauaccacucgaggugugacagcugcaugcucccacgcccguaaaucaaguuucuauaagaacuuacuguggcuuaccgaggcuaaugggagcuacccaaacuugucuaaauccuauguuaauaaccaggaaaaggaggugcugguccuauggggagugcaucaccccucaaauauugaagaccagagaacgcucuacaggaaggagaacgccuacguaagcguugugaguucuaacuauaaucggcgcuuuacuccugaaaucgcggagagaccaaaagucaggaaccaggcaggccggaugaauuacuauuggacccugcuugagcccggcgauacaauaaucuucgaagccaacgggaaucugauugcuccuugguacgccuuugcauugucccgcggacucgguagcggcaucauuacuucgaacgcuucuauggacgagugugauaccaagugccaaacaccacagggggccaucaauuccucacugccguuccagaacauacaccccgugaccauuggagaauguccuaaauaugugaagaguacgaaauuacgaauggucacuggccugagaaauaucccaagcauucaguccaggggucucuuuggggcgaucgccggauucaucgagggcggcuggacagggaugauggacggaugguacgguuaucaucaccaaaacgaacagggcucuggguacgcagcugaucaaaagagcacccagaaugccauuaacggaauaacuaauaaaguuaacucagugaucgagaagaugaauacacaguuuaccgcuguaggcaaggaguucaacaaacuugaaaagcggauggagaaccugaauaaaaagguggacgauggguuuuuggacauuuggacguacaacgccgaacuacugguccuccuggagaaugaacguacccuugacuuccaugauaguaacgugaaaaaucuguaugagaagguuaagaaccaguugcgcaauaacgcaaaagagcucgguaauggcugcuucgaauuuuaccacaagugugacaacgagugcauggaauccgugaaaaauggaacauaugauuaccccaaguauagcgaggagucuaaacugaacagagaaaagaucgacggcgucaaguuagagucaauggggguguacaggauacuggccauuuauaguacuguagcuagcucccuaguucuccuggugucucuuggagcgaucucguucuggaugugcagcaaugguuccuugcagugucggaucugcauuuga

SEQ ID NO: 134313 - RNA, 1689 nt, Artificial Sequence
  derived and/or modified CDS sequence (opt3) from hemagglutinin__InfluenzaA__ADT78961
auggccaucauuugccugauacuccuuuucaccgcugugagaggcgaccagaucuguauuggguaccacgcaaacaauagcacagagaaggucgauacuauccuggaaaggaacguuacggugacccaugccaaagacauuuuggagaagacacacaauggaaaauuaugcaagcugaacgguaucccaccucuagaacucggcgauuguuccauagcgggguggcugcuuggaaauccagagugcgaccggcuguugucuguaccggaauggucauauaucauggagaaagagaacccccgcgauggccucuguuacccugguaguuuuaaugacuaugaggagcugaagcaucugcucagcuccgugaagcacuucgaaaaagucaagauuuuacccaaaaaccgauggacucaacauaccacaaccgggggaucucgugcuugcgccgugucgggcaaucccucauuuuucagaaacaugguuuggcugacuaagaaaggcagcaauuacccuguggcaaaggggaguuauaacaauacauccggagagcagaugcuuaucauuugggguguccaccacccaaacgaugagaccgaacagaggacguuguaccagaauguggagacuuauguaucuguuagcaccuccacacugaacaagcggucaacucccaaaaucgccacccgcccugaagugaacggccuagggaguagaauggaguuuagcuggacacuccuggacaugugggauaccauaaauuucgaaucuacgggaaaccuuauugcuccagaguacggcuuuaagaucuccaaaagggguucaagcgggauuaugaagacugagggaacacuggaaaauugugagaccaaaugccaaacuccguugggcgcaaucaacacaacccuccccuuccauaauguccacccucugacgaucggcgaauguccaaaguacgugaaaagugagaaguuagugcuggccaccgggccccggaacgucccucagauugaaucucgcggacucuuuggugcuauagccggcuucaucgaagggggauggcagggcaugguugacgguugguauggguaccaucacuccaaugaucagggcagcggauaugcggcagacaaggagucgacacaaaaagccuuugauggcauuacuaacaagguaaauucugugaucgagaaaaugaacacccaguucgaagcuguggggaaggaauuuuccaaucuugagcgaagacuggaaaacuugaauaaaaagauggaggacggauuccuagacgucuggacauacaacgccgagcugcucgugcugauggaaaaugagaggacucuugauuuccacgacucaaacguuaagaaccuguaugauaaagugcggaugcaguugcgugacaaugucaaggaacucgguaacggcugcuuugaguucuaccauaaaugugaugacgagugcaugaauagugugaagaacgggaccuaugauuacccaaaauacgaagaggaaagcaagcugaaucgcaacgagauaaagggaguaaaauuauccucuaugggcguuuaucagauucuggugaucuacgcaacagucgcugguagccuaucacucgccaucaugauggcggggauuaguuuuuggaugugcuccaauggcagccugcaauguagaaucugcauuuga

SEQ ID NO: 134314 - RNA, 1701 nt, Artificial Sequence; identical to SEQ ID NO: 128812
  derived and/or modified CDS sequence (opt3) from hemagglutinin__InfluenzaA__ADT78971

SEQ ID NO: 134315 - RNA, 1701 nt, Artificial Sequence; identical to SEQ ID NO: 128353
  derived and/or modified CDS sequence (opt3) from hemagglutinin__InfluenzaA__ADT79010

SEQ ID NO: 134316 - RNA, 1701 nt, Artificial Sequence; identical to SEQ ID NO: 128812
  derived and/or modified CDS sequence (opt3) from hemagglutinin__InfluenzaA__ADT79030

SEQ ID NO: 134317 - RNA, 1701 nt, Artificial Sequence; identical to SEQ ID NO: 129390
  derived and/or modified CDS sequence (opt3) from hemagglutinin__InfluenzaA__ADT79050

SEQ ID NO: 134318 - RNA, 1701 nt, Artificial Sequence
  derived and/or modified CDS sequence (opt3) from hemagglutinin__InfluenzaA__ADT79108
augaaggccagacugcucauccuucugugcgcuuugagcgcaaccgacgccgauacaauuuguauaggcuaccacgcgaacaauuccacugacacgguggauaccgucuuagagaaaaacguuacagugacucauucuguaaaucugcuagaagacucacacaacgggaagcucugcaggcugaaaggaaucgcuccccuucagcuggguaaguguaauauugccggcuggaucuuggggaacccugagugcgaaagucuccugagcaaucgguccuggucuuauauugcagagaccccaaacucggaaaauggaacauguuacccgggcgauuucgccgacuaugaggagcugcgcgaacaacucucaagcgugaguuccuuugagcgauucgaaaucuuucccaaagagcguucuuggccuaagcauaacauaaccagaggugucacugcugcaugcagccacgccaagaaauccucauucuacaagaauuuacuguggcuuacagaggcuaacgggaguuauccaaauuugaucaaaagcuacgugaacaauaaggaaaaagagguucuggugcuauggggaguccaucaccccucuaacauugaagaucagaggacccucuaucggaaggagaacgccuacguguccguaguuucaagcaauuacaaccgcagauuuacgccugaaaucgcggagaggccaaaggugcggggccaggcaggccgcaugaauuauuacuggacucugcuugagcccggggacaaaauuaucuucgaagccaacggaaaucugauagcuccuugguaugccuuugcauugagucgaggucucggcucugggauuaucaccuccaacgcuagcauggaugagugugacacaaagugccagacuccacaaggagccauuaauucgucucugccguuccagaacauccaccccgucaccaucggcgaauguccuaaauacgugagauccacaaaguuaaggauggugaccggucugcggaauauuccaucaauacagagucgugggcucuuuggagcgaucgccggcuucauugagggcggguggacgggaauggucgaugguugguauggcuaccaucaccagaacgaacaagggagcggauaugcagcugaccagaaauccacucagaaugccaucaacggcauaacaaauaagguuaacucugugauugagaaaaugaauacccaguuuacugcuguagguaaggaguucaacaaacuugaaaaacgcauggagaaccugaauaagaaaguggaugacggguuuuuggacaucuggacauacaacgccgaacuacugguccuccuggagaaugaaagaacccuugauuuccaugacagcaacgugaagaaucuguacgagaaaguuaagaaccaauugaggaauaacgcaaaggagaucggcaauggaugcuucgaauuuuaucacaaaugugauaacgagugcauggaaucagugaagaauggcacguacgacuaucccaaauacagugaggaguccaagcucaaccgggaaaagauugauggggucaagcuggagagcaugggaguguaucagaucuuagccauuuacucuaccguagcuucaagucugguucuacucgugagccugggugcgauauccuucuggaugugcucuaauggcucgcuucagugucgaaucugcauuuga

SEQ ID NO: 134319 - RNA, 1689 nt, Artificial Sequence
  derived and/or modified CDS sequence (opt3) from hemagglutinin__InfluenzaA__ADT79119
auggccaucauuuaccugauacuccuuuucaccgcugugagaggcgaccagaucugcauuggguaucacgcaaacaauagcacagagaaggucgauacuauccuggaaaggaacguuacggugacccaugccaaagacauuuuggagaagacacacaauggaaaauuauguaagcugaacgguauacccccucuagaacucggcgauugcuccaucgcgggguggcugcuuggaaauccagagugugaccggcuguugucuguaccggaauggucauacaucauggagaaagagaacccccgcgauggccucugcuauccugguaguuuuaaugacuacgaagaacugaagcaucugcucagcuccgugaagcacuucgaaaaagucaagauuuuaccaaaagaucgauggacucaacauaccacaaccgggggaucucgugcuugugccgugucgggcaaccccucauuuuucagaaauaugguuuggcugacuaagaaaggcagcaacuauccuguggcaaaggggaguuacaauaacacauccggagagcagaugcuuaucauuugggguguccaccacccaaaugacgagaccgaacagaggacguuguaucagaacgugggcacuuacguaucuguugggaccagcacacugaauaagcgguccacucccgauaucgccacccgcccuaaagugaacggacuaggcgguagaauggaguuuucauggacacuccuggacaugugggauaccauaaacuucgaaaguacggggaaucuuauugcuccagaguacggauuuaagaucagcaaaagggggucuuccggcauuaugaagacugaaggcacacugggaaacugcgagaccaaaugucaaacuccguugggugcaaucaauacaacccuccccuuccauaacguccacccucugacgaucggcgagugcccaaaguaugugaaaucagaaaaguuagugcuggccaccgggcuccggaaugucccccagauugagagccgcggacuuuuuggcgcuauagccgguuucaucgaagggggcuggcagggaaugguugacggcugguacggguaucaucacaguaacgaucagggaucugguuacgcggcagacaaggaguccacacaaaaagccuuugacggcauuacuaauaaggugaacagcguaaucgagaaaaugaauacccaguucgaggcuguggggaaggaguuuucgaaccuggaacgaagauuggagaaucuaaacaaaaagauggaagauggauuccuggacgucuggacauauaaugccgagcuccuggugcuuauggaaaacgagaggacucuggauuuccacgacucuaauguuaagaacuuguacgauaaagugcggaugcagcuccgugacaacgucaaggagcugggcaaugguuguuuugaguucuaucauaaaugcgaugacgaauguaugaacuccgugaagaaugggaccuacgauuacccuaaauaugaagaggagucaaaguuaaaccgcaaugaaauaaagggcguaaaacugaguagcaugggaguuuaccagauucuagcaaucuaugcuacaguggccggcucccucucucuggcgaucaugauggccgggauuagcuuuuggaugugcucaaacggaagucuucaaugcagaaucuguauuuga

SEQ ID NO: 134320 - RNA, 1689 nt, Artificial Sequence
  derived and/or modified CDS sequence (opt3) from hemagglutinin__InfluenzaA__ADT79129
auggccaucauuuaccugauacuccuuuucaccgcugugagaggcgaccagaucugcauuggguaucacgcaaacaauagcacagagaaggucgauacuauccuggaaaggaacguuacggugacccaugccaaagacauuuuggagaagacacacaauggaaaauuauguaagcugaacgguauacccccucuagaacucggcgauugcuccaucgcgggguggcugcuuggaaauccagagugugaccggcuguugcgcguaccggaauggucuuacaucauggagaaagagaacccccgagauggccucugcuauccugguucauuuaaugacuacgaggaacugaagcaucugcucaguagcgugaagcacuucgaaaaagucaagauuuuaccaaaagaucguuggacucaacauaccacaaccgggggauccagagcuugugccgugucuggcaaccccucguuuuucaggaauaugaucuggcugacuaagaaaggcucaaacuauccuguugcaaaggggagcuacaauaacacaaguggagagcagaugcuuauuaucuggggugugcaccacccaaaugacgagaccgaacagcggacguuguaucagaacgucggcacuuacguguccguaguuaccucuacacugaauaagcgcagcacucccaaaauagccaccagaccuaaggugaacgggcuaggaggcaggauggaguuuuccuggacacuccuggauaugugggacaccauuaacuucgaaucaacggguaaucuuaucgcuccagaguacggguuuaaaauuaguaagcggggaagcucuggcaucaugaaaacugaaggcacacuggagaacugcgagaccaagugucaaacuccguugggggcaaucaauacaacccuccccuuccauaacguccacccucuggccauuggagaaugcccaaaauaugugaaguccgagaaguuagugcuggcuacgggucuccgcaaugucccccagauagaaucacgaggccuuuuuggggccaucgcgggauucauugagggcgguuggcaggggaugguugauggcugguacggauaucaucacagcaacgaccagggcaguggguacgcagccgauaaagaaucuacccaaagagcuuuugacggaaucacaaauaaggugaacuccguaauagagaaaaugaauacucaguucgaggccguggguaaggaauuuagcaaccuggagaggcgguuggaaaaucuaaacaaaaagauggaggacggcuuccuggaugucuggaccuauaaugcagaacuccuggugcuuauggagaacgagcguacacuggacuuccacgauucgaauguuaagaacuuguacgacaaagugcgcaugcagcucagagauaacgucaaggaacuggggaauggauguuuugaguucuaucauaaaugcgacgaugaauguaugaacucugugaagaauggcacuuacgacuacccuaaauaugaggaggaauccaaguuaaacaggaaugagauuaaggguguaaaacugucaaguauggggguuuaccagauccuagcuaucuaugccaccguggcgggcagccucucccuggccauuaugauggcaggaaucucuuuuuggaugugcagcaacggcucacuucaaugccggauuuguauauga

SEQ ID NO: 134321 - RNA, 1701 nt, Artificial Sequence
  derived and/or modified CDS sequence (opt3) from hemagglutinin__InfluenzaA__ADT79232
augaaggccauccuggugguccuccuuuacaccuucgcuacagcaaacgccgacacucugugcauuggcuaucacgcgaauaacagcacggauaccguugacacaguguuggagaaaaauguaacugugacccauuccgucaacuuacuggaagauaagcacaaugggaaacuauguaagcucagaggaguggcuccccugcaucuugguaaaugcaacauagccggcuggauccuggggaauccugagugugaaucuuugucaacagcaaguagcugguccuacauuguugagaccucuucgucagacaacggaacuugcuauccaggcgauuuuaucgacuacgaggagcucagggagcagcugagcaguguguccucuuucgaacgguuugagauuuucccgaagacaagcuccuggcccaaucacgauucaaacaagggugucaccgccgcuuguccucaugcaggggccaaaaguuuuuauaagaaucugaucuggcucgugaaaaagggaaacagcuacccaaaauuaucuaaguccuauauaaaugacaagggcaaagaaguacugguucuuuggggcauccaccaccccucaacgagcgcugaucaacagaguuuguaccagaacgccgacgcguacguguucgucgggucuucccgcuauagcaagaaauuuaagccugagauugcaauccgaccaaaagugcgugaucaggagggaagaaugaauuacuauuggacucugguggaacccggugacaagauuaccuucgaggccacaggcaaccuagucguuccuagguacgcuuuugccauggaacggaacgcagggucgggaaucauaauuucugauacuccagugcaugacugcaauaccacaugucaaaccccgaaaggcgcuaucaacacgucccuccccuuccagaauaagcacccuauuacuaucgguaagugcccaaaauauguaaagucaacaaaacugcgccuugccaccgggcugagaaacgugcccaguauccagagcaggggauuguuuggcgcgauugccggcuucauagaagggggauggacugguauggucgacggcugguacggguaucaucaccagaaugaacaaggauccggcuacgcagcugaugugaagucuacacagaacgccaucgacgagauuaccaauaaaguuaacagcgugaucgagaagaugaauacgcaguuuaccgcugucgguaaggaguucaaccaccucgaaaaacggauagaaaaucugaacaagaaaguggaugacggguucuuagauauuuggacauacaaugccgagcugcucguacuucuggaaaacgagcgcacuuuggacuaucaugauucaaauguuaagaaccuauacgagaaagugcgaagucagcugaagaacaaugcaaaggaaaucggcaacggauguuuugaguucuaucacaaaugcgacaauaccuguauggaauccgucaagaacggcacauacgauuauccuaaauacagcgaggaagccaagcucaauagagaggagaucgacggggugaaacuggaaucuacuaggauuuaucaaauccuugcuauuuacucaaccgucgcgaguagccugguguugguugugucccucggagcaauaucuuuuuggaugugcucgaacgguagccugcagugccggaucuguauuuga

SEQ ID NO: 134322 - RNA, 1701 nt, Artificial Sequence
  derived and/or modified CDS sequence (opt3) from hemagglutinin__InfluenzaA__ADT79242
augaaggccauccuggugguccuccuuuacaccuucgcuacagcaaacgccgacacucugugcauuggcuaucacgcgaauaacagcacggauaccguugacacaguguuggagaaaaauguaacugugacccauuccgucaacuuacuggaagauaagcacaaugggaaacuauguaagcucagaggaguggcuccccugcaucuugguaaaugcaacauagccggcuggauccuggggaauccugagugugaaucuuugucaacagcaaguagcugguccuacauuguugagaccccaucuucggacaacggaacuugcuauccgggcgauuuuaucgacuacgaggagcucagggagcagcugucaagcgugaguuccuucgaacgguuugagauuuuccccaagacaucuagcuggccuaaucacgauuccaacaagggugucaccgccgcuuguccacaugcaggggccaaaucauuuuauaagaaucugaucuggcucgugaaaaagggaaacaguuaccccaaauuaagcaagucuuauauaaaugacaagggcaaagaaguacugguucuuuggggcauccaccacccuuccacgucagcugaucaacagagcuuguaccagaacgccgacgcguacguguucgucgggaguucucgcuauuccaagaaauuuaagccagagauugcaauccgacccaaagugcgugaucaggagggaagaaugaauuacuauuggacucugguggaaccuggugacaagauuaccuucgaggccacaggcaaccuagucguuccaagguacgcuuuugccauggaacggaacgcagggagcggaaucauaauuucggauacuccggugcaugacugcaauaccacaugucaaacccccaaaggcgcuaucaacacgucucucccuuuccagaauauucacccaaucacuaucgguaagugccccaaguauguaaaauccacaaagcugcgccuugccaccgggcugagaaacgugccuucaauucagaguaggggauuguuuggcgcgauagccggcuucaucgaagggggauggacugguauggucgacggcugguacggguaucaucaccagaaugaacaaggaagcggcuacgcagcugaucucaaauccacacagaacgccauugacgagaucaccaauaaggugaacucuguuauagagaaaaugaauacgcaguuuaccgcuguggguaaggaguucaaccaccuggaaaagcggauugaaaauuuaaacaaaaaggucgaugacggguuccuggauaucuggacauacaaugccgagcuccuugugcuguuggaaaacgagcgcacucuagacuaucaugauagcaauguaaagaaccuguacgagaagguucgaucacagcucaaaaacaaugcaaaggaaaucggcaacggauguuuugaguucuaucacaagugcgacaauaccuguauggaaagugugaaaaacggcacauacgauuauccaaaguacuccgaggaagccaaacugaauagagaggagauugacggggucaaacuugaaagcacuaggaucuaucaaauucuggcuauauacucuaccguggcgucaaguuugguccucgugguuagccugggagcaaucuccuuuuggaugugcucuaacgguucguuacagugccggauuuguaucuga

SEQ ID NO: 134323 - RNA, 1701 nt, Artificial Sequence
  derived and/or modified CDS sequence (opt3) from hemagglutinin__InfluenzaA__ADT91182
augaaggccauccuggugguccuccuuuacaccuucgcuacagcaaacgccgacacucugugcauuggcuaucacgcgaauaacagcacggauaccguugacacaguguuggagaaaaauguaacugugacccauuccgucaacuuacuggaagauaagcacaaugggaaacuauguaagcucagaggaguggcuccccugcaucuugguaaaugcaacauagccggcuggauccuggggaauccugagugugaaccauugucuacagcaucaaguuggagcuacauuguugagaccuccucuucggacaacggaacuugcuauccgggcgauuuuaucgacuacgaggagcucagggagcagcugucaagcgugaguuccuucgaacgguuugagauuuuccccaagacaucuagcuggccuaaucacgauuccaacaagggugucaccacggccuguccacaugcuggggcaaaaucauuuuauaagaaucugaucuggcucgugaaaaagggaaacaguuaccccaaauuaagcaagucuuauauaaaugacaagggcaaagaaguacugguucuuuggggcauccaccacccuccaacuuccgccgaucaacagucauuguaccagaacgcugacgccuacguguucgucgggaccagccgcuauaguaagaaauuuaagcccgagauugcgauccgaccuaaagugcgugaucaggagggaagaaugaauuacuauuggacacugguggaaccaggugacaagauuacuuucgaggcaaccggcaaccuagucguuccgagguacgccuuugcuauggaacggaacgccgggucuggaaucauaauuuccgauacacccgugcaugacugcaauaccacgugucaaacuccuaaaggcgcaaucaacacaagccucccauuccagaauauucaccccaucaccaucgguaagugcccuaaguauguaaaaucgacuaagcugcgccuugcuacagggcugagaaacgugccaucuauucaguccaggggauuguuuggcgccauagcgggcuucaucgaagggggauggaccgguauggucgacggcugguacggguaucaucaccagaaugaacaaggaucaggcuacgccgcagaucucaaaaguacgcagaacgcuauugacgguaucaccaauaaggugaacagcguuauagagaaaaugaauacacaguuuacugccguggggaaggaguucaaccaccuggaaaagcggauugagaauuuaaacaaaaaggucgaugacggcuuccuggauaucuggaccuacaaugcugaacuccuugugcuguuggagaacgaacgcacacuagacuaucaugauuccaauguaaagaaccuguacgagaagguucgaucucagcucaaaaacaaugccaaggagaucggaaacggcuguuuugaguucuaucacaagugcgacaauacuuguauggaaagcgugaaaaacgggaccuacgauuaucccaaguacucagaagaggcaaaacugaauagagaagagauugacggagucaaacuugagaguacaaggaucuaucaaauucuggccauauacuccaccguggcuagcucuuugguccucgugguuucacugggugcgaucaguuuuuggaugugcagcaacggcuccuuacagugccggauuuguaucuga

SEQ ID NO: 134324 - RNA, 1701 nt, Artificial Sequence
  derived and/or modified CDS sequence (opt3) from hemagglutinin__InfluenzaA__ADU20561
augaaggccauccuggugguccuccuuuacaccuucgcuacagcaaacgccgacacucugugcauuggcuaucacgcgaauaacagcacggauaccguugacacaguguuggagaaaaauguaacugugacccauuccgucaacuuacuggaagauaagcacaaugggaaacuauguaagcucggagguguggcuccccugcaucuuggcaaaugcaacauagccggguggauccugggaaauccugagugugaaucuuugucaacagcaaguagcugguccuacauuguugagaccucuucgucagacaacggcacuugcuauccaggugauuuuaucgacuacgaagaacucagagagcagcugagcaguguguccucuuucgaaagguuugagauuuucccgaagacaagcuccuggcccaaucacgauucaaacaagggggucaccgccgcuuguccucaugcaggagccaaaaguuuuuauaagaaucugaucuggcucgugaaaaagggcaacagcuacccaaaauuaucuaaguccuauauaaaugacaagggcaaagaaguacugguucuuugggggauccaccaccccucaacgagcgcugaucaacagaguuuguaccagaacgccgacgcguacguguucgucggaacuucucgguauuccaagaaauuuaagccugagauugcaauccgcccaaaagugcgagaucaggagggucguaugaauuacuauuggacccugguggaacccggcgacaagauuacauucgaggccacugggaaccuagucguuccuagauacgcuuuugccauggaaaggaacgcaggaagcggcaucauaauuucggauaccccagugcaugacugcaauacaaccugucaaacgccgaaaggugcuaucaacacuucucuccccuuccagaauauucacccuaucacaaucgggaagugcccaaaguauguaaaauccaccaagcugcggcuugccacuggacugcgcaacgugcccucaauucagaguagaggcuuguuuggcgcgauagccggguucaucgagggagguuggacaggcauggucgacgggugguacggauaucaucaccagaaugaacaaggcagcgguuacgcagcugaucucaaauccacccagaacgccauugacaagaucacgaauaaagugaacucuguuauagagaagaugaauacccaguuuacagcuguggggaaggaguucaaccaccuggagaaaaggauugagaauuuaaacaagaaagucgaugacggcuuccuggauaucuggacuuacaaugccgaacuccuugugcuguuggagaacgaacggacccuagacuaucaugauagcaauguaaagaaccuguacgagaaaguucgcucacagcucaagaacaaugcaaaggagaucggaaacggcuguuuugaguucuaucacaaaugcgacaauacauguauggaaagugugaagaacgggacuuacgauuauccuaaauacuccgaagaggccaagcugaaucgagaagagauugacggagucaaacuugagagcaccagaaucuaucaaauucuggcuauauacucuacaguggcgucaaguuugguccucgugguuagccugggugcaaucuccuuuuggaugugcucuaacggcucguuacagugcaggauuuguaucuga

SEQ ID NO: 134325 - RNA, 1701 nt, Artificial Sequence
  derived and/or modified CDS sequence (opt3) from hemagglutinin__InfluenzaA__ADU20562
augaaggccauccuggugguccuccuuuacaccuucgcuacagcaaacgccgacacucugugcauuggcuaucacgcgaauaacagcacggauaccguugacacaguguuggagaagaauguaacugugacccauuccgucaacuuacuggaagauaagcacaaugggaaacuauguaagcucagaggaguggcuccccugcaucuugguaaaugcaagauagccggcuggauccuggggaacccugagugugaaucuuugucaacagcaaguagcugguccuacauuguugagaccucuucgucagacaauggaacuugcuauccaggcgauuuuaucgacuacgaggagcucagggagcagcugagcaguguguccucuuucgaacgguuugagauuuucccgaagacaagcuccuggcccaaccacgauucaaauaaaggugucaccgccgcuuguccucaugcaggggccaagaguuuuuauaaaaaccugaucuggcucgugaagaaaggaaauagcuacccaaaguuaucuaaguccuauauaaacgacaaaggcaaggaaguacugguucuuuggggcauccaccaccccucaacgagcgcugaucaacagaguuuguaccagaaugccgacgcguacguguucgucgggacuucucgcuauuccaaaaaguuuaaaccugagauugcaauccgaccaaaggugcgugaucaggagggaagaaugaacuacuauuggacccugguggaacccggugacaaaauuacauucgaggccacuggcaaucuagucguuccuagguacgcuuuugccauggaacggaacgcagggagcggaaucauaauuucggauaccccagugcaugacugcaacacaaccugucaaacgccgaagggcgcuaucaauacuucucuccccuuccagaacauucacccuaucacaaucgguaagugcccaaaauauguaaaguccaccaaacugcgccuugccacugggcugagaaaugugcccucaauucagaguaggggauuguuuggcgcgauagccggcuucaucgaagggggauggacagguauggucgacggcugguacggguaucaucaccagaacgaacaaggaagcggcuacgcagcugaucucaaguccacccagaaugccauugacaaaaucacgaacaagguaaauucuguuauagagaagaugaacacccaguuuacagcuguggguaaagaguucaaucaccuggaaaagcggauugagaacuuaaauaaaaaggucgaugacggguuccuggauaucuggacuuacaacgccgaacuccuugugcuguuggagaaugaacgcacccuagacuaucaugauagcaacgugaaaaaucuguacgagaagguucgaucacagcucaagaacaacgcaaaagagaucggcaauggauguuuugaguucuaucacaagugcgacaacacauguauggaaagugugaaaaauggcacuuacgauuauccuaaguacuccgaagaggccaaacugaacagagaagagauugacggggucaaacuugagagcaccaggaucuaucaaauucuggcuauauacucuacaguggcgucaaguuugguccucgugguuagccugggagcaaucuccuuuuggaugugcucuaaugguucguuacagugccggauuuguaucuga

SEQ ID NO: 134326 - RNA, 1701 nt, Artificial Sequence
  derived and/or modified CDS sequence (opt3) from hemagglutinin__InfluenzaA__ADU25478
auggaggccaagcuguucgugcucuuuugcgcuuucaccgcacuuaaagccgacacaaucugugucggcuaccacgcgaacaauagcacugauacgguugacaccauucuggaaagaaacgugacaguaacucauuccgugaauuuguuagagucuucacacaacgggaagcugugcagucuaaauggaaaagcuccccuccagcuggguaacuguaaugucgccggcuggauacuugggaacccugaaugcgaucuguugcucaccgugaauagcugguccuauaucauugagacaucuaccucgaagaacggagcauguuacccaggcgaauuugccgacuaugaggagcugagggaacaacugucaacuguuagcaguuucgagcgguuugaaaucuucccgaaagcuacauccuggcccaaucaugagaccacgaaggguacuaccguggcaugcucucacagcggggccaacuccuuuuaccgcaaucucuuauggauugucaagaaaggaaacucauauccuaagcugaguaaaagcuacacaaauaacaagggcaaagaggugcuuguaaucuggggcguucaucacccacccacugauucugaccagcagaccuuguaucagaacaaucacacauacguguccgucgggucaagcaaguacuaucaacgauucaccccugaaauagugacgcguccaaaggugagagagcaggcuggaaggaugaacuacuauuggacucugcuagaucagggugacacaaucaccuuugaagccacuggcaaucucauugcgcccuggcaugcauucgcccugaacaaagggaguucuuccggaaucaugaugagcgaugcucacguccauaauuguacaaccaagugccagacgccucacggcgcccuuaaaucgaaccugccauuucaaaauguucacccgauuaccaucggugagugucccaaguacgugaaaucuacacaguugcggauggcaacugggcuccgcaacauaccuuccauucagucaagaggacuguucggcgcuaucgccggcuuuauugaagggggauggaccgguaugaucgacggcugguauggguaccaucaccagaaugagcaaggaaguggcuaugcggccgaucaaaagagcacacagaucgcaauugacgguauauccaacaaaguaaauucugugaucgagaagaugaacguccaguucacuagcguggggaaggaauuuaauaacuuagagaaaaggauugaaaaucugaacaagaaaguugaugacggcuuccucgacaucuggaccuacaacgcugagcuucugauauugcuagaaaaugagcggacacuggauuuccaugacuuuaacgugaagaaucucuacgagcgcgucaaaucacagcugcgaaacaaugccaaggaaauuggaaacggcugcuucgaguuuuaucacaaguguaauaacgaaugcauggagagugugaaaaaugggaccuacaacuauccaagauacuccgaagagagcaaacuuaauagggaggaaaucgauggaguaaagcuggagucuguuggugugcaucagaucuuggcuauuuauucaacugucgccaguagccucgugcuguuagucucccugggcgcaaucucuuucuggaugugcucgaacgggagccuacagugucggauuugcauauga

SEQ ID NO: 134327 - RNA, 1701 nt, Artificial Sequence
  derived and/or modified CDS sequence (opt3) from hemagglutinin__InfluenzaA__ADU59558
augaaggccauccuggugguccuccuuuacaccuucgcuacagcaaacgccgacacucugugcauuggcuaucacgcgaauaacagcacggauaccguugacacaguguuggagaaaaauguaacugugacccauuccgucaacuuacuggaagauaagcacaaugggaaacuauguaagcucagaggaguggcuccccugcaucuugguaaaugcaacauagccggcuggauccuggggaauccugagugugaaucuuugucaacagcaaguagcugguccuacauuguugagaccucuucgucagacaacggaacuugcuauccaggcgauuuuaucgacuacgaagaacucagggagcagcugagcaguguguccucuuucgaacgguuugagauuuucccgaagacaagcuccuggcccaaucacgauucaaacaagggugucaccgccgcuuguccucaugcaggggccaaaaguuuuuauaagaaucugaucuggcucgugaaaaagggaaacagcuacccaaaauuaucuaaguccuauauaaaugacaagggcaaagaaguacugguucuuuggggcauccaccaccccucaacgagcgcugaucaacagaguuuguaccagaacgccgacgcguacguguucgucgggacuucucgcuauuccaagaaauuuaagccugagauugcaauccgaccaaaagugcguggacaggaggguagaaugaauuacuauuggacccugguggaacccggcgauaagauuacauucgaggccacugggaaccuagucguuccuagguacgcuuuugccauggaacggaacgcaggaagcggcaucauaauuucggacaccccagugcaugauugcaauacaaccugucaaacgccgaaaggugcuaucaacacuucucuccccuuccagaauauucacccuaucacaaucgggaagugcccaaaguauguaaaauccaccaagcugcgccuugccacuggacugagaaacgugcccucaauucagaguaggggcuuguuuggcgcgauagccggguucaucgagggagguuggacaggcauggucgacgggugguacggauaucaucaccagaaugaacaaggcagcgguuacgcagcugaccucaaauccacccagaacgccauugauaagaucacgaauaaagugaacucuguuauagagaagaugaauacccaguuuacagcuguggggaaggaguucaaccaccuggaaaaacggauugagaauuuaaacaagaaagucgacgauggcuuccuggacaucuggacuuacaaugccgaacuccuugugcuguuggagaacgaacgcacccuagauuaucaugacagcaauguaaagaaccuguacgagaaaguucgaucacagcucaagaacaaugcaaaggagaucggaaacggcuguuuugaguucuaucacaaaugcgauaauacauguauggagagugugaagaacgggacuuacgacuauccuaaauacuccgaagaggccaagcugaauagagaagagauugauggagucaaacuugagagcaccaggaucuaucaaauucuggcuauauacucuacaguggcgucaaguuugguccucgugguuagccugggugcaaucuccuuuuggaugugcucuaacggcucguuacagugccggauuuguaucuga

SEQ ID NO: 134328 - RNA, 1701 nt, Artificial Sequence; identical to SEQ ID NO: 130717
  derived and/or modified CDS sequence (opt3) from hemagglutinin__InfluenzaA__ADU59579

SEQ ID NO: 134329 - RNA, 1701 nt, Artificial Sequence; identical to SEQ ID NO: 130717
  derived and/or modified CDS sequence (opt3) from hemagglutinin__InfluenzaA__ADU59590

SEQ ID NO: 134330 - RNA, 1701 nt, Artificial Sequence; identical to SEQ ID NO: 130717
  derived and/or modified CDS sequence (opt3) from hemagglutinin__InfluenzaA__ADU59601

SEQ ID NO: 134331 - RNA, 1701 nt, Artificial Sequence; identical to SEQ ID NO: 130717
  derived and/or modified CDS sequence (opt3) from hemagglutinin__InfluenzaA__ADU59612

SEQ ID NO: 134332 - RNA, 1701 nt, Artificial Sequence; identical to SEQ ID NO: 130717
  derived and/or modified CDS sequence (opt3) from hemagglutinin__InfluenzaA__ADU59768

SEQ ID NO: 134333 - RNA, 1701 nt, Artificial Sequence; identical to SEQ ID NO: 130717
  derived and/or modified CDS sequence (opt3) from hemagglutinin__InfluenzaA__ADU59769

SEQ ID NO: 134334 - RNA, 1701 nt, Artificial Sequence; identical to SEQ ID NO: 130717
  derived and/or modified CDS sequence (opt3) from hemagglutinin__InfluenzaA__ADU59771

SEQ ID NO: 134335 - RNA, 1701 nt, Artificial Sequence; identical to SEQ ID NO: 130717
  derived and/or modified CDS sequence (opt3) from hemagglutinin__InfluenzaA__ADU59772

SEQ ID NO: 134336 - RNA, 1701 nt, Artificial Sequence; identical to SEQ ID NO: 130717
  derived and/or modified CDS sequence (opt3) from hemagglutinin__InfluenzaA__ADU59774

SEQ ID NO: 134337 - RNA, 1701 nt, Artificial Sequence; identical to SEQ ID NO: 130717
  derived and/or modified CDS sequence (opt3) from hemagglutinin__InfluenzaA__ADU59906

SEQ ID NO: 134338 - RNA, 1701 nt, Artificial Sequence; identical to SEQ ID NO: 130717
  derived and/or modified CDS sequence (opt3) from hemagglutinin__InfluenzaA__ADU59916

SEQ ID NO: 134339 - RNA, 1701 nt, Artificial Sequence; identical to SEQ ID NO: 130717
  derived and/or modified CDS sequence (opt3) from hemagglutinin__InfluenzaA__ADU76756

SEQ ID NO: 134340 - RNA, 1701 nt, Artificial Sequence; identical to SEQ ID NO: 130717
  derived and/or modified CDS sequence (opt3) from hemagglutinin__InfluenzaA__ADU76757

SEQ ID NO: 134341 - RNA, 1701 nt, Artificial Sequence; identical to SEQ ID NO: 130717
  derived and/or modified CDS sequence (opt3) from hemagglutinin__InfluenzaA__ADU76758

SEQ ID NO: 134342 - RNA, 1701 nt, Artificial Sequence; identical to SEQ ID NO: 130717
  derived and/or modified CDS sequence (opt3) from hemagglutinin__InfluenzaA__ADU76759

SEQ ID NO: 134343 - RNA, 1701 nt, Artificial Sequence; identical to SEQ ID NO: 131077
  derived and/or modified CDS sequence (opt3) from hemagglutinin__InfluenzaA__ADU76761

SEQ ID NO: 134344 - RNA, 1701 nt, Artificial Sequence; identical to SEQ ID NO: 130717
  derived and/or modified CDS sequence (opt3) from hemagglutinin__InfluenzaA__ADU76762

SEQ ID NO: 134345 - RNA, 1701 nt, Artificial Sequence
  derived and/or modified CDS sequence (opt3) from hemagglutinin__InfluenzaA__ADU76764
augaaggccauccuggugguccuccuuuacaccuucgcuacagcaaacgccgacacucugugcauuggcuaucacgcgaauaacagcacggauaccguugacacaguguuggagaagaauguaacugugacccauuccgucaacuuacuggaagauaagcacaaugggaaacuauguaagcucagaggaguggcuccccugcaucuugguaaaugcaacauagccggcuggauccuggggaauccugagugugaaucuuugucaacagcaaguagcugguccuacauuguugaggccucuucgucaaacaauggaaccugcuauccaggcgacuuuaucgauuacgaggagcucagggagcagcugagcaguguguccucuuucgaacgguuugagauuuucccgaagacuagcuccuggcccaaccacgacucaaauaagggugucacagcugcauguccucaugccggggcuaaaaguuuuuauaagaaccugaucuggcucgugaaaaagggaaauagcuacccaaaauuaucuaaguccuauauaaacgauaagggcaaagaaguacugguucuuuggggcauccaccaccccucaaccagcgccgaccaacagaguuuguaccagaaugcggaugcauacguguucgucgggacgucucgcuauuccaagaaauuuaagccugagauugccauccgaccaaaagugcgugaccaggagggaagaaugaacuacuauuggacucugguggaacccggugauaagauuaccuucgaggcuacaggcaaccuagucguuccuagguacgccuuugcaauggaacggaaugcugggagcggaaucauaauuucggacacuccagugcaugauugcaacaccacaugucaaaccccgaaaggcgccaucaauacgucucuccccuuccagaacauucacccuaucacuaucgguaagugcccaaaguauguaaaauccacaaagcugcgccuugcgaccgggcugagaaaugugcccucaauucagaguaggggauuguuuggcgccauagcaggcuucaucgaagggggauggacugguauggucgacggcugguacggguaucaucaccagaacgaacaaggaagcggcuacgcugccgaccucaaauccacacagaaugcuauugaugagaucaccaacaagguaaauucuguuauagagaaaaugaacacgcaguuuauugccguggguaaggaguucaaucaccuggaaaagcggaucgaaaacuuaaauaaaaaggucgacgauggguuccuggacaucuggaccuacaacgcagagcuccuugugcuguuggaaaaugagcgcacacuagauuaucaugacagcaacgugaaaaaccuguacgagaagguucgaucacagcucaaaaauaacgccaaggaaauuggcaauggauguuuugaguucuaucacaagugcgauaacacuuguauggaaagugugaaaaauggcaccuacgacuauccuaaguacuccgaggaagcuaaacugaacagagaggagaucgauggggucaaacuugaaagcacaaggauuuaucaaauacuggcgaucuacucuacuguggcaucaaguuugguccucgugguuagccugggagccauuuccuuuuggaugugcucuaaugguucguuacagugccggaucuguaucuga

SEQ ID NO: 134346 - RNA, 1701 nt, Artificial Sequence
  derived and/or modified CDS sequence (opt3) from hemagglutinin__InfluenzaA__ADU76765
augaaggccauccugauugugcuccuuuacaccuucgcuacagcaaacgccgacacucugugcauaggcuaucacgcgaauaacagcacggauaccgucgacacaguuuuggagaagaaugugacuguaacccauuccgugaacuuacuggaagauaagcacaaugggaaacuauguaagcucagaggagucgcuccccugcaucuugguaaaugcaacaucgccggcuggauucuggggaauccugagugugaaucuuugucaacagcaaguagcugguccuacaucguggagaccucuucgucagacaacggaacuugcuauccaggcgauuuuauugacuacgaggagcucagggagcagcugagcaguguuuccucuuucgaacgguuugagaucuucccgaagacaagcuccuggcccaaucacgauucaaacaagggugugaccgccgcuuguccucaugcaggggccaaaaguuuuuauaagaaucugauauggcucgucaaaaagggaaacagcuacccaaaauuaucuaaguccuauaucaaugacaagggcaaagaagugcugguacuuuggggcauucaccaccccucaacgagcgcugaucaacagaguuuguaccagaacgccgacgcguacguuuucguggggacuucucgcuauuccaagaaauuuaagccugagaucgcaauucgaccaaaaguccgugaucaggagggaagaaugaauuacuauuggacccugguggaacccggugacaagaucacauucgaggccacuggcaaccuaguggucccuagguacgcuuuugccauggaacggaacgcagggagcggaauaauuaucucggauaccccaguucaugacugcaauacaaccugucaaacgccgaaaggcgcuauuaacacuucucuccccuuccagaauauccacccuaucacaauugguaagugcccaaaguaugugaaauccaccaagcugcgccuugccacugggcugagaaacguacccucaauacagaguaggggauuguuuggcgcgaucgccggcuucauugaagggggauggacagguaugguggacggcugguacggguaucaucaccagaaugaacaaggaagcggcuacgcagcugaucucaaauccacccagaacgccaucgacgagauaacgaauaaggucaacucugugauugagaaaaugaauacccaguuuacagcuguugguaaggaguucaaccaccuggaaaagcggaucgaaaauuuaaacaaaaagguggaugacggguuccuggauaucuggacuuacaaugccgagcuccuuguccuguuggaaaacgagcgcacccuagacuaucaugauagcaaugugaaaaaccuguacgagaagguacgaucacagcucaaaaacaaugcaaaggaaauuggcaacggauguuuugaguucuaucacaagugcgacaauacauguauggaaaguguuaaaaacggcacuuacgauuauccuaaguacuccgaggaagccaaacugaauagagaggagaucgacggggugaaacuugaaagcaccaggauuuaucaaauacuggcuaucuacucuucagucgcgaguagcuuggugcucgucgugucccugggagcaauuucuuuuuggaugugcucgaacgguagcuuacagugccggaucuguaucuga

SEQ ID NO: 134347 - RNA, 1701 nt, Artificial Sequence; identical to SEQ ID NO: 132314
  derived and/or modified CDS sequence (opt3) from hemagglutinin__InfluenzaA__ADU76766

SEQ ID NO: 134348 - RNA, 1701 nt, Artificial Sequence
  derived and/or modified CDS sequence (opt3) from hemagglutinin__InfluenzaA__ADU76767
augaaggccauccuggugguccuccuuuacaccuucgcuacagcaaacgccgacacucugugcauuggcuaucacgcgaauaacagcacggauaccguugacacaguguuggagaaaaauguaacugugacccauuccgucaacuuacuggaagauaagcacaaugggaaacuauguaagcucagaggaguggcuccccugcaucuugguaaaugcaacauagccggcuggauccuggggaauccugagugugaaucuuugucaacagcaaguagcugguccuacauuguugagaccucuucgucagacaacggaacuugcuauccaggcgauuuuaucgacuacgaagaacucagggagcagcugagcaguguguccucuuucgaacgguuugagauuuucccgaagacaagcuccuggcccaaucacgauucaaacaagggugucaccgccgcuuguccucaugcaggggccaaaaguuuuuauaagaaucugaucuggcucgugaaaaagggaaacagcuacccaaaauuaucuaaguccuauauaaaugacaagggcaaagaaguacugguucuuuggggcauccaccaccccucaacgagcgcugaucaacagaguuuguaccagaacgccgacgcguacguguucgucgggacuucucgcuauuccaagaaauuuaagccugagauugcaauccgaccaaaagugcgugagcaggaaggaagaaugaauuacuauuggacccugguggagcccggugauaagauuacauucgaagccacuggcaaccuagucguuccuagguacgcuuuugccauggagcggaacgcagggagcggaaucauaauuucggacaccccagugcaugauugcaauacaaccugucaaacgccgaaaggcgcuaucaacacuucucuccccuuccagaauauucacccuaucacaaucgguaagugcccaaaguauguaaaauccaccaagcugcgccuugccacugggcugagaaacgugcccucaauucagaguaggggauuguuuggcgcgauagccggcuucaucgaagggggauggacagguauggucgacggcugguacggguaucaucaccagaaugagcaaggaagcggcuacgcagcugaccucaaauccacccagaacgccauugauaagaucacgaauaaagugaacucuguuauagagaagaugaauacccaguuuacagcuguggguaaggaguucaaccaccuggagaaacggauugaaaauuuaaacaagaaagucgacgauggguuccuggacaucuggacuuacaaugccgagcuccuugugcuguuggaaaacgagcgcacccuagauuaucaugacagcaauguaaagaaccuguacgagaaaguucgaucacagcucaagaacaaugcaaaggaaaucggcaacggauguuuugaguucuaucacaaaugcgauaauacauguauggaaagugugaagaacggcacuuacgacuauccuaaauacuccgaggaagccaagcugaauagagaggagauugauggggucaaacuugaaagcaccaggaucuaucaaauucuggcuauauacucuacaguggcgucaaguuugguccucgugguuagccugggagcaaucuccuuuuggaugugcucuaacgguucguuacagugccggauuuguaucuga

SEQ ID NO: 134349 - RNA, 1701 nt, Artificial Sequence
  derived and/or modified CDS sequence (opt3) from hemagglutinin__InfluenzaA__ADU76768
augaaggccauccuggugguccuccuuuacaccuucgcuauugcaaacgccgacacacugugcauaggcuaucacgcgaauaacagcacugauacgguugacaccguguuggagaaaaauguaacagugacucauuccgucaacuuacuggaagauaagcacaaugggaaacuauguaagcucagaggaguggcuccccugcaucuugguaaaugcaacaucgccggcuggauucuggggaauccugagugugaaucuuugucaaccgcaaguagcugguccuacaucguugagacaucuucgucagacaacggaaccugcuauccaggcgauuuuauugacuacgaggagcucagggagcagcugagcaguguguccucuuucgaacgguuugagaucuucccgaagacuagcuccuggcccaaucacgauucaaacaagggugucacagccgcuuguccucaugcaggggccaaaaguuuuuauaagaaucugauauggcucgugaaaaagggaaacagcuacccaaaauuaucuaaguccuauaucaaugacaagggcaaagaaguacugguucuuuggggcauucaccaccccucaaccagcgcugaucaacagaguuuguaccagaacgccgacgcguacguguucgucgggacgucuaaguauuccaaaaaguuuaaaccugagaucgcaauucgcccaaaggugcgagaucaggagggacguaugaauuacuauuggacucugguggaacccggugacaaaaucaccuucgaggccacaggcaaccuagucguuccuagauacgcuuuugccauggaaaggaacgcagggagcggaauaauuaucucggauacuccagugcaugacugcaauaccacaugucaaaccccgaagggcgcuauuaacacgucucuccccuuccagaauauccacccuaucacuauugguaagugcccaaaauauguaaaguccacaaaacugcggcuugccaccgggcugcgcaacgugcccucaauacagaguagaggauuguuuggcgcgaucgccggcuucauugaagggggauggacugguauggucgacggcugguacggguaucaucaccagaaugaacaaggaagcggcuacgcagcugaucucaaguccacacagcacgccaucgacgagauaaccaacaaaguuaauucugugauugagaagaugaacacgcaguuuaccgcuguggguaaggaauuuaaucaucuggagaaaaggaucgaaaacuuaaauaagaaagucgaugacggguuccuggauaucuggacauacaacgccgagcuccuugugcuguuggaaaaugagcggacucuagacuaucacgauagcaacguaaagaaucuguacgagaaaguucgcucacagcucaagaacaacgcaaaggaaauuggcaauggauguuucgaguucuaucauaaaugcgacaacaccuguauggaaagugugaagaauggcacauacgauuauccuaaauacuccgaggaagccaagcugaaccgagaggagaucaauggggucaaacuugaaagcacuagaauuuaucaaauacuggcuaucuacucuaccguggcgucaaguuugguccucgugguuagccugggagcaauuuccuuuuggaugugcucuaacgguucguuacagugcaggaucuguaucuga

SEQ ID NO: 134350 - RNA, 1701 nt, Artificial Sequence; identical to SEQ ID NO: 130717
  derived and/or modified CDS sequence (opt3) from hemagglutinin__InfluenzaA__ADU76769

SEQ ID NO: 134351 - RNA, 1701 nt, Artificial Sequence; identical to SEQ ID NO: 130717
  derived and/or modified CDS sequence (opt3) from hemagglutinin__InfluenzaA__ADU76770

SEQ ID NO: 134352 - RNA, 1701 nt, Artificial Sequence; identical to SEQ ID NO: 130717
  derived and/or modified CDS sequence (opt3) from hemagglutinin__InfluenzaA__ADU76771

SEQ ID NO: 134353 - RNA, 1701 nt, Artificial Sequence; identical to SEQ ID NO: 131462
  derived and/or modified CDS sequence (opt3) from hemagglutinin__InfluenzaA__ADU76772

SEQ ID NO: 134354 - RNA, 1701 nt, Artificial Sequence; identical to SEQ ID NO: 130717
  derived and/or modified CDS sequence (opt3) from hemagglutinin__InfluenzaA__ADU76774

SEQ ID NO: 134355 - RNA, 1701 nt, Artificial Sequence; identical to SEQ ID NO: 130717
  derived and/or modified CDS sequence (opt3) from hemagglutinin__InfluenzaA__ADU76775

SEQ ID NO: 134356 - RNA, 1701 nt, Artificial Sequence; identical to SEQ ID NO: 130717
  derived and/or modified CDS sequence (opt3) from hemagglutinin__InfluenzaA__ADU76776

SEQ ID NO: 134357 - RNA, 1701 nt, Artificial Sequence; identical to SEQ ID NO: 130717
  derived and/or modified CDS sequence (opt3) from hemagglutinin__InfluenzaA__ADU76777

SEQ ID NO: 134358 - RNA, 1701 nt, Artificial Sequence; identical to SEQ ID NO: 130717
  derived and/or modified CDS sequence (opt3) from hemagglutinin__InfluenzaA__ADU76778

SEQ ID NO: 134359 - RNA, 1701 nt, Artificial Sequence; identical to SEQ ID NO: 133575
  derived and/or modified CDS sequence (opt3) from hemagglutinin__InfluenzaA__ADU76779

SEQ ID NO: 134360 - RNA, 1701 nt, Artificial Sequence; identical to SEQ ID NO: 130717
  derived and/or modified CDS sequence (opt3) from hemagglutinin__InfluenzaA__ADU76780

SEQ ID NO: 134361 - RNA, 1701 nt, Artificial Sequence; identical to SEQ ID NO: 132314
  derived and/or modified CDS sequence (opt3) from hemagglutinin__InfluenzaA__ADU76781

SEQ ID NO: 134362 - RNA, 1701 nt, Artificial Sequence; identical to SEQ ID NO: 131077
  derived and/or modified CDS sequence (opt3) from hemagglutinin__InfluenzaA__ADU76782

SEQ ID NO: 134363 - RNA, 1701 nt, Artificial Sequence
  derived and/or modified CDS sequence (opt3) from hemagglutinin__InfluenzaA__ADU76784
augaaggccauccuggugguccuccuuuacaccuucgcuacagcaaacgccgacacucugugcauuggcuaucacgcgaauaacagcacggauaccguugacacaguguuggagaagaauguaacugugacccauuccgucaacuuacuggaagauaagcacaaugggaaacuauguaagcucagaggaguggcuccccugcaucuugguaaaugcaacauagccggcuggauccuggggaauccugagugugaaucuuugucaacagcaaguagcugguccuacauuguugagaccucuucgucaaacaauggaacuugcuauccaggcgacuuuaucgauuacgaggagcucagggagcagcugagcaguguguccucuuucgaacgguuugagauuuucccgaagacaagcuccuggcccaaccacgacucaaauaagggugucaccgccgcuuguccucaugcaggggccaaaaguuuuuauaagaaccugaucuggcucgugaaaaagggaaauagcuacccaaaauuaucuaaguccuauauaaacgauaagggcaaagaaguacugguucuuuggggcauccaccaccccucaacgagcgcugaccaacagaguuuguaccagaaugccgaugcguacguguucgucgggacuucucgcuauuccaagaaauuuaagccugagauugcaauccgaccaaaagugcgugaccaggagggaagaaugaacuacuauuggacccugguggaacccggugauaagauuacauucgaggccacuggcaaccuagucguuccuagguacgcuuuugccauggaacggaaugcagggagcggaaucauaauuucggacaccccagugcaugauugcaacacaaccugucaaacgccgaaaggcgcuaucaauacuucucuccccuuccagaacauucacccuaucacaaucgguaagugcccaaaguauguaaaauccaccaagcugcgccuugccacugggcugagaaaugugcccucaauucagaguaggggauuguuuggcgcgauagccggcuucaucgaagggggauggacagguauggucgacggcugguacggguaucaucaccagaacgaacaaggaagcggcuacgcagcugaccucaaauccacccagaaugccauugaugagaucacgaacaagguaaauucuguuauagagaaaaugaacacccaguuuacagcuguggguaaggaguucaaucaccuggaaaagcggauugaaaacuuaaauaaaaaggucgacgauggguuccuggacaucuggacuuacaacgccgagcuccuugugcuguuggaaaaugagcgcacccuagauuaucaugacagcaacgugaaaaaccuguacgagaagguucgaucacagcucaaaaauaacgcaaaggaaaucggcaauggauguuuugaguucuaucacaagugcgauaacacauguauggaaagugugaaaaauggcacuuacgacuauccuaaguacuccgaggaagccaaacugaacagagaggagauugauggggucaaacuugaaagcaccaggaucuaucaaauucuggcuauauacucuacaguggcgucaaguuugguccucgugguuagccugggagcaaucuccuuuuggaugugcucuaaugguucguuacagugccggauuuguaucuga

SEQ ID NO: 134364 - RNA, 1701 nt, Artificial Sequence; identical to SEQ ID NO: 130717
  derived and/or modified CDS sequence (opt3) from hemagglutinin__InfluenzaA__ADU76785

SEQ ID NO: 134365 - RNA, 1701 nt, Artificial Sequence; identical to SEQ ID NO: 130717
  derived and/or modified CDS sequence (opt3) from hemagglutinin__InfluenzaA__ADU76786

SEQ ID NO: 134366 - RNA, 1701 nt, Artificial Sequence
  derived and/or modified CDS sequence (opt3) from hemagglutinin__InfluenzaA__ADU76787
augaaggccauccuggugguccuccuuuacaccuucgcuacagcaaacgccgacacucugugcauuggcuaucacgcgaauaacagcacggauaccguugacacaguguuggagaaaaauguaacugugacccauuccgucaacuuacuggaagauaagcacaaugggaaacuauguaagcucagaggaguggcuccccugcaucuugguaaaugcaacauagccggcuggauccuggggaauccugagugugaaucuuugucaacagcaaguagcugguccuacauuguugagaccucuucgucagacaacggaacuugcuauccaggcgauuuuaucgacuacgaagaacucagggagcagcugagcaguguguccucuuucgaacgguuugagauuuucccgaagacaagcuccuggcccaaucacgauucaaacaagggugucaccgccgcuuguccucaugcaggggccaaaaguuuuuauaagaaucugaucuggcucgugaaaaagggaaacagcuacccaaaauuaucuaaguccuauauaaaugacaagggcaaagaaguacugguucuuuggggcauccaccaccccucaacgagcgcugaucaacagaguuuguaccagaacgccgacgcguacguguucgucgggacuucucgcuauuccaagaaauuuaagccugagauugcaauccgaccaaaagugcgugagcaggaaggaagaaugaauuacuauuggacccugguggagcccggugauaagauuacauucgaagccacuggcaaccuagucguuccuagguacgcuuuugccauggagcggaacgcagggagcggaaucauaauuucggacaccccagugcaugauugcaauacaaccugucaaacgccgaaaggcgcuaucaacacuucucuccccuuccacaauauucauuccaucacaaucgguaagugcccuaaguauguaaaaucaaccaagcugcgccuugccacugggcugagaaacgugccaaguauucagagcaggggauuguuuggcgcgauagccggcuucaucgaagggggauggacagguauggucgacggcugguacggguaucaccaccagaaugagcagggauccggcuacgcagcugaccucaaaucuacccaaaacgccauugaugagaucacgaauaaggugaacagcguuauagaaaagaugaauacccaguuuacagcuguggguaaggaguucaaccaucuggaaaagcggauugagaauuuaaacaaaaaggucgacgauggguuccuggacaucuggacuuacaaugccgaacuccuugugcuguuggagaacgagcgcacccuagauuaucacgacucaaauguuaaaaaccuguacgaaaagguacgaagucagcucaaaaacaaugcaaaggagaucggcaacggauguuuugaguucuaucauaagugcgauaauacauguauggaguccgugaaaaacggcacuuacgacuaucccaaguacagcgaagaggccaaacugaauagagaggaaauugauggggucaaacuugagucuaccaggaucuaucagauucuggcuauauacucaacaguggcgaguagcuugguccucgugguuucccugggagcaaucucuuuuuggaugugcucgaacgguagcuuacaaugccggauuuguaucuga

SEQ ID NO: 134367 - RNA, 1701 nt, Artificial Sequence; identical to SEQ ID NO: 134348
  derived and/or modified CDS sequence (opt3) from hemagglutinin__InfluenzaA__ADU76788

SEQ ID NO: 134368 - RNA, 1701 nt, Artificial Sequence; identical to SEQ ID NO: 134348
  derived and/or modified CDS sequence (opt3) from hemagglutinin__InfluenzaA__ADU76789

SEQ ID NO: 134369 - RNA, 1701 nt, Artificial Sequence; identical to SEQ ID NO: 130717
  derived and/or modified CDS sequence (opt3) from hemagglutinin__InfluenzaA__ADU76790

SEQ ID NO: 134370 - RNA, 1701 nt, Artificial Sequence; identical to SEQ ID NO: 130717
  derived and/or modified CDS sequence (opt3) from hemagglutinin__InfluenzaA__ADU76791

SEQ ID NO: 134371 - RNA, 1701 nt, Artificial Sequence; identical to SEQ ID NO: 134348
  derived and/or modified CDS sequence (opt3) from hemagglutinin__InfluenzaA__ADU76792

SEQ ID NO: 134372 - RNA, 1701 nt, Artificial Sequence
  derived and/or modified CDS sequence (opt3) from hemagglutinin__InfluenzaA__ADU76793
augaaggccauccuggugguccuccuuuacaccuucgcuacagcaaacgccgacacucugugcauuggcuaucacgcgaauaacagcacggauaccguugacacaguguuggagaaaaauguaacugugacccauuccgucaacuuacuggaagauaagcacaaugggaaacuauguaagcucagaggaguggcuccccugcaucuugguaaaugcaacauagccggcuggauccuggggaauccugagugugaaucuuugucaacagcaaguagcugguccuacauuguugagaccucuucgucagacaacggaacuugcuauccaggcgauuuuaucgacuacgaggagcucagggagcagcugagcaguguguccucuuucgaaaaguuugagauuuucccgaagacaagcuccuggcccaaucacgauucaaacaaaggugucaccgccgcuuguccucaugcagggacgaagaguuuuuauaaaaaucugaucuggcucgugaagaaaggaaacagcuacccaaaguuaucuaaguccuauauaaaugacaaaggcaaggaaguacugguucuuuggggcauccaccaccccucaacuagcgccgaucaacagaguuuguaccagaacgcugacgccuacguguucgucgggaccucucgguauuccaaaaaguuuaaaccugagauugcgauccgcccaaaggugcgagaucaggagggacguaugaauuacuauuggacacugguggaacccggugacaaaauuacuuucgaggcaaccggcaaccuagucguuccuagauacgccuuugcuauggaaaggaacgccgggagcggaaucauaauuucggauacaccagugcaugacugcaauaccacgugucaaacuccgaagggcgcaaucaacacaucucuccccuuccagaauauucacccuaucaccaucgguaagugcccaaaauauguaaaguccacuaaacugcggcuugcuacagggcugcgcaacgugcccucaauucagaguagaggauuguuuggcgccauagcgggcuucaucgaagggggauggaccgguauggucgacggcugguacggguaucaucaccagaaugaacaaggaagcggcuacgccgcagaucucaaguccacgcagaacgcuauugacaaaaucaccaauaaggugaacucuguuauagagaagaugaauacacaguuuacugccguggguaaagaguucaaccaccuggaaaagaggauugagaauuuaaacaaaaaggucgaugacggguuccuggauaucuggaccuacaaugcugaacuccuugugcuguuggagaacgaacggacacuagacuaucaugauagcaauguaaagaaccuguacgagaagguucgcucacagcucaagaacaaugccaaagagaucggcaacggauguuuugaguucuaucacaagugcgacaauacuuguauggaaagugugaaaaacggcaccuacgauuauccuaaguacuccgaagaggcaaaacugaaucgagaagagauugacggggucaaacuugagagcacaagaaucuaucaaauucuggccauauacucuaccguggcuucaaguuugguccucgugguuagccugggagcgaucuccuuuuggaugugcucuaacgguucguuacagugcaggauuuguaucuga

SEQ ID NO: 134373 - RNA, 1701 nt, Artificial Sequence
  derived and/or modified CDS sequence (opt3) from hemagglutinin__InfluenzaA__ADU85911
augaaggccaucauugugguccugcucuacaccuucgcuacagcagacgccgauacucuuugcauaggcuaucacgcgaacaauagcacggacaccguugauacagugcuggagaaaaacguaacugugacccauuccgucaauuuguuagaaaacaagcacaaugggaaacuguguaagcuaggagguaucgcuccccuccaucugggcaaaugcgacauugccggguggcuucugggaaacccugagugugaaucuuuguuuacagcaucaaguuggagcuacaucguggagaccccaaauuccgauaacggcacuugcuauccgggugacuucauuaauuacgaagaacucagagagcaccugucuucgguuagcucauuugaaagguucgagaucuuucccaaggccaacaguuggccuaaucaugauacaaacaagggggugaccgcugcauguccauaugccggagcuaauuccuucuaccggaaccugauauggcucgucaaaaagggcaauucuuaucccaaauuaagcaaguccuacaucaacaacaaaaagaaggaagugcugguaauuuggggcauccaccacccuccaacgucaacugaccagcaaacccuuuaccagaaugccgaugcguauguuuuuguggggaguagcaaauacucuaagcgcuucaaacccgagauugcagcccgaccuaagguccgugaccaggcuggaagaauggauuauuacuggacauugaucgagccaggugacacuauaaccuuugaagccacaggcaaccugguggugccgagguaugcauucgcuaugaaacggggguccggaucaggcauuaucgucagcgaugcccccguucaugacugcaauaccacgugucagacuccuaagggugcgauuaacacaagucuaccauuucaaaauauccaccccgugaccaucggggagugcccuaaauacguaaagucuacuaagcuccgcauggccacaggacugagaaacauuccauccauacagagcaggggccuuuucggcgcaaucgcuggguuucuggaaggagguuggaccggcaugauugacgggugguauggauaccaucaccagaaugagcagggcucggguuacgccgcugaucaaaaaucuacgcagaacgccaucgacgggauaaccaauaaggugaacuccauuaucgagaaaaugaauacacaguucacugcagucggcaaggaguucucacaguuggagaaacggaucgaaagucucaacaauaagguggaugacggauuucuggauauuuggaccuauaacgccgaguuacugguucuccuugaaaaugagcgcacacuggacuaccacgauagcaacgugaagaacuuguaugaaaaaguccgaucccaacuaaagaauaacgcuaaagagaucggcaauggguguuucgaguuuuaccauaagugcgacaacacuuguauggaaucugugaaaaauggaaccuaugauuaccccaaguauagcgaggaagcgaagcugaacagagaggaaauugacgguguaaaacucgagucagcaaggauauaccagauccuggccauuuacaguacaguugcuuccagccuugugcuguuggucucucucggcgccaucucauucuggaugugcaguaaugggagccugcagugccggaucuguauuuga

SEQ ID NO: 134374 - RNA, 1701 nt, Artificial Sequence; identical to SEQ ID NO: 131881
  derived and/or modified CDS sequence (opt3) from hemagglutinin__InfluenzaA__ADV17283

SEQ ID NO: 134375 - RNA, 1701 nt, Artificial Sequence; identical to SEQ ID NO: 131881
  derived and/or modified CDS sequence (opt3) from hemagglutinin__InfluenzaA__ADV17293

SEQ ID NO: 134376 - RNA, 1701 nt, Artificial Sequence
  derived and/or modified CDS sequence (opt3) from hemagglutinin__InfluenzaA__ADV17303
augaaggccauccuggugguccuccuuuacaccuucgcuacagcaaacgccgacacucugugcauuggcuaucacgcgaauaacagcacggauaccguugacacaguguuggagaaaaauguaacugugacccauuccgucaacuuacuggaagauaagcacaaugggaaacuauguaagcucagaggaguggcuccccugcaucuugguaaaugcaacauagccggcuggauccuggggaauccugagugugaaucuuugucaacagcaaguagcugguccuacauuguugagaccucuucgucagacaacggaacuugcuauccaggcgauuuuaucgacuacgaggagcucagggagcagcugagcaguguguccucuuucgaacgguuugagauuuucccgaagacaagcuccuggcccaaucacgauucaaacaagggugucaccgccgcuuguccucaugcaggggccaaaaguuuuuauaagaaucugaucuggcucgugaaaaagggaaacagcuacccaaaauuaucuaaguccuauauaaaugacaagggcaaagaaguacugguucuuuggggcauccaccaccccucaacgagcgcugaucaacagaguuuguaccagaacgccgacgcguacguguucgucgggacuucucgcuauuccaagaaauuuaagccugagauugcaauccgaccaaaagugcgugaucaggagggaagaaugaauuacuauuggacccugguggaacccggugacaagauuacauucgaggccacuggcaaccuagucguuccuagguacgcuuuugccauggaacggaacgcagggagcggaaucauaauuucggauaccccagugcaugacugcaauacaaccugucaaacgccgaaaggcgcuaucaacacuucucuccccuuccagaauauucacccuaucacaaucgguaagugcccaaaguauguaaaauccaccaagcugcgccuugccaaagggcugagaaacgugcccucaauucagaguaggggauuguuuggcgcgauagccggcuucaucgaagggggauggacugguauggucgacggcugguacggguaucaucaccagaaugaacaaggaagcggcuacgcagcugaucucaaguccacacagaacgccauugacgagaucaccaauaaagugaacucuguuauagagaagaugaauacgcaguuuaccgcuguggguaaggaguucaaccaccuggaaaaacggauugaaaauuuaaacaagaaagucgaugacggguuccuggauaucuggacauacaaugccgagcuccuugugcuguuggaaaacgagcgcacucuagacuaucaugauagcaauguaaagaaccuguacgagaaaguucgaucacagcucaagaacaaugcaaaggaaaucggcaacggauguuuugaguucuaucacaaaugcgacaauaccuguauggaaagugugaagaacggcacauacgauuauccuaaauacuccgaggaagccaagcugaauagagaggagauugacggggucaaacuugaaagcacuaggaucuaucaaauucuggcuauauacucuaccguggcgucaaguuugguccucgugguuagccugggagcaaucuccuuuuggaugugcucuaacgguucguuacagugccggauuuguaucuga

SEQ ID NO: 134377 - RNA, 1701 nt, Artificial Sequence; identical to SEQ ID NO: 131881
  derived and/or modified CDS sequence (opt3) from hemagglutinin__InfluenzaA__ADV17313

SEQ ID NO: 134378 - RNA, 1701 nt, Artificial Sequence
  derived and/or modified CDS sequence (opt3) from hemagglutinin__InfluenzaA__ADV17323
augaaggccauccuggugguccuccuuuacaccuucgcuacaacuaacgcagacacgcugugcauuggcuaucacgccaauaacagcaccgauacaguugacacuguguuggagaaaaauguaaccgugacacauuccgucaacuuacuggaagauaagcacaaugggaaacuauguaagcucagaggaguggcgccccugcaucuugguaaaugcaacauagcuggcuggauccuggggaauccugagugugaaucuuugucaaccgccaguagcugguccuacauuguugagacuucuucgucagacaacggaacaugcuauccaggcgauuuuaucgacuacgaagaacucagggagcagcugagcaguguguccucuuucgaacgguuugagauuuucccgaagaccaauagcuggcccaaccacgauuccaauaagggugucacggcagccuguccucaugcuggggcaaaaucauuuuauaagaaccugaucuggcucgugaaaaagggaaauaguuacccaaaauuaagcaagucuuauauaaacgacaagggcaaagaaguacugguucuuuggggcauccaccaccccuccacuucagccgaucaacagggguuguaccagaaugcugacgccuacguguucgucggaaccagccgcuauaguaagaaauuuaagccugagauugcgauccgaccaaaagugcgugaucaggaggguagaaugaacuacuauuggacacugguggaacccggcgacaagauuacuuucgaggcaaccgggaaccuagucguuccuagguacgccuuugcuauggaacggaaugccggaucuggcaucauaauuuccgauacaccagugcaugacugcaacaccacgugucaaacuccggagggugcaaucaauacaagccuccccuuccagaacauucacccuaucaccaucgggaaaugcccaaaguauguaaagucgacuaaacugcgccuugcuacaggacugagaaaugugcccucuauucaguccaggggcuuguuuggcgccauagcgggguucaucgaaggagguuggaccggcauggucgacgggugguacggauaucaucaccagaacgagcaaggcucagguuacgccgcagaucucaagaguacgcagaaugcuauugacaaaaucaccaacaaggugaauuacguuauagagaaaaugaacacacaguuuacugccguggggaaggaguucaaucaccuggagaagcggauugaaaacuuaaauaaaaaggucgaugacggcuuccuggauaucuggaccuauaacgcugagcuccuugugcuguuggaaaaugagcgcacacuagacuaccaugauagcaacguaaagaaccuguaugagaagguucgaucccagcucaaaaauaacgccaaggaaaucggaaauggcuguuuugaguucuaccacaagugcgacaacacuuguauggaaucugugaaaaaugggaccuaugauuacccuaaguauagcgaggaagcaaaacugaacagagaggagauugacggagucaaacuugaaucaacaaggaucuaccaaauucuggccauauacaguaccguggcuuccagcuugguccucgugguuucucugggugcgaucucauuuuggaugugcaguaauggcagcuuacagugccggauuuguaucuga

SEQ ID NO: 134379 - RNA, 1701 nt, Artificial Sequence
  derived and/or modified CDS sequence (opt3) from hemagglutinin__InfluenzaA__ADV17333
augaaggccauccuggugguccuccuuuacaccuucgcuacagcaaacgccgacacucugugcauuggcuaucacgcgaauaacagcacggauaccguugacacaguguuggagaaaaauguaacugugacccauuccgucaacuuacuggaagauaagcacaaugggaaacuauguaagcucagaggaguggcuccccugcaucuugguaaaugcaacauagccggcuggauccuggggaauccugagugugaaucuuugucaacagcaaguagcugguccuacauuguugagaccucuucgucagacaacggaacuugcuauccaggcgauuuuaucgacuacgaggagcucagggagcagcugagcaguguguccucuuucgaacgguuugagauuuucccgaagacaagcuccuggcccaaucacgauucaaacaagggugucaccgccgcuuguccucaugcaggggccaaaaguuuuuauaagaaucugaucuggcucgugaaaaagggaaacagcuacccaaaauuaucuaaguccuauauaaaugacaagggcaaagaaguacugguucuuuggggcauccaccaccccucaacgagcgcugaucaacagaacuuguaccagaaugccgacgcguacguguucgucgggacuucccgcuauucuaagaaauuuaagccugagauugcaauccgaccaaaagugcgugaucaggagggaagaaugaacuacuauuggacccugguggaacccggugacaagauuacauucgaggccacuggcaaccuagucguucucagguacgcuuuugccauggaacggaaugcaggguccggaaucauaauuagcgauaccccugugcaugacugcaacacaaccugucaaacgccaaaaggcgcuaucaauacuucgcugccguuccagaacauucaccccaucacaaucgguaagugcccuaaguauguaaaaucuaccaagcugcgccuugccacuggguugagaaaugugccauccauucagucaaggggacucuuuggcgcgauagccggcuucaucgaagggggauggacagguauggucgacggcugguacggguaucaucaccagaacgaacaaggaaguggcuacgcagcugaucugaaaagcacccagaaugccauugacaagaucacgaacaaagugaauaguguuauagagaagaugaacacccaguuuacagcuguggguaaggaguucaaucacuuagaaaaacggauugagaaccugaauaagaaagucgaugacggguuccucgauaucuggacuuacaacgccgaacuucugguguugcuagagaaugaacgcacccuggacuauuacgauucuaacguaaagaaccucuaugagaaaguucgaagccagcugaagaauaacgcaaaggagaucggcaauggauguuuugaguucuaccauaaaugcgacaacacauguauggaaucagugaagaauggcacuuaugauuaccccaaauauagugaagaggccaaacuuaacagagaagagauugacggggucaagcuggaguccaccaggaucuaccaaauuuuggugauauacagcacagucgcuucuucacucgugcugguugugaguuuaggagcgaucagcuuuuggaugugcuccaaugguucucugcagugccggauuuguaucuga

SEQ ID NO: 134380 - RNA, 1701 nt, Artificial Sequence; identical to SEQ ID NO: 130717
  derived and/or modified CDS sequence (opt3) from hemagglutinin__InfluenzaA__ADV19019

SEQ ID NO: 134381 - RNA, 1701 nt, Artificial Sequence; identical to SEQ ID NO: 131202
  derived and/or modified CDS sequence (opt3) from hemagglutinin__InfluenzaA__ADV41677

SEQ ID NO: 134382 - RNA, 1701 nt, Artificial Sequence
  derived and/or modified CDS sequence (opt3) from hemagglutinin__InfluenzaA__ADV58939
augaaggccauccuggugguccuccuuuacaccuucgcuacagcaaacgccgacacucugugcauuggcuaucacgcgaauaacagcacggauaccguugacacaguguuggagaaaaauguaacugugacccauuccgucaacuuacuggaagauaagcacaaugggaaacuauguaagcucagaggaguggcuccccugcaucuugguaaaugcaacauagccggcuggauccuggggaauccugagugugaaucuuugucaacagcaaguagcugguccuacauuguugagaccucuucgucagacaacggaacuugcuauccaggcgauuuuaucgacuacgaagaacucagggagcagcugagcaguguguccucuuucgaacgguuugagauuuucccgaagacaagcuccuggcccaaucacgauucaaacaagggugucaccgccgcuuguccucaugcaggggccaaaggauuuuauaagaaucugaucuggcucgugaaaaagggcaacaguuacccaaaauuaagcaagucuuauauaaaugacaagggcaaagaaguacugguucuuugggggauccaccaccccuccacgacugcugaucaacagucauuguaccagaacgccgacaccuacguguucgucggaacaagccgcuauaguaagaaauuuaagccugagauugcgauccgaccaaaagugcgugaucaggaggguagaaugaauuacuauuggacucugguggaacccggcgacaagauuaccuucgaggcaacagggaaccuagucguuccuagguacgccuuugcuauggaacggaacgccggaucuggcaucauaauuuccgauaccccagugcaugacugcaauacgacuugucaaacaccgaaaggugcaaucaacaccagccuccccuuccagaauauucacccuaucacuaucgggaagugcccaaaguauguaaaaucgacaaagcugcgccuugcuaccggacugagaaacgugcccucuauucaguccaggggcuuguuuggcgccauagcgggguucaucgagggagguuggacgggcauggucgacgggugguacggauaucaucaccagaaugaacaaggcucagguuacgccgcagaucucaaaaguacccagaacgcuauugacaagaucacaaauaaagugaacagcguuauagagaagaugaauacucaguuuaccgccguggggaaggaguucaaccaccuggaaaaacggauugagaauuuaaacaagaaagucgaugacggcuuccuggauaucuggacauacaaugcugaacuccuugugcuguuggagaacgaacgcacucuagacuaucaugauuccaauguaaagaaccuguacgagaaaguucgaaaccagcucaagaauaacgccaaggagaucggaaauggcuguuuugaguucuaucacaaaugcgacaacaccuguauggagucugugaagaaugaaacauacgauuauccuaaauacagcgaggaagcaaagcugaacagagaggagauugacggggucaaacuugaaucaaccaggaucuaucaaauucuggccauauacaguacuguggcuuccagcuugguccucgugguuucucugggagcgaucucauuuuggaugugcaguaaugguagcuuacagugccggauuuguaucuga

SEQ ID NO: 134383 - RNA, 1698 nt, Artificial Sequence
  derived and/or modified CDS sequence (opt3) from hemagglutinin__InfluenzaA__ADV69074
augaaggugaaacugcucguccuucugugcaccuucacagccacuuacgcugacacgaucuguauuggcuaucacgcaaacaauagcaccgauacaguugacacuguguuggagaagaacguaaccgugacacauuccgucaauuuacuggaagauucucacaacgggaaacuaugccuccugaagggaauagcgccccuucagcuggguaauuguaacguggccggcuggaucuuggggaauccugagugcgaacuccugauuucaaaagagaguuggagcuacaucguugaaaccccagacccggagaacggaacuuguuaucccggcuacuuuacagauuaugaggaacugagagagcaacucuccucugugucgucauucaagagguuugaaauuuucccuaaggagagcaguuggccaaaucauaccgucacggguguguccgcuucuugcagccacaacgggaaauccucauuuuaccggaauuuacuguggcuuacuguaaagaacggauuguaucccaaucugaguaaaagcuacaccaacgacaaggagaaagaaguucuagugcucuggggcguccaucacccuccaucuaucggcgaucagcgcacacuguaccacacugagaaugccuauguguccguggucucaagccauuacagucgacguuucacccccgaaauaguuaagagaccuaaggugagggaccaggaggggcggaucaacuauuacuggacacuucuggaaccaggagauaccauuaucugugaggcaaacgguaauuugauugccccgcgcuaugcuuuugcacucucuagaggccugggguccggaaucauaacgagcaacgcccccaugggcgagugcaaugcuaaaugucagacuccucaaggugccauuaacucgucuuuaccauuccagaauguacaccccgugacaaucggggaaugcccuaaguacgucaaauccgcgaagcugaggauggugaccggacuccggaacacuccaucaauucagagucgcggccuuuuuggcgcaaucgccggguucaucgagggagguuggacaggcaugguugacgggugguauggauaccaucaccagaaugaacaaggcagcgguuacgcugccgaucagaaauccacccagaacgcaauuaaugggauaacgaacaaggucaauucugugaucgagaaaaugaacacccaguuuacagcugugggcaaggaguucaauaagcuggaacgaagaauggagaacuugaauaaaaagguagacgauggauuucuagacauuuggacuuauaacgccgaacugcucguucugcuugagaacgaaaggacccuggacuuccacgauagcaaugugaaaaacuuguacgagaaggucaaaucacaacucaagaauaacgcgaaggaaaucggcaauggguguuucgaguuuuaucauaaaugcaacgacgagugcauggaaagugugaagaauggaacauacgauuaucccaaauacuccgaggaaagcaagcugaaccgggagaaaauagacggugucaaguuagagucuauggaaguguaucagauucuggccaucuacucaacuguugcaaguagccuaguguuccucguagcucugggcgccaucuguuuuuggaugugcuccaaugggucucuucaguguaagauuugcaucuga

SEQ ID NO: 134384 - RNA, 1698 nt, Artificial Sequence
  derived and/or modified CDS sequence (opt3) from hemagglutinin__InfluenzaA__ADV69075
augaaggugaaacugcucguccuucugugcaccuucacagccacuuacgcugacacgaucuguauuggcuaucacgcaaacaauagcaccgauacaguugacacuguguuggagaagaacguaaccgugacacauuccgucaauuuacuggaagauucucacaacgggaaacuaugccuccugaagggaauagcgccccuucagcuggguaauuguaacguggccggcuggaucuuggggaauccugagugcgaacuccugauuucaaaagagaguuggagcuacaucguugaaaccccagacccggagaacggaacuuguuaucccggcuacgugacagauuaugaggaacugagagagcaacucuccucugucucgucauuuaagagguucgaaauuuuuccuaaggagagcaguuggccaaaucauaccgugacggguguauccgcuucuugcagccacaacgggaaauccucauucuaccggaauuuacuguggcuuacuguuaagaacggauuguaucccaaucugaguaaaagcuacaccaacgacaaggagaaagaagugcuaguccucuggggcgugcaucacccuccaucuaucggcgaucagcgcacacuguaccacacugagaaugccuauguguccgucguuucaagccauuacagucgacguuuuacccccgaaauagugaagagaccuaagguaagggaccaggaggggcggaucaacuauuacuggacacuucuggaaccaggagauaccauuaucugugaggcaaacgguaauuugauugccccgcgcuaugcuuucgcacucucuagaggcuuuggguccggaaucauaacgagcaacgcccccaugggcgagugcaaugcuaaaugucagacuccucaaggugccauuaacucgucucugccauuccagaaugugcaccccgucacaaucggggaaugcccuaaguacgugaaauccgcgaaguuaaggaugguuaccggacugcggaacacuccaucaauucagagucgcggccucuuuggcgcaaucgccggguucaucgagggagguuggacaggcaugguggacgggugguauggauaccaucaccccaaugaacagggcagcgguuacgcugccgaucaaaaauccacccagaacgcaauuaaugggauaacgaacaaggucaauucugugaucgagaaaaugaacacccaguuuacagcuguaggcaaggaguucaauaaacuugaacgaagaauggagaaccugaauaagaagguugacgauggauuuuuggacauuuggacuuauaacgccgaacuacuggugcuccuggagaacgaaaggacccuugacuuccacgauagcaaugucaaaaaccuguacgagaaggugaaaucacaguugaagaauaaggucaaagaaaucggcaacggguguuucgaguuuuaucauaagugcaaugacgagugcauggaaagugugaaaaacggaacauacgauuauccgaaguacuccgaggaaagcaaacucaaucgggagaagauagacgguguuaagcuggagucuauggaaguguaucaaauuuuagcgaucuacucaacuguagccaguagccuggucuuccuaguggcacucggcgcuaucuguuuuuggaugugcuccaacgggucucugcaguguaaaauuugcaucuga

SEQ ID NO: 134385 - RNA, 1698 nt, Artificial Sequence
  derived and/or modified CDS sequence (opt3) from hemagglutinin__InfluenzaA__ADV69077
augaaggugaaacugcucguccuucugugcaccuucacagccacuuacgcugacacgaucuguauuggcuaucacgcaaacaauagcaccgauacaguugacacuguguuggagaagaacguaaccgugacacauuccgucaauuuacuggaagauucucacaacgggaaacuaugccuccugaagggaauagcgccccuucagcuggguaauuguaacguggccggcuggaucuuggggaauccugagugcgaacuccugauuucaaaagagaguuggagcuacaucguugaaaccccagacccggagaacggaacuuguuaucccggcuacuuuacagauuaugaggaacugagagagcaacucuccucugugucgucauucaagagguuugaaauuuucccuaaggagagcaguuggccaaaucauaccgucacggguguguccgcuucuugcagccacaacgggaaauccucauuuuaccggaauuuacuguggcuuacuguaaagaacggauuguaucccaaucugaguaaaagcuacaccaacgacaaggagaaagaaguucuagugcucuggggcguccaucacccuccaucuaucggcgaucagcgcacacuguaccacacugagaaugccuauguguccguggucucaagccauuacagucgacguuucacccccgaaauaguuaagagaccuaaggugagggaccaggaggggcggaucaacuauuacuggacacuucuggaaccaggagauaccauuaucuuugaggcaaacgguaauuugauugccccgcgcuaugcuuucgcacucucuagaggcuuuggguccggaaucauaacgagcaacgcccccaugggcgaguguaaugcuaaaugccagacuccucaaggugccauuaacucgucucugccauuccagaauguacaccccgugacaaucggggaauguccuaaguacgucaaauccgcgaaguuaaggauggugaccggacugcggaacacuccaucaauucagagucgcggccucuuuggcgcaaucgccggguucaucgagggagguuggacaggcaugguugacgggugguauggauaccaucaccagaaugaacaaggcagcgguuacgcugccgaucagaaauccacccagaacgcaauuaaugggauaacgaacaaggucaauucugugaucgagaaaaugaacacccaguuuacagcugugggcaaggaguucaauaaacuugaacgaagaauggagaaccugaauaagaagguagacgauggauucuuggacauuuggacuuauaacgccgaacuacugguucuccuggagaacgaaaggacccuugacuuucacgauagcaaugugaaaaaccuguacgagaaggucaaaucacaauugaagaauaacgcgaaggaaaucggcaaugggugcuucgaguuuuaucauaaauguaacgacgagugcauggaaagugugaagaauggaacauacgauuaucccaaauacuccgaggaaagcaagcucaaccgggagaaaauagacggugucaagcuggagucuauggaaguguaucagauuuuagccaucuacucaacuguugcaaguagccugguguuccuaguagcucucggcgccaucugcuuuuggauguguuccaaugggucucugcagugcaagauuuguaucuga

SEQ ID NO: 134386 - RNA, 1698 nt, Artificial Sequence
  derived and/or modified CDS sequence (opt3) from hemagglutinin__InfluenzaA__ADV69078
augaaggugaaacugcucauccuucugugcaccuucacagccacuuacgcugacacgauuuguauaggcuaucacgcaaacaauagcaccgauacagucgacacuguuuuggagaagaacgugaccguaacacauuccgugaauuuacuggaagauucucacaacgggaaacuaugccuccugaagggaaucgcgccccuucagcuggguaauuguucagucgccggcuggauuuuggggaacccugagugcgaaagucucaucagcaaaaaguccuggucuuacauuguggagaccccaaauccggaaaacggagcuuguuaucccggcgaguuugccgacuacgaggaacugagagagcaacugucgucaguuagcaguuucgaaagguuugagaucuucccuaaggaguccucuuggccaaaucauacugcagccggugugagcgcuuccugcucacacaacggggagaaaaguuuuuaucggaaucucauaugguuaacaaagaaaaacggacuguaccccaaucuuagcaagucuuaugagaacgauaaagaaaaggaggucuugauccuguggggcgugcaucacccuccaaauauugaaaaccagcgcacccuauaccgaacggagaacgcauacguauccguugugucaagccacuauaguggccguuucacucccgagaucaccaagagaccuaaagucaggaaucaggaagggcggauuaacuacuauuggacacuccuggagccaggagacacuaucauauuugaagccaaugguaaccuuauugcuccgugguacgccuucacccugucucgcggcuugggguccggaaucauuacaagcaaugcgcccauggaugagugugacgcaaagugccagaccccucaaggcgccaucaacucgucucucccauuucagaaugugcaucccgugacgaucggugaauguccuaaauaugucagauccucaaagcugaggaugguuacuggguuacggaacauuccaaguauacagagccgcggacuguucggcgcuaucgccggcuuuauugaagggggauggacagguaugguggauggcugguacggguaucaccaucagaaugagcaaggauccggcuacgcagcugaccaggaaucuacccagaacgccaucaaugguauaacuaacaaaguaaauagcgugauugagaagaugaacacacaguucaccgcggucgggaaagaauuuaauaagcucgagcgaagaauggaaaaccuuaacaagaaaguggaugacggcuuccuggauaucuggacguacaaugccgaguugcuaguucugcucgagaacgaaaggacccuggacuuccacgacucaaaugugaagagucuuuaugagaaagucaagucccaacugaaaaacaaugcaaaggaaaucggaaacggcugcuuugaguucuaccacaaguguaauaacgagugcauggaaagcgugaaaaaugggacauaugauuaccccaaguauucugaggaaucaaaauugaaccgggagaagauugacggaguaaaacucgauaguauggguguuuaccguauccuggcuauuuauagcacuguggccuccucuuuaguccugcuagugucgcucggcgcuaucagcuuuuggaugugcuccaaugggucacugcagugucgcauaugcauuuga

SEQ ID NO: 134387 - RNA, 1698 nt, Artificial Sequence
  derived and/or modified CDS sequence (opt3) from hemagglutinin__InfluenzaA__ADV69079
augaaggugaaacugcucauccuucugugcaccuucacagccacuuacgcugacacgauuuguauaggcuaucacgcaaacaauagcaccgauacagucgacacuguuuuggagaagaacgugaccguaacacauuccgugaauuuacuggaagauucucacaacgggaaacuaugccuccugaagggaaucgcgccccuucagcuggguaauuguucagucgccggcuggauuuuggggaacccugagugcgaacuccugaucaguaaaaagagcugguccuacauugugaagaccccaaauccggagaacggaucuuguuaucccggcuacuuugcugacuaugaagaacugagagagcaacucucgucaguuagcaguuucgaaagguuugagauguucccuaaagaauccucuuggccaaaucauaacgugaauggugucagcgccuccugcucacacaacgggaagcggaguuuuuaccgcaauuuacuguggcuuacuggcaaaaacggauuguaucccaaucugacaaagagcuacgagaacaacaaugagaaagaagugcuaauccucuggggcguacaucacccuucuaacauaggggaucagcgaacccuguaccacacggagaaugcauauguuuccgugaugucaagccauuacagucguagauucacuccagaaaucaacaagaggcccaagguccgggaccaggagggacgcauuaauuauuacuggacccuucuggaaccuggugauacaaucauuuuugaggccaacggcaauuugaucgcuccaugguaugcauucgcccucucuagaggguuuggauccggcauaauuacuagcucggcuccgauggacgagugugaugccaaaugccagacccccaggggugcgaucaacucuucccugccuuuccaaaaugugcacccagugacaauuggggaaugucccaaguacguccggucagcaaaauuacgcaugguuaccggacugcgaaacaucccuaguauccagagcagaggccucuuuggcgccauugcuggguucauagagggagguuggacgggcaugguggacgggugguauggauaccaucaccagaaugaacagggcuccgguuacgccgcagaucaagagucuacucagaacgcuaucaaugggauuacaaacaagguaaauagcgugaucgagaaaaugaacacccaguuuacugccgucggcaaggaguucaacaaacuugagaggcggauggaaaaucugaacaagaagguggacgauggauucuuggacauauggacauauaaugcggagcuacugguucuccuggaaaacgagcguacccuugacuuucacgauucaaaugugaaaagucuguacgaaaaggucaaaucccaguugaagaacaaugccaaagagauuggcaacgggugcuucgaguuuuaucauaaguguaauaacgaaugcauggagagcgugaagaauggaacguacgacuauccaaaauacucugaagagucaaagcucaaccgcgagaaaaucgaugguguaaagcuggacaguaugggcguuuaucaaaucuuagcaauuuacagcaccguggcuuccucucugguccuacucgugucgcugggggccaucagcuucuggaugugcuccaauggaucacuucaguguagaauuugcauauga

SEQ ID NO: 134388 - RNA, 1698 nt, Artificial Sequence
  derived and/or modified CDS sequence (opt3) from hemagglutinin__InfluenzaA__ADV69080
augaaggugaaacugcucauccuucugugcaccuucacagccacuuacgcugacacgauuuguauaggcuaucacgcaaacaauagcaccgauacagucgacacuguuuuggagaagaacgugaccguaacacauuccgugaauuuacuggaagauucucacaacgggaaacuaugccuccugaagggaaucgcgccccuucagcuggguaauuguucagucgccggcuggauuuuggggaacccugagugcgaaagucucaucagcaaaaaguccuggucuuacauuguggagaccccaaauccggaaaacggagcuuguuaucccggcgaguuugccgacuacgaggaacugagagagcaacugucgucaguuagcaguuucgaaagguuugagaucuucccuaaggaguccucuuggccaaaucauacugcagccggugugagcgcuuccugcucacacaacggggaacggaguuuuuaucgcaaucucauaugguuaacaaugaaaaacggacuguaccccaaucuucgaaagagcuaugagaacgauaaagaaaaggaggucuugauccuguggggcgugcaucacccuccaaauauugaaaaccagcguacccuauaccacacggagaacgcauacguaucuguuguguccucacauuauagcggcagauucacucccgagaucaccaaaaggccuaagguccgggaccaggaagggcgcauuaauuacuauuggacacuccuggagccaggagauacuaucauauuugaagccaacgguaaucuuauugcuccgugguacgccuucacccugaguagaggcuuggggucuggaaucauuacauccaacgcgcccauggacgcaugugaugccaagugccagaccccucaaggcgcuaucaauagcucgcucccauuucagaacgugcaccccgugacgaucggugaguguccuaaauaugucaggucugccaagcugcggaugguuacuggguuacgcaauauuccauccauacagucacgaggacuguucggcgcaaucgcuggcuuuauugaagggggauggacagguaugguggacggcugguacggguaucaucaccagaacgagcaaggaaguggcuacgccgcggaucaggagagcacccagaaugccaucaacgguauaacuaauaaaguaaacuccgugauugaaaagaugaauacacaguucaccgcagucgggaaagaguuuaacaagcucgaaagaaggaucgagaaucuuaacaaaaagguggacgauggcuucaucgacauuuggacguacaacgcugaacuguugguucuacuggagaaugagcggacccucgacuuccacgauucuaacgucaagagccuguaugaaaaagugaagucacaacuuaaaaauaacgccaaggagaucggaaauggcugcuuugaguucuaccauaaauguaacaaugaaugcauggagagugugaagaacgggacauaugacuaccccaaguauuccgaagagagcaaacugaaucgugaaaagauugauggaguaaaauuggacucuauggguguuuaccgcauacucgcuaucuauucaacuguggccaguagccuggucuuacuggugucccuaggcgcaauuucuuuuuggaugugcucgaacgggagccuccaguguagaaucugcaucuga

SEQ ID NO: 134389 - RNA, 1698 nt, Artificial Sequence
  derived and/or modified CDS sequence (opt3) from hemagglutinin__InfluenzaA__ADV69081
augaaggugaaacugcucguccuucugugcaccuucacagccacuuacgcugacacgaucuguauuggcuaucacgcaaacaauagcaccgauacaguugacacuguguuggagaagaacguaaccgugacacauuccgucaauuuacuggaagauucucacaacgggaaacuaugccuccugaagggaauagcgccccuucagcuggguaauuguaacguggccggcuggaucuuggggaauccugagugcgaacuccugauuucaaaagagaguuggagcuacaucguugaaaccccaaacccggagaauggaacuuguuaucccggcuacuuuacagacuaugaggaacugagagagcaacucuccucugugucgucauucaagagguuugaaauuuucccuaaggagagcaguuggccaaaccauaccgucacggguguguccgcuucuugcagccacaauggggaguccucauuuuaccggaacuuacuguggcuuacugugaaaaauggauuguaucccaagcugaguaaaagcuacaccaacgauaaggaaaaagagguucuagugcucuggggcguccaucacccuccaaauauccgcgaccagcgaacacuguaccacacugaaaacgccuaugugucuguggucuccucacauuacagccguagauucacccccgagauaguuaagaggccuaaggugcgggaucaggaaggccgcaucaacuauuacuggacacuucuggagccaggggacaccauuaucuuugaggcaaauggaaacuugauugccccgagauaugcuuucgcacucaguagggguuuuggcucugggaucauaacguccaaugcccccaugggagaauguaacgcuaaaugccagacuccucaaggcgccauuaucagcucgcugccauuccagaauguacaccccgugacaauuggugaguguccuaaguacgucaaaucugcgaaguuacggauggugaccgggcugcgcaacacuccauccauccagucacgaggacucuuuggcgcaaucgccggcuucauugaagggggauggacagguaugguugauggcugguauggguaccaucaccagaaugagcaaggaaguggcuacgcugccgaccagaaaagcacccagaacgcaauaaaugguaucacgaacaagguaaauuccgucauugaaaagaugaacacccaguuuacagcuguggggaaggaguucaauaaacuugagagaaggauggaaaaccugaauaaaaagguagaugacggcuucuuggauaucuggacuuauaacgccgagcuacugguucuccuggaaaacgagcggacccuugacuuucacgacucuaaugugaaaaaccuguacgaaaaggucaaaagccaauugaagaauaacgcgaaggagauaggaaauggcugcuucgaguuuuaucauaaauguaacgaugaaugcauggagucagugaagaaugggacauacgacuaucccaaauacagugaagaguccaagcucaaccgugagaaaauugauggagucaagcuggaaagcauggagguguaucagaucuuagccaucuacucuacuguugcaucaagucugguguuccuaguagcucucggugccauuugcuuuuggauguguagcaauggcucccugcagugcaagaucuguauuuga

SEQ ID NO: 134390 - RNA, 1698 nt, Artificial Sequence
  derived and/or modified CDS sequence (opt3) from hemagglutinin__InfluenzaA__ADV69083
augaaggugaaacugaugguccuccuuugcaccuucacagccacuuacgcugacacgaucuguguuggcuaucacgcaaacaauagcaccgauacaguggacacuguacuggagaagaacgugaccgucacacauuccgugaauuuguuagaagauucucacaacgggaaacugugccuacucaagggaauugcgccccugcagcuugguucauguaguguugccggcuggauacuggggaauccugagugcgaauugcucaucagcaaagaguccuggucuuacauuguggaaaccccaaacccggagaauggaacuuguuaucccggcuacuuuacagacuaugaggaacugagagagcaacugucgucagucagcaguuucaagagguuugaaaucuucccuaaggaguccucuuggccaaaccauaaugugaccgguguaagcuccucaugcagucacaacgggaaaagcucuuuuuaccggaaucucuuauggcugacgguuaagaacggacuuuaucccaauuuguccaaaucauacacuaacaagaaagagaaggaagugcugguccuauggggcgugcaucacccuagcaauauuggcgaucagcgcgcucucuaccacaccgagaacgccuaugugagugucguuucuucccauuacagccgacguuucacaccagaaaucgcaaagagacccaaagugaggaaccaggaggggcggauaaauuauuacuggacucugcuugaaccuggagacaccaucauucuggaggccaacgguaauuugaucgcuccacgcuaugcauuugagcucucgaagggccuggggucuggaauuaucacauccaacgccccgaugggcgaauguaaugcuaaaugccagacgccccaaggugccauaaacucaaguuuaccuuuccagaauguacacccagugaccauuggggagugucccaaguacgucaaaagcgcgaagcugagaauggugacuggacucaggaacacaccuuccauccagucucggggccuuuuuggcgcaauugccggguucaucgaaggagguuggaccggcaugguugaugggugguauggauaccaucaccagaaugagcaaggcagcgguuacgcugccgaccagcagucaacucagaacgcaaucaaugggauuacaaacaaagugaauagugucauagaaaagaugaacacccaauuuacggcugugggcaaggaguucaauaaacuggagcgccgaauggaaaacuugaacaagaaaguagaugacggauuucuagauaucuggaccuauaaugccgagcugcucguucugcuugaaaacgagagaacacuggacuuccacgauuccaaugugaagaacuuguacgaaaaagucaagagccagcucaagaauaacgcgaaagagauuggcaaugggugcuucgaguuuuaucauaaguguaacgacgaaugcauggagucugugaaaaauggaacuuacgacuauccaaaguacucagaagagaguaaacugaacagggagaagaucgauggugucaaguuagaaagcaugggcguguauaauauacuggccauuuacuccaccguugcaucuucgcuagugcuccugguaagccuuggggcuaucuccuucuggaugugcucaaacggaaguuugcagugucggaucugcauuuga

SEQ ID NO: 134391 - RNA, 1698 nt, Artificial Sequence
  derived and/or modified CDS sequence (opt3) from hemagglutinin__InfluenzaA__ADV69084
augaaggugaaacugaugguccuccuuugcaccuucacagccacuuacgcugacacgaucuguguuggcuaucacgcaaacaauagcaccgauacaguggacacuguacuggagaagaacgugaccgucacacauuccgugaauuuguuagaagauucucacaacgggaaacugugccuacucaagggaauugcgccccugcagcuugguucauguaguguugccggcuggauacuggggaauccugagugcgaauugcucaucagcaaagaguccuggucuuacauuguggaaaccccaaacccggagaauggaacuuguuaucccggcuacuuuacagacuaugaggaacugagagagcaacugucgucagucagcaguuucaagagguuugaaaucuucccuaaggaguccucuuggccaaaccauaaugugaccgguguaagcuccucaugcagucacaacgggaaaagcucuuuuuaccggaaucucuuauggcugacgguuaagaacggacuuuaucccaauuuguccaaaucauacacuaacaagaaagagaaggaagugcugauucuauggggcguccaucacccuagcaauauccgcgaucagcgagcucucuacuauaccgagaacgccuacgugaguguggucucuucccacuauagccguagauucacaccagaaauagcaaagaggcccaaaguucggaaccaggagggccgcaucaauuacuauuggacucugcuugaaccuggggacaccauuaucuuugaggccaacggaaaucugauugcuccaagauacgcauucgaguugucgaaggguuuuggcucugggaucauaacauccgaugccccgaugggagaauguaacgcuaaaugccagacgccccaaggcgccauuaauucaagucucccuuuccagaacgugcauccaguaaccaucggugagugucccaaguaugugaggagcgcgaaacugcggauggucacuggguuacgcaauacaccuuccauucagucucgaggacuguuuggcgcaaucgccggcuucaucgaagggggauggaccgguaugguggacggcugguacggguaccaccaucagaacgagcaaggaagcggcuaugcugccgaucagcagucaacucagaaugcaauuaacgguauaacaaauaagguuaacagugugaucgaaaagaugaauacccaauuuacggcugucgggaaagaguucaacaagcucgagagaaggauggaaaaucuuaacaaaaagauugacgauggcuuccuggacaucuggaccuacaacgccgaguugcuagugcugcucgaaaaugagcggacacuggauuuucacgacuccaacguuaaaaaucuuuaugaaaagguaaaaagccagcugaagaacaaugcgaaggagauaggaaacggcugcuucgaguuuuaccacaaauguaaugacgaaugcauggagucugugaagaacgggacuuaugauuacccaaaauauucagaagagaguaaguugaaucgugagaaaauugacggagucaagcucgaaagcauggguguguacaacauccuggccaucuacuccaccgucgcaucuucguuagugcugcuaguuagccucggcgcuauuuccuucuggaugugcucaaaugggagucugcagugucgcaucugcauuuga

SEQ ID NO: 134392 - RNA, 1698 nt, Artificial Sequence
  derived and/or modified CDS sequence (opt3) from hemagglutinin__InfluenzaA__ADV69085
augaaggugaaacugaugguccuccuuugcaccuucacagccacuuacgcugacacgaucuguguuggcuaucacgcaaacaauagcaccgauacaguggacacuguacuggagaagaacgugaccgucacacauuccgugaauuuguuagaagauucucacaacgggaaacugugccuacucaagggaauugcgccccugcagcuugguucauguaguguugccggcuggauacuggggaauccugagugcgaauugcucaucagcaaagaguccuggucuuacauuguggaaaccccaaacccggagaauggaacuuguuaucccggcuacuuuacagacuaugaggaacugagagagcaacugucgucagucagcaguuucaagagguuugaaaucuucccuaaggaguccucuuggccaaaccauaccgugacggguguaagcuccucaugcagucacaaugggaaaagcucuuuuuaccggaaccucuuauggcugacuaugaagaauggacuuuaucccaacuuguccaaaucauacaccaauaagaaagagaaggaaguucuggugcuauggggcguccaucacccuagcaacauuggcgaucagcgcgcucucuaccacacagagaaugccuaugugaguguggucucuucccauuacagccgacguuucacuccagaaaucgcaaagagacccaaaguuaggaaccaggaggggcggauaaacuauuacuggacccugcuugaaccuggagacacaaucauuuuugaggccaaugguaaccugaucgcuccacgcuaugcauucgaguugucgaagggcuuugggucuggaauuaucaccuccaaugccccgaugggcgaauguaacgcuaaaugccagacgccccaaggugccauaaauucaagucucccuuuccagaacgugcacccaguaacuauuggggagugucccaaguacgugagaagcuccaaacugaggauggucacaggauuacggaauaccccuucuauccagagccgcggccuguuuggcgcgauugcaggguucaucgaaggagguuggacuggcaugguggaugggugguauggauaccaucaccagaacgagcaaggcucagguuacgccgcugaccagcagaguacacagaaugccaucaacgggauuaccaauaagguuaacuccgugauagaaaagaugaauacgcaauuuaccgcagucggcaaagaguucaacaagcucgagcgaagaauggaaaaucuuaacaaaaagaucgaugacggauuccuggauauuuggacauauaacgcugaguugcuagugcugcucgaaaaugagaggacucuggacuuucacgauagcaacguuaaaaaucuuuacgaaaagguaaaaucucagcugaagaacaaugccaaggagaucggcaacgggugcuucgaguuuuaucauaaauguaaugacgaaugcauggagucagugaagaacggaaccuacgacuauccaaaauacagugaagagagcaaguugaaucgggagaaaauagauggugucaagcucgaauccaugggcguguauaacauucuggcgaucuacucuacagucgccucgagcuuagugcugcuaguuucccucggggcaaucucauucuggaugugcaguaauggaucucugcagugucguauuugcaucuga

SEQ ID NO: 134393 - RNA, 1698 nt, Artificial Sequence
  derived and/or modified CDS sequence (opt3) from hemagglutinin__InfluenzaA__ADV69086
augaaggugaaacugcucguccuucugugcaccuucacagccacuuacgcugacacgaucuguauuggcuaucacgcaaacaauagcaccgauacaguugacacuguguuggagaagaacguaaccgugacacauuccgucaauuuacuggaagauucucacaacgggaaacuaugccuccugaagggaauagcgccccuucagcuggguaauuguaacguggccggcuggaucuuggggaauccugagugcgaacuccugauuucaaaagagaguuggagcuacaucguugaaaccccaaacccggagaauggaacuuguuaucccggcuacuuuacagacuaugaggaacugagagagcaacucuccucugugucgucauucaagagguuugaaauuuucccuaaggagagcaguuggccaaaacauaccgucacggguguguccgcuucuugcagccacaacgggaaguccucauuuuaccggaauuuacuguggcuuacuggaaagaacggcuuguaucccaaucugaguaagagcuacaccaacgauaaagagaaggaaguucuaguacucuggggcgugcaucacccuucuaauaucggggaccagcgcgcccuguaccacaaggagaacgcauaugucuccguggugucaagccauuacagucgacguuucacaccagaaauagucaaaagacccaagguuagggaucaggagggacggaucaacuauuacuggacucuucuggaaccuggugacaccauuaucuuugaggccaauggcaacuugauugcuccacgcuaugcauucgcccucucuagaggguuuggauccggcaucauaacaagcaaugcuccgauggaugaguguaacaccaaaugccagacgccccaaggugccauuaauucgucucugccuuuccagaacgugcacccaguaacuaucggggaaugucccaaguacgugaaauccgcgaaguuaaggauggucacaggacugcggaauaccccuucaauucagagucgcggccucuuuggcgcaaucgccggguucaucgagggagguuggacuggcaugguggacgggugguauggauaccaucaccagaacgaacaaggcagcgguuacgcugccgaucagaaauccacacagaaugcaauuaacgggauaaccaauaagguuaacucugugaucgagaagaugaauacgcaguuuaccgcugucggcaaagaguucaacaaacuugaacgaagaauggagaaucugaacaaaaagguggacgauggauucuuggacauuuggacauauaacgccgaacuacugguacuccuggagaaugaaaggacucuugacuuucacgauagcaacguuaaaaaucuguacgagaaggugaagucacaauugaaaaacaaugcgaaggaaaucggcaacgggugcuucgaguuuuaucauaaauguaaugacgagugcauggaaagugucaagaacggaaccuacgauuauccaaaauacuccgaggaaagcaagcucaaucgggagaagauagacggugugaaacuggagucuauggaagucuaucagauuuuagccaucuacucaacaguggcaaguagccugguuuuccuagugucccucggcgcuaucugcuuuuggauguguucuaacgggucgcugcagugccguauuuguaucuga

SEQ ID NO: 134394 - RNA, 1698 nt, Artificial Sequence
  derived and/or modified CDS sequence (opt3) from hemagglutinin__InfluenzaA__ADV69087
augaaggugaaacugaugguccuccuuugcaccuucacagccacuuacgcugacacgaucuguguuggcuaucacgcaaacaauagcaccgauacaguggacacuguacuggagaagaacgugaccgucacacauuccgugaauuuguuagaagauucucacaacgggaaacugugccuacucaagggaauugcgccccugcagcuugguucauguaguguugccggcuggauacuggggaauccugagugcgaauugcucaucagcaaagaguccuggucuuacauuguggaaaccccaaacccggagaauggaacuuguuaucccggcuacuuuacagacuaugaggaacugagagagcaacugucgucagucagcaguuucaagagguuugaaaucuucccuaaggaguccucuuggccaaaccauaccgugaaugguguaagcuccucaugcagucacaacggggagagcucuuuuuaccggaaucucuuauggcugacgguuaaagauggacuuuaucccaacuuguccaagucauacacuaauaaaaaggaaaaagaggugcugguccuauggggcgugcaucacccuagcaacauuggcgaccagcgcgcucucuaccacaccgaaaaugccuaugugagugucguuucuucccauuacagccgacguuucacaccagagaucgcaaagagacccaaggugaggaaccaggaagggcggauaaacuauuacuggacucugcuugagccuggagauaccaucauuuuugaggccaaugguaaccugaucgcuccacgcuaugcauucgaauugucgaaaggcuuugggucuggaauuaucacauccaaugccccgaugggcgaguguaacgcuaagugccagacgccccaaggugccauaaauucaagucucccuuuccagaacguacacccagugaccauuggggaaugucccaaauacgucagaagcacuaagcugaggauggugacaggauuacggaauaccccuuccauccagucucgcggccuguuuggcgcgauugcaggguucaucgagggagguuggacuggcaugguugacgggugguauggauaccaucaccagaacgaacaaggcagcgguuacgccgcugaucagcagucaacacagaaugccaucaacgggauuaccaauaaagugaacagugucauagagaagaugaauacgcaauuuaccgcagugggcaaagaguucaacaagcucgaacgaagaauggagaaucuuaacaagaaaaucgacgauggauuccuggacauuuggacauauaacgcugaauugcuaguacugcucgagaaugaaaggacucuggauuuucacgacuccaacguuaagaaucuuuacgagaaagucaagagccagcugaaaaacaaugccaaggagaucggcaacgggugcuucgaauuuuaucauaaguguaaugacgagugcauggaaucugugaaaaacggaaccuacgauuauccaaaguacucagaggagaguaaauugaaucgggaaaagauagacggugugaaacucgagagcaugggcgucuauaacauucuggcgaucuacuccacaguggccucuucguuaguucugcuagugagccucggggcaaucuccuucuggaugugcucaaauggaagucugcagugucguauuugcaucuga

SEQ ID NO: 134395 - RNA, 1698 nt, Artificial Sequence
  derived and/or modified CDS sequence (opt3) from hemagglutinin__InfluenzaA__ADV69088
augaaggugaaacugcucauccuucugugcaccuucacagccacuuacgcugacacgauuuguauaggcuaucacgcaaacaauagcaccgauacagucgacacuguuuuggagaagaacgugaccguaacacauuccgugaauuuacuggaagauucucacaacgggaaacuaugccuccugaagggaaucgcgccccuucagcuggguaauuguucagucaccggcuggauuuuggggaacccugagugcgaacuccugaucaguaaaaagagcugguccuacauuguggagacuccaaauccggaaaacggagccuguuaucccggcuacuuugcugacuaugaggagcugagagaacaacucucuucgguuagcagcuucgagagguuugaaaucuucccuaaggagaguuccuggccaaaucauaacgugaauggugucucugccagcugcucccacaacgggaaaucaaguuuuuaccggaauuuacuguggcuuacaggaaagaacggcuuguaucccagccugaccaaaucuuacgcaaaugauaaggagaaagaagugcuaauacucuggggcguacaucacccuuccaacaucggggaccagcgcacgcuguaccacacugagaacgccuauguuucagugaugagcagucauuacucucgacguuucaccccagaaauuuccaagagacccaaggucagggaucaggagggacggaucaauuauuacuggacacuucuggaaccuggugacacuauuaucuuugaggcuaacggcaauuugauagcaccaugguaugccuucgcucucagccgcggguuuggaucgggcauuaucaccucuuccgccccgauggaugcgugugacgcaaaaugccagacaccccaaggugccauuaacucaagucugccuuuccagaaugugcacccagugaccaucggggagugucccaaguacgucagaagcacgaaauuaaggaugguuacuggacugcggaacaucccuuccauucagucucgcggccucuuuggcgcuauagccggguucaucgaaggagguuggacaggcaugguggaugggugguauggauaccaucaccagaaugagcaaggcagcgguuacgcagcugaccaggaaucaacccagaacgcccuucacgggauuacuaauaagguaaacagugugaucgagaaaaugaauacacaguuuaccgcggucggcaaggaguucaacaaacuggaacgaagaauggagaauuugaacaagaagguggaugacggauuccuagacauauggacguauaaugccgaacugcucguucugcuugagaacgaaaggacccuggauuuucaugacuccaacgugaaaucauuguacgagaaggucaaaauucaacucaagaauaacgcaaaagaaaucggcaaugggugcuucgaguuuuaucacaaguguaacaaugagugcauggaaucugugcggaacggaacauacgauuauccaaaguacucagaggaaaguaaacugaaucgugagaagaucgacgguguaaaauuagauagcaugggcguuuaucagauucuggcuaucuacuccacuguggccucuucgcuaguccuccuggugagccuuggggcuauuuccuucuggaugugcucaaacggaaguuugcagugucgcauaugcaucuga

SEQ ID NO: 134396 - RNA, 1698 nt, Artificial Sequence
  derived and/or modified CDS sequence (opt3) from hemagglutinin__InfluenzaA__ADV69089
augaaggugaaacugcucauccuucugugcaccuucacagccacuuacgcugacacgauuuguauaggcuaucacgcaaacaauagcaccgauacagucgacacuguuuuggagaagaacgugaccguaacacauuccgugaauuuacuggaagauucucacaacgggaaacuaugccuccugaagggaaucgcgccccuucagcuggguaauuguucagucgccggcuggauuuuggggaacccugagugcgaacuccugaucaguaaaaagagcugguccuacauuguggagaccccaaauccggaaaacggagcuuguuaucccggcuacuuugccgacuaugaggagcugagagaacaacucucuucgguuagcucauucgagagguuugaaaucuucccuaaggagaguuccuggccaaaucauaacgugaauggugucucugcaagcugcucccacaacgggaaaucaaguuuuuaccggaauuuacuguggcuuacuggaaagaacggcuuguaucccaaucugacaaaaagcuacgccaacaacaaggagaaagaagugcuaauacucuggggcguacaucacccuucuaauaucggggaucagcgcacccuguaccacacggagaacgcuuauguuuccgugaugucaagccauuacagucgacguuucacuccagaaauuaccaagagacccaagaucagggaccaggagggacggauuaauuauuacuggacacuucuggaaccuggugauacuaucauauaugaggcaaacggcaauuugauugccccaugguacgcuuuugcccucucucgcggguucggauccggcaucauuaccagcucggcgccgauggacgagugugaugcaaaaugccagacaccccaaggugccaucaacucuucccugccuuuucagaauguccacccagugaccaucggggaaugucccaaguaugugagaucagcuaaauuaaggauggucacgggacugcggaacauuccuaguauacagagccgcggccucuucggcgccaucgcaggguuuauugagggagguuggacuggcaugguuaaugggugguacggauaccgacuucauaacgaccagggcuccgguuaugcugccgaucaaaagucuacacagaaugcgcugaacgggaucaccaauaaagugaacagcguaauagaaaagaugaauacucaguucacagccgugggcaaagaguuuaacaaguuggaaagaaggauggagaaccuaaauaagaaagucgacgauggauuccuggacauuuggaccuacaacgcagagaugcucgugcugcuugaaaaugagcggacgcuggacuuccacgauucaaacguuaagaguuuguaugaacgugugaaaauccagcucaagaauaacgcuaaagagaucggcaaugggugcuuugaguucuaccacaaguguaacaaugaaugcauggaguccguccgcaacggaaccuaugacuacccaaaguauagcgaagagucuaaacugaauagagaaaagauugauggugugaaauuagacucaaugggcguauaccaaauccuggccauuuacaguacaguugcuagcucccuagugcuccuggucucucuuggggccauaucguuuuggaugugcagcaacggauccuugcaguguaggaucugcauuuga

SEQ ID NO: 134397 - RNA, 1698 nt, Artificial Sequence
  derived and/or modified CDS sequence (opt3) from hemagglutinin__InfluenzaA__ADV69090
augaaggugaaacugcucguccuucugugcaccuucacagccacuuacgcugacacgaucuguauuggcuaucacgcaaacaauagcaccgauacaguugacacuguguuggagaagaacguaaccgugacacauuccgucaauuuacuggaagauucucacaacgggaaacuaugccuccugaagggaauagcgccccuucagcuggguaauuguucaguggccggcuggaucuuggggaacccugagugcgaaagucucauuagcaaagaguccuggucuuacaucguugaaaccccaaauccggagaacggaacuuguuaucccggcuacuuugcugacuaugaggaacugagagagcaacugucgucagugagcaguuucgaaagguuugagauuuucccuaaggaguccucuuggccaaaucauacagucaccggugugagcgccuccugcucacacaacgggaagaguagcuuuuaccggaaucucuuauggcugacgcgcaaaaacggacuuuaucccaauuugucuaaguccuacgcaaacaauaaagaaaaggagguacugguucuauggggcgugcaucacccuccaaaccucggcgaucagcgagcccuguaccacacugaaaacgcuuaugucucaguggugagcagucauuacucucguagauucacccccgagaucgcaaaaaggccuaagguccgggaccaggaagggcgcauaaauuauuacuggacacuucuggagccaggagauacuaucauuuuugaggccaacgguaauuugaucgcuccgagauucgccuuugcgcucuccaggggcuucgggagcggaauuaucaccucgaacgcacccauggacgaaugugaugccaagugccagacaccucaaggcgcuauaaauucuucccugccauuucagaacguucaccccgugaccauuggugaguguccuaaauauguacggucaacgaaguuacgcauggugacugggcugcgaaauaucccaaguauucagagcagaggacucuucggcgccaucgcaggcuuuaucgaagggggauggacagguauggucgacggcugguacggguaucaucaccagaacgagcaaggauccggcuacgcugccgaucagaaaucuacccagaaugcgauuaacgguauaacuaauaaggugaacagcguuaucgaaaagaugaauacacaguucaccgccguggggaaagaguucaacaaacuugagaggcggauggaaaaucugaacaagaaggucgacgauggcuuuuuggacauuuggacguacaacgcagagcuacuggugcuccuggaaaaugagcguacccuugacuuccacgauucaaacguuaaaaaucuguaugaaaagguaaaaagucaauugaagaacaaugcuaaagagaucggaaacggcugcuuugaguucuaccauaaguguaaugacgaaugcauggaguccgugaagaacgggacauaugauuaccccaaauauagcgaagagucuaagcucaaucgcgagaaaauagacggagucaagcuggaaucaauggguguguaccagauuuuagccaucuauaguacugucgcuagcucccuggugcuacucguuucucugggcgccaucucguuuuggaugugcagcaacgggucccuucaguguagaauuugcaucuga

SEQ ID NO: 134398 - RNA, 1698 nt, Artificial Sequence
  derived and/or modified CDS sequence (opt3) from hemagglutinin__InfluenzaA__ADV69091
augaaggugaaacugcucguccuucugugcaccuucacagccacuuacgcugacacgaucuguauuggcuaucacgcaaacaauagcaccgauacaguugacacuguguuggagaagaacguaaccgugacacauuccgucaauuuacuggaagauucucacaacgggaaacuaugccuccugaagggaauagcgccccuucagcuggguaauuguaacguggccggcuggaucuuggggaauccugagugcgaacuccugauuucaaaagagaguuggagcuacaucguugaaaccccaaacccggagaauggaacuuguuaucccggcuacuuuacagacuaugaggaacugagagagcaacucuccucugugucgucauucaagagguuugaaauuuucccuaaggagagcaguuggccaaaccauaccgucacggguguguccgcuucuugcagccacaaugggaaauccucauuuuaccggaacuuacuguggcuuacucgcaagaauggauuguaucccaaccugaguaaaagcuacaccaaugauaaggagaaagaaguucuaguacucuggggcgugcaucacccuucuaacaucggcgaccagcgagcccuguaccacaaggagaacgcauaugucuccguggugucaagccauuacagucguagauucacaccagaaauagucaagaggcccaaaguucgggaucaggaggggcgcaucaauuauuacuggacucuucuggaaccuggagacaccauuaucuuugaggccaacgguaauuugauugcuccaagauaugcauucgcccucucuaggggcuuuggguccggaaucauaacaagcaacgcuccgauggaugaguguaauaccaagugccagacgccccaaggcgccauuaacucgucucugccuuuccagaaugugcacccaguaacuaucggugaaugucccaaauacgugaaguccgcgaaauuacggauggucacagggcugcgcaacaccccuucaauucagagucgaggacucuuuggcgcaaucgccggcuucaucgaagggggauggacugguaugguggacggcugguauggguaccaucaccagaaugaacaaggaagcggcuacgcugccgaucagaaguccacacagaacgcaauuaaugguauaaccaacaaaguuaauucugugaucgagaagaugaacacgcaguuuaccgcugucgggaaggaguucaauaaacuugagagaaggauggagaaccugaacaagaaaguggacgauggcuucuuggacauuuggacauauaaugccgaacuacugguacuccuggagaacgaacggacucuugacuuucacgauagcaauguuaagaaccuguacgagaaagugaagaaucaauugaagaacaaugcgaaagaaaucggaaacggcugcuucgaguuuuaucauaaguguaaugacgagugcauggaaucagucaaaaacgggaccuacgauuauccaaaguacagugaggaauccaaacucaaucgugagaagauagacggagugaagcuggagagcauggaagucuaucagauuuuagccaucuacucuacaguggcaucaagucugguuuuccuagugagccucggugcuaucugcuuuuggauguguuccaacggcucucugcagugccgcauuuguaucuga

SEQ ID NO: 134399 - RNA, 1698 nt, Artificial Sequence
  derived and/or modified CDS sequence (opt3) from hemagglutinin__InfluenzaA__ADV69092
augaaggugaaacugcucguccuucugugcaccuucacagccacuuacgcugacacgaucuguauuggcuaucacgcaaacaauagcaccgauacaguugacacuguguuggagaagaacguaaccgugacacauuccgucaauuuacuggaagauucucacaacgggaaacuaugccuccugaagggaauagcgccccuucagcuggguaauuguaacguggccggcuggaucuuggggaauccugagugcgaacuccugauuucaaaagagaguuggagcuacaucguugaaaccccaaacccggagaauggaacuuguuaucccggcuacuuuacagacuaugaggaacugagagagcaacucuccucugugucgucauucaagagguuugaaauuuucccuaaggagagcaguuggccaaaccauaccgucacggguguguccgcuucuugcagccacaaugggaaauccucauuuuaccggaacuuacuguggcuuacuggaaagaauggcuuguaucccaaccugaguaaaagcuacaccaaugauaaggagaaagaaguucuaguacucuggggcgugcaucacccuucuaacaucggggaccagcgcgcccuguaccacaaggagaacgcauaugucuccguggugucaagccauuacagucgacguuucacaccagaaauagucaagagacccaaaguuagggaucaggagggacggaucaauuauuacuggacucuucuggaaccuggugacaccauuaucuuugaggccaacggcaauuugauugcuccacgcuaugcauucgcccucucuagaggguuuggauccggcaucauaacaagcaacgcuccgauggaugaguguaauaccaagugccagacgccccaaggugccauuaacucgucucugccuuuccagaaugugcacccaguaacuaucggggaaugucccaaauacgugaaguccgcgaaauuaaggauggucacaggacugcggaacacccucucaauucagaguaagggccuuuuuggcgcaaucgccggguucaucgagggagguuggacuggcaugguggacgggugguauggauaccaucaccagaaugaacaaggcagcgguuacgcugccgaucagaaauccacacagaacgcaauuaaugggauaaccaacaagguuaauucugugaucgagaagaugaacacgcaguuuaccgcugucggcaaagaguucaauaagcuggaacgccgaauggagaacuugaacaaaaagguggacgauggauuccuagacauuuggacauauaaugccgaacugcucguacugcuugagaacgaaagaacucuggacuuucacgauagcaauguuaaaaacuuguacgagaaggugaagucacaacucaaaaauaacgcgaaggaaaucggcaaugggugcuucgaguuuuaucauaaauguaacgacgagugcauggaaagugucaagaauggaaccuacgauuauccuaaauacuccgaggaaagcaagcugaacagggagaagauagacggugugaaauuagagucuauggaagucuaucagauucuggccaucuacucaacaguggcaaguagccuaguuuuccucgugucccugggcgcuaucugcuuuuggauguguucuaaugggucgcuucagugccggauuuguaucuga

SEQ ID NO: 134400 - RNA, 1698 nt, Artificial Sequence
  derived and/or modified CDS sequence (opt3) from hemagglutinin__InfluenzaA__ADV69093
augaaggugaaacugaugguccuccuuugcaccuucacagccacuuacgcugacacgaucuguguuggcuaucacgcaaacaauagcaccgauacaguggacacuguacuggagaagaacgugaccgucacacauuccgugaauuuguuagaagauucucacaacgggaaacugugccuacucaagggaauugcgccccugcagcuugguucauguaguguugccggcuggauacuggggaauccugagugcgaauugcucaucagcaaagaguccuggucuuacauuguggaaaccccaaacccggagaauggaacuuguuaucccggcuacgucacagacuaugaggaacugagagagcaacugucgucagugagcaguuuuaagagguucgaaaucuuuccuaaggaguccucuuggccaaaccauaccguaacggguguuagcuccucaugcagucacaaugggaaaagcucuuucuaccggaaccucuuauggcugacugugaagaauggacuuuaucccaacuuguccaaaucauacaccaauaagaaagagaaggaaguccuggugcuauggggcgugcaucacccuagcaacauuggcgaucagcgcgcucucuaccacacagagaaugccuaugucaguguugugucuucccauuacagccgacguuuuacuccagaaaucgcaaagagacccaaaguaaggaaccaggaggggcggauaaacuauuacuggacccugcuugaaccuggagacacaaucauuuucgaggccaaugguaaccugaucgcuccacgcuaugcauuugaguugucgaagggcuucgggucuggaauuaucaccuccaaugccccgaugggcgaauguaacgcuaaaugccagacgccccaaggugccauaaauucaagucucccuuuucagaacgugcacccagucacuauuggggagugucccaaguacgugaaaagcgcgaagcugagaaugguuacaggauuaaggaauaccccuuccauccagucucggggccuguucggcgcaauugccggguuuaucgaaggagguuggacuggcaugguggaugggugguauggauaccaucaccagaacgagcaaggcagcgguuacgcugccgaccagcagucaacacagaaugcaaucaacgggauuaccaauaaagucaacagugugauagaaaagaugaauacgcaauucaccgcuguaggcaaggaguuuaacaaacucgagcgccgaauggaaaaucuuaacaagagaguugaugacggauuccuggauaucuggacauauaacgccgaguugcuagugcugcucgaaaaugagaggacucuggacuuccacgauuccaacgucaaaaaucuuuacgaaaaggugaaaagccagcugaagaacaaugcgaaggagauuggcaacgggugcuuugaguucuaucauaaauguaaugacgaaugcauggagucugucaagaacggaaccuacgacuauccaaaauacucagaagagaguaaguugaaucgggagaaaaucgauggugugaagcucgaaagcaugggcguuuauaacauacuggccauuuacuccacaguggcaucuucguuaguacugcuagucagccucggggcuaucuccuuuuggaugugcucaaauggaagucugcagugucguaucugcauuuga

SEQ ID NO: 134401 - RNA, 1698 nt, Artificial Sequence
  derived and/or modified CDS sequence (opt3) from hemagglutinin__InfluenzaA__ADV69094
augaaggugaaacugaugguccuccuuugcaccuucacagccacuuacgcugacacgaucuguguuggcuaucacgcaaacaauagcaccgauacaguggacacuguacuggagaagaacgugaccgucacacauuccgugaauuuguuagaagauucucacaacgggaaacugugccuacucaagggaauugcgccccugcagcuugguucauguaguguugccggcuggauacuggggaauccugagugcgaauugcucaucagcaaagaguccuggucuuacauuguggaaaccccaaacccggagaauggaacuuguuaucccggcuacuuuacagacuaugaggaacugagagagcaacugucgucagucagcaguuucaagagguuugaaaucuucccuaaggaguccucuuggccaaaccauaccgugacggguguaagcuccucaugcagucacaaugggaaaagcucuuuuuaccggaaccucuuauggcugacuguuaagaauggacuuuaucccaacuuguccaaaucauacaccaauaagaaagagaaggaagugcugguccuauggggcgugcaucacccuagcaacauuggcgaucagcgcgcucucuaccacacagagaaugccuaugugagugucguuucuucccauuacagccgacguuucacuccagaaaucgcaaagagacccaaagugaggaaccaggaggggcggauaaacuauuacuggacccugcuugaaccuggagacacaaucauuuuugaggccaaugguaaccugaucgcuccacgcuaugcauucgaguugucgaagggcuuugggucuggaauuaucaccuccaaugccccgaugggcgaauguaacgcuaaaugccagacgccccaaggugccauaaauucaagucucccuuuccagaacguacacccagugacuauuggggagugucccaaguacgucaaaagcgcgaagcugagaauggugacaggauuaaggaauaccccuuccauccagucucggggccuguuuggcgcaauugccggguucaucgaaggagguuggacuggcaugguucaugggugguauggauaccaccaccagaacgagcaaggcagcgguuacgcugccgaacagcagucaacacaguaugcaaucaaugggauuaccaacaaagugaauagugucauagagaagaugaacacgcaauuuaccgcugugggcaaggaguucaauaaacucgaacgccgaauggagaaccuuaauaagagaguagaugacggauuccuggauaucuggacauacaacgccgaauugcuaguucugcucgagaacgaaaggacucuggacuuucaugauuccaaugugaaaaaccuuuaugagaaggucaaaagccagcugaagaauaacgcgaaggagauuggcaaugggugcuucgaauuuuaccacaaauguaacgacgagugcauggaaucugugaagaauggaaccuaugauuacccaaaauauucagaggagaguaaguugaaccgggagaaaaucgacggugucaagcucgaaagcaugggcguguacaauauacuggccauuuacuccacaguugcaucuucguuagugcugcuaguaagccucggggcuaucuccuucuggaugugcucaaacggaagucugcagugucguaucugcauuuga

SEQ ID NO: 134402 - RNA, 1698 nt, Artificial Sequence
  derived and/or modified CDS sequence (opt3) from hemagglutinin__InfluenzaA__ADV69095
augaaggugaaacugaugguccuccuuugcaccuucacagccacuuacgcugacacgaucuguguuggcuaucacgcaaacaauagcaccgauacaguggacacuguacuggagaagaacgugaccgucacacauuccgugaauuuguuagaagauucucacaacgggaaacugugccuacucaagggaauugcgccccugcagcuugguucauguaguguugccggcuggauacuggggaauccugagugcgaauugcucaucagcaaagaguccuggucuuacauuguggaaccaccgaaccccgagaauggaaccuguuauccuggcuacuuuacugacuaugaggaacugagagagcaacugucgucagucagcaguuucaagagguuugaaaucuucccaaaggaguccucuuggcccaaccauacagugaaugguguaagcuccucaugcagucacaacggggagagcucuuuuuaccggaaucucuuauggcugaccguuaaagauggacuuuauccuaacuuguccaagucauacacgaauaaaaaggaaaaagaggugcugguccuauggggcgugcaucacccaagcaacauuggcgaccagcgcgcucucuaccacacugaaaaugccuaugugagugucguuucuucccauuacagccgacguuucacccccgagaucgcaaagagaccuaaggugaggaaccaggaagggcggauaaacuauuacuggacacugcuugagccaggagauacuaucauuuuugaggccaaugguaaccugaucgcuccgcgcuaugcauucgaauugucgaaaggcuuugggucuggaauuaucaccuccaaugcccccaugggcgaguguaacgcuaagugccagacaccucaaggugccauaaauucaagucucccauuccagaacguacaccccgugaccauuggggaauguccuaaauacgucagaagcacgaagcugaggauggugacuggauuacggaauacaccauccauccagucucgcggccuguuuggcgcgauugcaggguucaucgagggagguuggaccggcaugguugacgggugguauggauaccaucaccagaacgaacaaggcagcgguuacgccgcugaucagcagucaacucagaaugccaucaacgggauuacaaauaaagugaacagugucauagagaagaugaauacccaauuuacggcagugggcaaagaguucaacaagcucgaacgaagaauggagaaucuuaacaagaaaaucgacgauggauuccuggacauuuggaccuauaacgcugaauugcuaguacugcucgagaaugaaaggacacuggauuuucacgacuccaacguuaagaaucuuuacgagaaagucaagagccagcugaaaaacaaugccaaggagaucggcaacgggugcuucgaauuuuaucauaaguguaaugacgagugcauggaaucugugaaaaacggaacuuacgauuaucccaaguacucagaggagaguaaauugaaucgggaaaagauagacggugugaaacucgagagcaugggcgucuauaacauucuggcgaucuacuccaccguggccucuucguuaguucugcuagugagccucggggcaaucuccuucuggaugugcucaaauggaagucugcagugucguauuugcaucuga

SEQ ID NO: 134403 - RNA, 1698 nt, Artificial Sequence
  derived and/or modified CDS sequence (opt3) from hemagglutinin__InfluenzaA__ADV69096
augaaggugaaacugaugguccuccuuugcaccuucacagccacuuacgcugacacgaucuguguuggcuaucacgcaaacaauagcaccgauacaguggacacuguacuggagaagaacgugaccgucacacauuccgugaauuuguuagaagauucucacaacgggaaacugugccuacucaagggaauugcgccccugcagcuugguucauguaguguugccggcuggauacuggggaauccugagugcgaauugcucaucagcaaagaguccuggucuuacauuguggaaaccccaaacccggagaauggaacuuguuaucccggcuacgucacagacuaugaggaacugagagagcaacugucgucagugagcaguuuuaagagguucgaaaucuuuccuaaggaguccucuuggccaaaccauaccguaacggguguuagcuccucaugcagucacaaugggaaaagcucuuucuaccggaaccucuuauggcugacugugaagaauggacuuuaucccaacuuguccaaaucauacaccaauaagaaagagaaggaaguccuggugcuauggggcgugcaucacccuagcaacauuggcgaucagcgcgcucucuaccacacagagaaugccuaugucaguguugugucuucccauuacagccgacguuuuacuccagaaaucgcaaagagacccaaaguaaggaaccaggaggggcggauaaacuauuacuggacccugcuugaaccuggagacacaaucauuuucgaggccaaugguaaccugaucgcuccacgcuaugcauuugaguugucgaagggcuucgggucuggaauuaucaccuccaaugccccgaugggcgaauguaacgcuaaaugccagacgcccaagggugccauaaauucaagucucccuuuucaaaacgugcacccagucacuauuggggagugucccaaauacguuaagagcgcgaaacugagaauggugacaggauuaaggaauaccccuuccauccagucucggggccuguucggcgcaauugccggguuuaucgaaggagguuggacuggcaugguggaugggugguauggauaccaucaccagaacgagcagggcagcgguuacgcugccgaccaacagucaacacagaaugcaaucaacgggauuaccaauaaggucaacagugugauagaaaagaugaauacgcaguucaccgcuguaggcaaagaguuuaacaagcucgagcgccgaauggaaaaucuuaacaaaaagguugaugacggauuccuggauaucuggacauauaacgccgaguugcuagugcugcucgaaaaugagagaacucuggacuuccacgaauccaacgucaaaaaucuuuacgagaaggucaagagccaacugaaaaacaaugcgaaggagauuggcaacgggugcuuugaguucuaucauaaauguaaugaugaaugcauggaaucugugaagaacggaaccuacgacuauccaaaauacucagaggagaguaaguugaauagggaaaagaucgacggugugaaacucgagagcaugggcguuuauaacauacuggccauuuacuccacaguggcaucuucguuaguacugcuagucagccucggggcuaucuccuuuuggaugugcucaaauggaagucugcagugucggaucugcauuuga

SEQ ID NO: 134404 - RNA, 1698 nt, Artificial Sequence
  derived and/or modified CDS sequence (opt3) from hemagglutinin__InfluenzaA__ADV69097
augaaggugaaacugcucauccuucugugcaccuucacagccacuuacgcugacacgauuuguauaggcuaucacgcaaacaauagcaccgauacagucgacacuguuuuggagaagaacgugaccguaacacauuccgugaauuuacuggaagauucucacaacgggaaacuaugccuccugaagggaaucgcgccccuucagcuggguaauuguucagucgccggcuggauuuuggggaacccugagugcgaacuccugaucaguaaaaagagcugguccuacauuguggagaccccaaauccgggaaacggcgcuuguuaucccgguuacuuugccgacuaugaggaacugagagagcaacucucuucgguuagcucauucgaaagguuugagaucuucccuaaggaaaguuccuggucuaaucauaacgugaauggggucagcgcauccugcucacacaacggaaaaaguagcuuuuaccggaauuuacuguggcuuacuggcaagaacggcuuguauccaacacugaccaaaucuuacgccaaugauaaggagaaagaggugcuaauacucuggggaguacaucaccccuccaacaucggggaccagcgcacgcuguaccacacugaaaacgcuuauguuucagugaugagcagucauuacucucgacguuucaccccugagauuuccaagagaccaaaggucagggaucaggaaggucggaucaauuauuacuggacacuucuggagcccggcgacacuauuaucuuugaagcaaacgggaauuugauagccccuugguaugcuuucgcccucagccgcggauuuggcucggguauuaucaccucuaacgcgccaauggaugagugugacgcaaaaugccagacaccgcaaggggccauuaauuccucacugcccuuccagaacauccacccugugaccaucggagaguguccaaaguacgugagaagugcuaaauuaaggauggucacgggccugcggaauacucccagcauucagucccgcggccucuuuggggccauagcaggauucaucgaagguggcuggacagggaugguugauggaugguauggcuaccaucaccagaacgagcaagguucuggguacgcugccgaccaggaaagcacccagaaugcgauuaacgagaucacuaauaaggaaaacucagugauagagaaaaugaauacacaguuuaccaguguaggcaaggaguucaacaaacuugaacgaagaauggagaaucugaacaagaagguggaugacggauucuuggacauuuggacguauaacgccgaacuacugguccuccuggagaaugaaaggacccuugauuuucacgacuccaacgugaaaagccuguacgagaagguuaaaauccaauugaagaauaacgcaaaagagaucggcaaugggugcuucgaauuuuaucauaaguguaacaaugagugcauggaaucugugcggaacggaacauacgauuauccuaaguacucagaggagaguaaacucaaucgugaaaagauugacggugucaaacuggauagcaugggcguguaucagaucuuagcuauuuacuccacuguagccucuucgcugguucuacucgugagccugggggcuauauccuucuggaugugcucaaacggaagucuucagugucgcaucugcauuuga

SEQ ID NO: 134405 - RNA, 1698 nt, Artificial Sequence
  derived and/or modified CDS sequence (opt3) from hemagglutinin__InfluenzaA__ADV69098
augaaggugaaacugaucguccuccuuugcaccuucacagccacuuacgcugacacgauuuguguuggcuaucacgcaaacaauagcaccgauacaguggacacuguacuggagaagaacgugaccgucacacauuccgugaauuuguuagaagauucucacaacgggaaacugugccuacucaagggaauagcgccccugcagcuugguucauguaguguugccggcuggauccuggggaauccugagugcgaauugcucauuagcaaagaguccuggucuuacaucguggaaaccccaaacccggagaauggaacuuguuaucccggcuacuuuacagacuaugaggaacugagagagcaacugucgucagucagcaguuucaagagguuugaaauuuucccuaaggaguccucuuggccaaaccauaccgugacggguguaagcuccucaugcagucacaaugggaacagcucuuuuuaccggaaucucuuauggcugacuguuaaaaacggacuuuaucccaauuuguccaagucauacaccaacaaaaaggagaaagaagugcugguccuauggggcgugcaucacccuagcaauaucgaggaucagcgcgcucucuaccacacagaaaacgccuaugugagugucguuucuucccauuacagccgacguuucaacccagagauagcaaagagacccaaggugaggaaucaggaaggccggaucaacuauuacuggacucugcuugagccuggggacaccauuaucuuugaggccaauggaaaccugauugcuccacgcuaugcauucgaauugucgaaagguuuuggcucugggaucauaacauccaaugccccgaugggagaguguaacgcuaagugccagacgccccaaggcgccauuaauucaaaccucccuuuccagaauguacacccagugaccaucggugaaugucccaaauacgucagaagugcgaagcugaggauggugacuggguuacggaacacaccuagcauucagucccgcggacuguuuggcgcaaucgccggcuucaucgaagggggauggaccgguaugguugauggcugguauggguaccaucaccacaaugagcagggaucuggcuacgcugccaaccagaaaagcacuccaaaugcaauuaacgguauaacaaauaaggugaacucagucaucgagaaaaugaacacccaauuuacggcuguggggaaggaguucaauaagcucgaacgaagaauggagaaccuuaauaaaaagguagacgauggcuuccuggacauuuggaccuauaacgccgaauugcuaguucugcucgagaaugaaaggacacuggauuuucaugacaguaacgugaaaaaucuuuacgagaagguccggucccagcugaaaaacaaugcgaaggagaucggaaacggcugcuucgaauuuuaucacaaguguaaugaugagugcauggaaagcgugaaaaacgggacuuacgacuaucccaaguacucugaggagucaaaauugaaucgugaaaagauagacggagucaaacucgagaguauggguguguauaacauucuggccaucuacagcaccguugcauccucuuuagugcugcuaguaucgcucggcgcuaucagcuucuggaugugcuccaaugggucacugcagugucgcauuugcaucuga

SEQ ID NO: 134406 - RNA, 1698 nt, Artificial Sequence
  derived and/or modified CDS sequence (opt3) from hemagglutinin__InfluenzaA__ADV69099
augaaggugaaacugaucguccuccuuugcaccuucacagccacuuacgcugacacgauuuguguuggcuaucacgcaaacaauagcaccgauacaguggacacuguacuggagaagaacgugaccgucacacauuccgugaauuuguuagaagauucucacaacgggaaacugugccuacucaagggaauagcgccccugcagcuugguucauguaguguugccggcuggauccuggggaauccugagugcgaauugcucauuagcaaagaguccuggucuuacaucguggaaaccccaaacccggagaauggaacuuguuaucccggcuacuuuacagacuaugaggaacugagagagcaacugucgucagucagcaguuucaagagguuugaaauuuucccuaaggaguccucuuggccaaaccauaccgugacggguguaagcuccucaugcagucacaaugggaacagcucuuuuuaccggaaucucuuauggcugacuguuaaaaacggacuuuaucccaauuuguccaagucauacaccaacaaaaaggagaaagaagugcugguccuauggggcgugcaucacccuagcaauaucgaggaucagcgcgcucucuaccacacagaaaacgccuaugugagugucguuucuucccauuacagccgacguuucaacccagagauagcaaagagacccaaggugaggaaucaggaaggccggaucaacuauuacuggacucugcuugagccuggggacaccauuaucuuugaggccaauggaaaccugauugcuccacgcuaugcauucgaauugucgaaagguuuuggcucugggaucauaacauccaaugccccgaugggagaguguaacgcuaagugccagacgccccaaggcgccauuaauucaaaccucccuuuccagaauguacacccagugaccaucggugaaugucccaaauacgucagaagugcgaagcugaggauggugacuggguuacggaacacaccuagcauucagucccgcggacuguuuggcgcaaucgccggcuucaucgaagggggauggaccgguaugguuaauggcugguauggguaccaucaccacaacgaacagggaucuggcuacgcugccaaucaacagagcccacccaacgcaauuaaugguauaacuaacaaagugaacucagucaucgagaagaugaauacacaguuuaccgcuguggggaaagaguucaacaagcucgaacgaagaauggagaaucuuaacaagaaaguagaugacggcuuccuggauauuuggacguauaaugccgaauugcuaguucugcucgagaacgaaaggacccuggacuuucaugauaguaaugugaagaaccuuuacgagaaaguccggucccagcugaagaauaacgcgaaagagaucggaaauggcugcuucgaauuuuaucacaaguguaacgacgagugcauggaaagcgugaagaaugggacauacgauuauccgaaauacucugaggagucaaaguugaaccgugagaaaauagacggagucaagcucgagaguauggguguguauaauauucuggccaucuacagcacuguugcauccucuuuagugcugcuaguaucgcucggcgcuaucagcuucuggaugugcuccaacgggucacugcaaugucgcauuugcaucuga

SEQ ID NO: 134407 - RNA, 1698 nt, Artificial Sequence
  derived and/or modified CDS sequence (opt3) from hemagglutinin__InfluenzaA__ADV69100
augaaggugaaacugcucauccuucugugcaccuucacagccacuuacgcugacacgauuuguauaggcuaucacgcaaacaauagcaccgauacagucgacacuguuuuggagaagaacgugaccguaacacauuccgugaauuuacuggaagauucucacaacgggaaacuaugccuccugaagggaaucgcaccccuucagcuggguaauuguucagucgcgggcuggauuuuggggaacccugagugcgaaagucucaucagcaaaaaguccuggucuuacauuguggagaccccaaagccggaaaauggaacuuguuaucccggcgaguuugcugacuacgaggaacugagagagcaacugucgucaguuagcaguuucgaaagguuugagaucuucccuaaagaguccucuuggccaaaccauacagccgccggugugagcgccuccugcucacacaauggggaacggaguuuuuauaagaaccucauaugguuaaccgucaaaaauggacuguaccccaaccuuagcaagucuuauaaaaaugauaaggagaaggaaguguugauccuguggggcguacaucacccuccaaacauugagaaucagcgcacgcuauaccacacugaaaacaccuacguuuccguggucucaagccauuauaguggccgauucacacccgagaucacuaaacguccuaaggugagagaccaggaggggaggauuaacuacuauuggacccuccuggaaccaggagauacaaucauauuugaggcuaaugguaaccuuauugcaccgugguacgccuucacccugucucggggcuugggguccggaaucgugacgagcaaugcucccauggacaaaugugaugccaagugccagacuccucacggcgcgauuaacucgucucucccauuucaaaauguccaucccguuacaaucggugaauguccuaaauaugugcgcuccgcaaagcugagaaugguaaccggguuaaggaacaucccaucaauucagagucggggacuguucggcgccauagcuggcuuuaucgaagggggauggacugguaugguggacggcugguacggguaucaccaccagaaugagcagggaagcggcuacgccgcagaucaagaguccacacagaacgcuauuaaugguaucaccaacaaagucaauucugugauagagaagaugaacacgcaguucaccgccguugggaaggaauuuaauaaacucgagcgccgaauggaaaaccuuaauaagaaaguggacgauggcuuccuggacauuuggacauacaacgcggaguugcuaguccugcucgaaaacgagagaacucuggacuuccaugauagcaaugugaagucacuuuaugagaaaguaaagagucagcugaagaacaaugccaaagaaaucggaaacggcugcuuugaguucuaccacaaguguaauaacgaaugcauggaguccguuaaaaaugggaccuaugacuaccccaaguauagcgaggaaucuaaauugaacagggagaagaucgauggagugaagcucgacucaaugggugucuaccggauucuggcaaucuauaguacaguggcuagcuccuuaguccugcuagugucucucggcgccauuucguuuuggaugugcagcaaugggucccugcaaugucguauaugcaucuga

SEQ ID NO: 134408 - RNA, 1698 nt, Artificial Sequence
  derived and/or modified CDS sequence (opt3) from hemagglutinin__InfluenzaA__ADV69101
augaaggugaaacugcucauccuuuucugcaccuuuacagccacuuacgcugacacgauuuguauaggcuaucacgcaaacaauagcaccgauacagucgacacuguucuggagaagaacgugaccguaacacauuccgugaauuuguuagaagauucucacaacgggaaacugugccuacucaagggaaucgcgccccugcagcuugguaauuguucagucgccggcuggauucuggggaacccugagugcgaaaguuugaucagcaaaaaguccuggucuuacauuguggagaccccaaauccggaaaacggagcuuguuaucccggcgaguucgccgacuacgaggaacucagagagcaacugucgucaguuagcaguuuugaaagguucgagaucuuuccuaaggaguccucuuggccaaaucauacugcaacaggugugagcgccuccugcucacacaacggggaacggaguuucuaucgcaaucugauauggcucaccgucaaaaacggauuauaccccaaucugagcaagucuuaugagaacgauaaagaaaaggaggugcuuaucuuguggggcguacaucacccuccaaauauugaaaaccagcgaacgcuguaccacacugagaacgcuuacguuuccguggucucaagccauuauaguggccguuuuacccccgagaucacaaaaagaccuaaggugagggaccaggaagggcggauuaauuacuauuggacucuacucgagccaggagauaccaucauauucgaagcaaacgguaaucugauugccccgugguacgcuuuuacacuuucucgcggccugggguccggaaucauuaccagcaacgcccccauggacgagugugauucgaagugccagacgccucaaggcgcgaucaauucuuccuugccauuccagaacgugcaccccgucacuaucggugaauguccuaaauauguuagaucagcaaagcucaggauggugacagggcugcggaauauuccaaguauacagagccgcggauuauuuggcgccaucgcuggcuucauugaagggggauggaccgguaugguagacggcugguacggguaucaucaccagaacgagcaaggauccggcuacgccgcagaucaggaaucuacucagaaugcuaucaacgguauaacaaauaaagugaacagcgucauugagaagaugaauccccaguuuaccgccguggggaaagaguucaacaagcuggagcgaagaauggaaaaucucaacaaaaagguugacgauggcuuccuugacaucuggacguacaacgcggagcuguuggugcuacuggagaaugaaaggacccucgacuuucacgauucaaacgucaagagucuguaugagaaagugaagucccaacuuaaaaauaacgccaaggaaaucggaaauggcugcuucgaguuuuaccauaaauguaacaaugagugcauggaaagcguaaagaacgggacauaugacuacccgaaguauucugaggaaucaaaacugaaucgggagaagauugauggaguuaaauuggacaguauggguguguaccguauccucgcaauuuauagcacugucgcuuccucucugguguuacuggucucgcuaggcgccaucagcuucuggaugugcuccaacgggucacuccagugucgcauaugcauuuga

SEQ ID NO: 134409 - RNA, 1698 nt, Artificial Sequence
  derived and/or modified CDS sequence (opt3) from hemagglutinin__InfluenzaA__ADV69102
augaaggugaaacugcucauccuuuucugcaccuuuacagccacuuacgcugacacgauuuguauaggcuaucacgcaaacaauagcaccgauacagucgacacuguucuggagaagaacgugaccguaacacauuccgugaauuuguuagaagauucucacaacgggaaacugugccuacucaagggaaucgcgccccugcagcuugguaauuguucagucgccggcuggauucuggggaacccugagugcgaaaguuugaucagcaaaaaguccuggucuuacauuguggagaccccaaauccggaaaacggagcuuguuaucccggcgaguucgccgacuacgaggaacucagagagcaacugucgucaguuagcaguuuugaaagguucgagaucuuuccuaaggaguccucuuggccaaaucauacugcaacaggugugagcgccuccugcucacacaacggggaacggaguuucuaucgcaaucugauauggcucaccgucaaaaacggauuauaccccaaucugagcaagucuuaugagaacgauaaagaaaaggaggugcuuaucuuguggggcguacaucacccuccaaauauugaaaaccagcgaacgcuguaccacacugagaacgcuuacguuuccguggucucaagccauuauaguggccguuuuacccccgagaucacaaaaagaccuaaggugagggaccaggaagggcggauuaauuacuauuggacucuacucgagccaggagauaccaucauauucgaagcaaacgguaaucugauugccccgugguacgcuuuuacacuuucuaccggccugggguccggaaucauuacgagcaacgcccccauggacgagugugauucgaagugccagacuccucaaggcgcgaucaauucuuccuugccauuccagaacgugcaccccgucacaaucggugaauguccuaaauauguucgcucagcaaagcucagaauggugaccgggcugaggaauauuccaaguauacagagccggggauuauuuggcgccaucgcuggcuucauugaagggggauggacugguaugguagacggcugguacggguaucaucaccagaacgagcaaggauccggcuacgccgcagaucaggaaucuacacagaaugcuaucaacgguauaaccaauaaagugaacagcgucauugagaagaugaauacgcaguuuaccgccguggggaaagaguucaacaagcuggagcgccgaauggaaaaucucaacaaaaagguugacgauggcuuccuugacaucuggacauacaacgcggagcuguuggugcuacuggagaaugaaagaacucucgacuuucacgauucaaacgucaagagucuguaugagaaagugaagucccaacuuaaaaauaacgccaaggaaaucggaaauggcugcuucgaguuuuaccauaaauguaacaaugagugcauggaaagcguaaagaacgggaccuaugacuaccccaaguauucugaggaaucaaaacugaauagggagaagauugauggaguuaaauuggacaguauggguguguaccggauccucgcaauuuauagcacagucgcuuccucucugguguuacuggucucgcuaggcgccaucagcuucuggaugugcuccaacgggucacuccagugucguauaugcauuuga

SEQ ID NO: 134410 - RNA, 1698 nt, Artificial Sequence
  derived and/or modified CDS sequence (opt3) from hemagglutinin__InfluenzaA__ADV69103
augaaggugaaacugaugguccuccuuugcaccuucacagccacuuacgcugacacgaucuguguuggcuaucacgcaaacaauagcaccgauacaguggacacuguacuggagaagaacgugaccgucacacauuccgugaauuuguuagaagauucucacaacgggaaacugugccuacucaagggaauugcgccccugcagcuugguucauguaguguugccggcuggauacuggggaauccugagugcgaauugcucaucagcaaagaguccuggucuuacauuguggaaaccccaaacccggagaauggaacuuguuaucccggcuacuuuacagacuaugaggaacugagagagcaacugucgucagucagcaguuucaagagguuugaaaucuucccuaaggaguccucuuggccaaaccauaaugugaccgguguaagcuccucaugcagucacaacgggaaaagcucuuuuuaccggaaucucuuauggcugacgguuaagaacggacuuuaucccaauuuguccaaaucauacacuaacaagaaagagaaggaagugcugguccuauggggcgugcaucacccuagcaauauuggcgaucagcgcgcucucuaccacaccgagaacgccuaugugagugucguuucuucccauuacagccgacguuucacaccagaaaucgcaaagagacccaaagugaggaaccaggaggggcggauaaauuauuacuggacucugcuugaaccuggagacaccaucauuuuugaggccaacgguaaucugaucgcuccacgcuaugcauucgaguugucgaagggcuuugggucuggaauuaucacauccaacgccccgauaggcgaauguaaugcuaaaugccagacgccccaaggugccauuaacucaagucucccuuuccagaauguaaacccagugaccaucggggagugucccaaguacgucaaaagcgcgaagcugagaauggugacuggauuaaggaauacaccuuccauucagucucggggccuguuuggcgcaaucgccggguucaucgaaggagguuggaccggcaugguugaugggugguauggauaccaccaucagaacgagcaaggcagcgguuacgcugccgaccagcagucaacucagaaugcaauuaacgggauaacaaauaaagugaacagugucaucgaaaagaugaauacccaauuuacggcugugggcaaggaguucaacaaacucgagcgccgaauggaaaaccuuaauaagaaaguagaugacggauuccuggauauuuggaccuauaacgccgaguugcuaguucugcucgaaaaugagagaacacuggacuuucacgauuccaacgugaagaaucuuuacgaaaaagucaagagccagcugaagaacaaugcgaaagagaucggcaacgggugcuucgaguuuuaucacaaguguaaugacgaaugcauggagucugugaaaaacggaacuuacgacuauccaaaguacucagaagagaguaaauugaauagggagaagauagauggugucaagcucgaaagcaugggcguguauaacauucuggccaucuacuccaccguugcaucuucguuagugcugcuaguaagccucggggcuaucuccuucuggaugugcucaaauggaagucugcagugucggauuugcaucuga

SEQ ID NO: 134411 - RNA, 1698 nt, Artificial Sequence
  derived and/or modified CDS sequence (opt3) from hemagglutinin__InfluenzaA__ADV69104
augaaggugaaacugcucauccuuuucugcaccuuuacagccacuuacgcugacacgauuuguauaggcuaucacgcaaacaauagcaccgauacagucgacacuguucuggagaagaacgugaccguaacacauuccgugaauuuguuagaagauucucacaacgggaaacugugccuacucaagggaaucgcgccccugcagcuugguaauuguucagucgccggcuggauucuggggaacccugagugcgaaaguuugaucagcaaaaaguccuggucuuacauuguggagaccccaaauccggaaaacggagcuuguuaucccggcgaguucgccgacuacgaggaacucagagagcaacugucgucaguuagcaguuuugaaagguucgagaucuuuccuaaggaguccucuuggccaaaucauacugcaacaggugugagcgccuccugcucacacaacggggaacggaguuucuaucgcaaucugauauggcucaccgucaaaaacggauuauaccccaaucugagcaagucuuaugagaacgauaaagaaaaggaggugcuuaucuuguggggcguacaucacccuccaaauauugaaaaccagcgaacgcuguaccacacugagaacgcuuacguuuccguggucucaagccauuauaguggccguuuuacccccgagaucacaaaaagaccuaaggugagggaccaggaagggcggauuaauuacuauuggacucuacucgagccaggagauaccaucauauucgaagcaaacgguaaucugauugccccgugguacgcuuuuacacuuucucgcggccugggguccggaaucauuaccagcaacgcccccauggacgagugugauucgaagugccagacgccucaaggcgcgaucaauucuuccuugccauuccagaacgugcaccccgucacuaucggugaauguccuaaauauguuagaucagcaaagcucaggauggugacagggcugcggaauauuccaaguauacagagccgcggauuauuuggcgccaucgcuggcuucauugaagggggauggaccgguaugguagacggcugguacggguaucaucaccagaacgagcaaggauccggcuacgccgcagaucaggaaucuacucagaaugcuaucaacgguauaacaaauaaagugaacagcgucauugagaagaugaauacccaguuuacggccguggggaaagaguucaacaagcuggagcgaagaauggaaaaucucaacaaaaagguugacgauggcuuccuugacaucuggaccuacaacgcggagcuguuggugcuacuggagaaugaaaggacacucgacuuucacgauucaaacgucaagagucuguaugagaaagugaagucccaacuuaaaaauaacgccaaggaaaucggaaauggcugcuucgaguuuuaccauaaauguaacaaugagugcauggaaagcguaaagaacgggacuuaugacuaccccaaguauucugaggaaucaaaacugaaucgggagaagauugauggaguuaaauuggacaguauggguguguaccguauccucgcaauuuauagcaccgucgcuuccucucugguguuacuggucucgcuaggcgccaucagcuucuggaugugcuccaacgggucacuccagugucgcauaugcauuuga

SEQ ID NO: 134412 - RNA, 1698 nt, Artificial Sequence
  derived and/or modified CDS sequence (opt3) from hemagglutinin__InfluenzaA__ADV69105
augaaggugaaacugcucauccuucugugcaccuucacagccacuuacgcugacacgauuuguauaggcuaucacgcaaacaauagcaccgauacagucgacacuguuuuggaaaagaacgugaccguaacacauuccgugaauuuacuggaagauucucacaacgggaaacuaugccuccugaagggaaucgcgccccuucagcuggguaauuguucagucgccggcuggauuuuggggaacccugagugcgaaagucucaucagcaaaaaguccuggucuuacauuguggagaccccaaauccggaaaacggagcuuguuaucccggcgaguuugccgacuacgaggaacugagagagcaacugucgucaguuagcaguuucgaaagguuugagaucuucccuaaggaguccucuuggccaaaucauacugcagccggugugagcgcuuccugcucacacaacggggaacggaguuuuuaucgcaaucucauaugguuaacagucaaaaacggacuguaccccaaucuuagcaagucuuauaaaaacgauaaggagaaagaaguguugaucauuuggggcguacaucacccuccaaauaucgagaaccagcgaacccuguaccacacggaaaacgcauacguuuccguggucucaagccauuauaguggccguuucacucccgagauuaccaagagaccuaaggugagggaccaggaggggcggaucaauuacuauuggacacuacucgaaccaggagauacuauaauuuuugaggccaacgguaaucugaucgcuccgugguacgccuucacccuuucucgcggccugggguccggaauuaucacaagcaacgcgcccauggacgaaugugaugcaaaaugccagaccccucaaggcgccaucaauucgucuuugccauuucagaacgugcaccccgucacgauuggugaguguccuaaguauguuagauccgcuaaacucaggauggugacugggcugcggaauauaccaucaauccagagucgcggauuauucggcgccauugcaggcuuuaucgaagggggauggacagguaugguagacggcugguacggguaucaucaccagaacgagcaaggaagcggcuacgcugccgaucaggaguccacccagaaugcgauaaacgguauuacuaauaaggugaacucugucaucgagaaaaugaauacacaguucaccgccguggggaaggaauuuaacaaacuggaacgaagaauggagaaucucaacaagaagguugacgauggcuuccuugacaucuggacguacaacgcagaacuguuggugcuacuggagaaugagaggacccucgacuuccacgauagcaacgucaaaucacuguaugaaaaggugaaaagucaacuuaagaauaacgcuaaagagauuggaaauggcugcuuugaguucuaccauaaguguaacaaugaaugcauggaguccguaaagaacgggacauaugacuaccccaaauauagcgaagagucuaagcugaaucgggagaaaaucgauggaguuaaguuggacucaauggguguguaccguauucucgccauauauaguacugucgcuagcucccugguguuacuggucucucuaggcgccaucucguuuuggaugugcagcaacgggucccuccagugucgcauuugcaucuga

SEQ ID NO: 134413 - RNA, 1698 nt, Artificial Sequence
  derived and/or modified CDS sequence (opt3) from hemagglutinin__InfluenzaA__ADV69106
augaaggugaaacugcucauccuucugugcaccuucacagccacuuacgcugacacgauuuguauaggcuaucacgcaaacaauagcaccgauacagucgacacuguuuuggagaagaacgugaccguaacacauuccgugaauuuacuggaagauucucacaacgggaaacuaugccuccugaagggaaucgcgccccuucagcuggguaauuguucagucgccggcuggauuuuggggaacccugagugcgaaagucucaucagcaaaaaguccuggucuuacauuguggagaccccaaauccgggaaacggcgcuuguuaucccgguuacuuugccgacuaugaagaacugagagagcaacugucgucaguuagcaguuucgaaagguuugagauguucccuaaggaauccucuuggccaaaucauaacgugaauggggucagcgcauccugcucacacaacggaaaaaguagcuuuuaccggaaucucuuauggcugacucgcaagaacggccuuuaucccaauuugacaaaaucuuacgccaacaacaaugauaaggaggugcugauccuauggggcguacaucacccuuccaacauaggggaccagcgaacccucuaccacacggagaaugcuuauguuucagugaugagcagucauuacucucguagauucacuccagaaaucaccaaaaggcccaagguccgggaucaggagggacgcauuaacuauuacuggacacugcuugaaccuggugacacuaucauuuuugaggcaaauggcaaccugaucgccccaugguaugcuuucgccuuguccaggagcuuugggucgggaauaauuaccucuuccgcgccgauggaugaaugugacgcaaagugccagacaccccaaggcgccaucaauucaagucucccuuuccagaacgugcacccagugaccauuggugagugucccaaauacgucagaagcgcuaagcugaaaaugguuacgggguuacggaauaucccuuccauccagucucgcggacuguuuggcgccauugcaggcuucauagaagggggauggacugguaugguggauggcugguauggguaccaucaccagaacgaacaaggaagcggcuacgcugccgaccaggagucaacacagaaugcgaucaacgguauuaccaauaagguaaacagugugaucgagaaaaugaauacucaguuuacagccgucgggaaggaguucaacaaacucgaaaagcgaauggagaaccuuaauaagaaaguggaugacggcuuccuggacauauggaccuauaacgcagaguugcuaguucugcucgaaaaugagagaacgcuggauuuucacgacuccaacgucaagagccuuuacgaaaaagugaagauucaacugaaaaauaacgcuaaggagaucggaaauggcugcuucgaauuuuaucauaaguguaacaaugagugcauggagucugugaggaacgggaccuacgauuauccaaaauacucagaagagaguaaguugaaucgggagaaaaucgacggaguaaagcucgauagcauggguguuuaucagauucuggccaucuacuccacaguggcuucuucguuaguccugcuagugagccucggcgccauuuccuucuggaugugcucaaacgggagucugcagugucguauaugcaucuga

SEQ ID NO: 134414 - RNA, 1698 nt, Artificial Sequence
  derived and/or modified CDS sequence (opt3) from hemagglutinin__InfluenzaA__ADV69107
augaaggugaaacugcucauccuucugugcaccuucacagccacuuacgcugacacgauuuguauaggcuaucacgcaaacaauagcaccgauacagucgacacuguuuuggaaaagaacgugaccguaacacauuccgugaauuuacuggaagauucucacaacgggaaacuaugccuccugaagggaaucgcgccccuucagcuggguaauuguucagucgccggcuggauuuuggggaacccugagugcgaaagucucaucagcaaagaguccuggucuuacauuguggaaaccccaaauucggacaacggagcuuguuauccgggccaauuuacugauuacgaggagcugagagaacagcugucaagcguuaguuccuucgagagguuugaaaucuuccccaaggagucuagcuggccuaaucauacagugaccggugucuccgccucaugcagucacaacggggagcggagcuuuuaucgcaaucucauaugguuaacggugaagaacggacuguacccaaaucuuucuaaauccuaugaaaacgacaaggagaaagaaguauugauccuguggggcguucaucaucccccuaauauuggcgaucagcgaacucuauaccacaccgagaacgcauacaucucaguggucagcagucacuauucugggcguuucacaccagaaauuacuaagagacccaaagugagggaccaggagggacggaucaacuacuauuggacccuccuggagccuggugauacaauaauuuuugaagccaauggcaaccuuaucgcuccaugguacgcauucgcccugucccgcggguugggaagcggcauuaucaccucgaaugcuccgauggacaagugugaugccaagugccaaacgccccagggugcgaucaacucuucccucccuuuucagaaugugcacccagucacuauuggggagugucccaaauauguuagaucaacaaagcugaggauggugaccggauuacggaacauaccuaguauccagagccgcggccuguucggcgcaauugccggguuuaucgaaggagguuggacuggcaugguagacgggugguacggauaucaucaccaaaaugagcagggcuccgguuacgcugccgaucaggaaucuacacagaacgcaauaaaugggauuaccaacaaagugaauagcgucaucgagaagaugaacacgcaauucaccgcugugggcaaagaguuuaauaagcucgaacgaagaauggagaaccuuaauaaaaagguugacgacggauuccuggauaucuggacauacaacgccgaauugcuagugcugcucgagaacgaaaggacucuggacuuccacgauucaaaugucaagagucuuuaugagaaagugaagucccagcugaaaaacaaugcgaaggagauuggcaacgggugcuuugaguucuaccauaaauguaauaacgaaugcauggaaagcguacggaauggaaccuaugacuacccaaaguauucugaggagucaaaguugaaccgugagaaaaucgaugguguuaagcucgacaguaugggcguguaccgcauucuggccauauauagcacagcagcuuccucuuuaguccugcuagugucgcucggggccaucagcuuuuggaugugcuccaauggaucacugcaguguagaauuugcaucuga

SEQ ID NO: 134415 - RNA, 1698 nt, Artificial Sequence
  derived and/or modified CDS sequence (opt3) from hemagglutinin__InfluenzaA__ADV69108
augaaggugaaacugcucguccuucugugcaccuucacagccacuuacgcugacacgaucuguguuggcuaucacgcaaacaauagcaccgauacaguggacacuguauuggagaagaacgugaccgucacacauuccgugaauuuacuggaagauucucacaacgggaaacuaugccuccugaagggaauugcgccccuucagcuggguucauguaguguugccggcuggauauuggggaauccugagugcgaacuccugaucagcaaagaguccuggucuuacauuguggaaaccccaaacccggagaauggaacuuguuaucccggcuacuuuacagacuaugaggaacugagagagcaacucucgucagucagcaguuucaagagguuugaaaucuucccuaaggaguccucuuggccaaaccauaccgugacggguguaagcuccucaugcagucacaaugggaaaagcucuuuuuaccggaacuuacuguggcuuacuaugaagaauggauuguaucccaaccuguccaaaucauacaccaauaagaaagagaaggaaguucuagugcucuggggcguccaucacccuagcaacauuggcgaucagcgcgcucuguaccacacagagaaugccuaugugaguguggucucuucccauuacagccgacguuucacuccagaaaucgcaaagagacccaaaguuaggaaccaggaggggcggauaaacuauuacuggacccuucuggaaccugaggacacaaucauuuuugaggccaauggaaacuugaucgcuccacgcuaugcauucgaacucucgaaggguuuuggcucugggauuaucaccuccaaugccccgaugggagaguguaacgcuaaaugccagacgccccaaggcgccauaaauucaagucugccuuuccagaacgugcacccaguaacuauuggugaaugucccaaguacgugagaagcuccaaauuaaggauggucacagggcugcggaauaccccuucuauccagagccgcggacucuuuggcgcgauugcaggcuucaucgaagggggauggacugguaugguggauggcugguauggguaccaucaccagaacgaacaaggaucaggcuacgccgcugaccagcagaguacacagaaugccaucaacgguauuaccaauaagguuaacuccgugauagagaaaaugaauacgcaauuuaccgcagucgggaaggaguucaacaaacuugaacgaagaauggagaaucugaacaaaaagaucgaugacggcuucuuggauauuuggacauauaacgcugaacuacuggugcuccuggagaaugaaaggacucuugacuuucacgauagcaacguaaagaaucuguacgagaagguuaaaucucaguugaagaacaaugccaaggagaucggaaacggcugcuucgaauuuuaucauaaauguaaugacgagugcauggaaucagugaagaacgggaccuacgacuauccaaaauacagugaggagagcaagcucaaucgggagaaaauagauggagucaagcuggaguccauggguguguauaacauuuuagcgaucuacucuacagucgccucgagccuggugcuacucguuucccugggcgcaaucucauucuggaugugcaguaaugggucucuucagugucguauuugcaucuga

SEQ ID NO: 134416 - RNA, 1698 nt, Artificial Sequence
  derived and/or modified CDS sequence (opt3) from hemagglutinin__InfluenzaA__ADV69109
augaaggugaaacugcucauccuucugugcaccuucaaggccacauacgcugacacuauuuguauaggcuaucacgcaaacaauagcacggagaccgucgauacaguuuuggagaaaaacgugacuguaacccauuccgugaauuuacuggaggacucucacaacgggaagcuaugccuccugaaaggaaucgcgccccuucagcuggguaauuguucagucgccggcuggauuuuggggaacccugaaugcgagagucucaucagcaagaaguccuggucuuacauuguggaaacaccaaauccggagaacggagcuuguuaucccggcgaguuugccgauuacgaggaacugagagaacaacugucgucaguuagcaguuucgagagguuugagaucuucccuaaagaauccucuuggccaaaucauaccgcaacuggugugagcgccuccugcucacacaacggggagcggaguuuuuaucgcaaucucauaugguuaacagucaagaacggacuguaccccaaucuuagcaaaucuuaugaaaacgacaagaaaaaggagguguugauccuguggggcguacaucacccuccaaauauugaaaaccagcgaacccuauaccacacggagaacgcuuacguuuccguggucucaagccauuauaguggccguuucacucccgagaucaccaagagaccuaaagugagggaucaggaagggcggauuaauuacuauuggacacuccuggagccaggagacacuaucauauuugaagcaaacgguaaucuuauugccccgugguacgcuuucacccugucucgcggcuugggguccggaaucauuacaagcaacgcccccauggaugagugugacgcgaagugccagaccccuaaaggcgcaaucaauucgucucucccauuucaaaacgugcaccccgucacgaucggugaauguccuaaguauguuagauccgccaaacugaggauggugacuggguuacggaauauuccaucaauacagagucgcggacuguucggcgcuaucgccggcuuuauugaagggggauggacagguaugguagauggcugguacggguaucaucaccagaacgagcagggaagcggcuacgcagcugaccaagaauccacccagaaugccaucaacgguauaacuaauaaggugaacucugucauugagaaaaugaauacacaguucaccgcgguggggaaggaauuuaacaagcucgagcgaagaauggaaaaucuuaacaaaaagguugaugacggcuuccuggauaucuggacguacaacgccgaguugcuagugcugcucgagaaugaaaggacccuggacuuccacgacagcaacgucaaaucacuuuaugagaaggugaaaagucagcugaagaauaacgcaaaggaaaucggaaauggcugcuuugaguucuaccauaaauguaacaaugagugcauggaauccguaaagaacgggacauaugauuaccccaaauauagcgaggaaucuaaguugaaucgggagaaaauugacggaguuaagcucgauucaauggguguguaccguauccuggcuauuuauaguacugucgccagcuccuuagugcugcuagucucucucggcgcuauaucguuuuggaugugcagcaacgggucccugcaaugucgcaucugcauuuga

SEQ ID NO: 134417 - RNA, 1701 nt, Artificial Sequence
  derived and/or modified CDS sequence (opt3) from hemagglutinin__InfluenzaA__ADV76579
augaagaccaucauugcccugagcuacauacucugccuuguguucgcucagaaacugcccggcaacgacgauuccacagcaacuuuguguuuagggcaccaugccgucccuaauggaacgaucguuaagaccauuacaaacgaccaaaucgaggugacuaaugcgaccgaacugguacagucuucaaguacaggugagauuugcgauagcccacaccagauccuagacggcgaaaacuguacccucauagaugcucugcuuggggacccgcagugcgauggauuucaaaauaaaaagugggaccuguucguggagagauccaaagccuauucuaacuguuaccccuaugaugucccugacuacgcaucguugaggucacucguggccagcaguggcacucuggaauuuaauaacgaguccuucaauuggacagguguuacccagaacgggacgucuagcgcuugcauccggcgcuccaauaacucauuuuucagucgacugaauuggcucacucauuuacguuuuaaguauccagcacugaacgugaccaugcccaauaacgagcaguucgauaaacuuuacauuuggggaguccaccauccuggcacagacaacgaucagaucuuuuuguaugcccaagcuagcggcagaauuacugugucuaccaagaggucccagcagacaguaaucccaaauauagggucacggccccgcguuagaaacauuccuagcaggaucaguauuuacuggaccaucgugaagccaggagacauccugcuaauuaauucuacggguaaccucauagccccgcggggcuacuucaaaauccgcuccggaaagagcucgauuaugcgaucugacgcgcccaucgggaaauguaauuccgaaugcauaacuccuaacggcucaauuccaaaugauaagcccuuucagaacgucaauagaaucacauauggugcauguccuagguacgugaagcaaaacacccugaaacuugccacugggaugcggaaugugccagagaagcagacacguggaaucuucggcgcuauugccggcuuuaucgaaaacgggugggagggaauggucgacgguugguauggcuuccgccaccagaauagugaggggagaggacaagcagcugaucugaaaagcacccaggccgcgauugaccagauaaacggcaaguugaauaggcucaucgguaaaacgaacgaaaaguuccaccagauugagaaagaauuuuccgagguugaagggcggauccaagaucuggagaaguacguggaggacaccaagaucgauuuauggucuuauaacgccgaacugcucguagcacuugagaaucagcauacaauugaccugacugauagcgaaaugaacaaauuguucgagaagaccaaaaagcagcuacgagaaaaugcugaggacaugggcaacggaugcuuuaaaauauaccacaagugugauaaugccugcaucggcucaauucgcaacgggacauaugaccaugacguguacagagaugaggcucugaauaacagguuccagaucaagggagucgaacucaaaagugguuacaaggacuggauucuguggaucuccuuugccauaagcugcuuccuucuguguguggcauugcucggcuuuaucaugugggccugccaaaaagggaauauucgguguaacaucugcauuuga

SEQ ID NO: 134418 - RNA, 1701 nt, Artificial Sequence; identical to SEQ ID NO: 131636
  derived and/or modified CDS sequence (opt3) from hemagglutinin__InfluenzaA__ADV76587

SEQ ID NO: 134419 - RNA, 1701 nt, Artificial Sequence; identical to SEQ ID NO: 131636
  derived and/or modified CDS sequence (opt3) from hemagglutinin__InfluenzaA__ADV76598

SEQ ID NO: 134420 - RNA, 1701 nt, Artificial Sequence; identical to SEQ ID NO: 131459
  derived and/or modified CDS sequence (opt3) from hemagglutinin__InfluenzaA__ADV76609

SEQ ID NO: 134421 - RNA, 1701 nt, Artificial Sequence; identical to SEQ ID NO: 131636
  derived and/or modified CDS sequence (opt3) from hemagglutinin__InfluenzaA__ADV76620

SEQ ID NO: 134422 - RNA, 1701 nt, Artificial Sequence
  derived and/or modified CDS sequence (opt3) from hemagglutinin__InfluenzaA__ADV76631
augaagaccaucauugcccugagcuacauacucugccuuguguucgcucagaaacugcccggcaacgacaauuccacagcaacuuuguguuuagggcaccaugccgucccuaacggaacgaucguuaagaccauuacaaaugaucaaaucgaggugacuaacgcgaccgaacugguacagucuucaaguacaggugagauuugcgacagcccacaccagauccuagauggcaaaaauuguacccucauagacgcucugcuuggggauccgcagugcgacggauuucaaaacaagaaaugggaucuguucguggaaagauccaaggccuauucuaauuguuaccccuaugacgucccugauuacgcaucguugaggucacucguggccagcaguggcacucuggaguuuaacaaugaauccuucaacuggacagguguuacccagaaugggacgucuagcgcuugcauccggcgcuccaagaacucauuuuucagucgacugaauuggcucacucauuuaaacuuuaaauauccagcacugaaugugaccaugcccaacaacgagcaguucgacaagcuguacauuuggggaguccaccauccuggcacagauaaagaccagaucuuuuuguaugcccaagcuagcggccguauuacugugucuaccaagagaucccagcagacaguaaucccaaauauagggucaaggccccggguucgcaacauuccuagcagaaucaguauuuacuggaccauggugaaaccaggagauauccugcuaaucaauucuacggguaaccucauugccccgaggggcuacuucaagauacgguccggaaagagcucgaucaugcgcucugacacucccauugggaaauguaauuccgagugcaucacaccuaacggcucaauaccaaaugacaagcccuuucagaacgucaaucgaauuaccuauggugcguguccuagauacgugaaacaaaacacucugaaacuugcaacagggaugaggaaugugccagaaaaacagacccggggaaucuucggcgccaucgcuggcuuuauugagaacgggugggaaggaauggucgaugguugguauggcuuccgucaccagaauagugaggggcgcggacaagccgcagaccuuaagagcacgcaggcugccaucgaucagauuaacggcaaauugaauagacucauagguaaggcgaacgagaaguuccaccagaucgaaaaagaguuuuccgaaguugaggggaggauucaagaccuggaaaaguacguggaggauaccaaaaucgacuuauggucuuauaacgccgagcugcucguagcacuugaaaaucagcauacaaucgaucugacugacagcgagaugaacaaguuguucgaaaagaccaagaagcagcuacgggagaaugcugaagauaugggcaacggaugcuuuaaaauuuaccacaagugugacaaugccugcauaggcucaauccgaaacgggacauaugaucaugacguguaccgcgacgaggcucugaauaacagauuccagauuaaaggagucgagcucaagagugguuacaaagauuggauccuguggauuuccuuugccaucagcugcuuccuucuguguguggcauugcucggcuuuauaaugugggccugccaaaaggggaauaucagguguaacauuugcaucuga

SEQ ID NO: 134423 - RNA, 1701 nt, Artificial Sequence; identical to SEQ ID NO: 133640
  derived and/or modified CDS sequence (opt3) from hemagglutinin__InfluenzaA__ADV76642

SEQ ID NO: 134424 - RNA, 1701 nt, Artificial Sequence; identical to SEQ ID NO: 133644
  derived and/or modified CDS sequence (opt3) from hemagglutinin__InfluenzaA__ADV76664

SEQ ID NO: 134425 - RNA, 1701 nt, Artificial Sequence
  derived and/or modified CDS sequence (opt3) from hemagglutinin__InfluenzaA__ADV76673
augaagaccaucauugcccugagcuacauauucugccucgcucuuggccaggaccugcccgggaacgauaauuccacagcaacuuuguguuuaggacaccaugccgugccuaacgguacgcuggucaaaaccaucacagacgaucaaauugagguuacuaaugcgaccgaacuugugcagucuucaaguacaggcaagaucugcaacaauccacacaggauucucgacgggaucgauuguacccugauagacgcucuacugggagauccgcauugcgacguauuucagaacgagacuugggauuuguucguggaaagaagcaaagccuuuuccaauuguuaucccuacgacgucccugauuaugcaucucuccggucgcugguggccucaagcggcacacuggaguucaucaccgaagguuuuacguggacugggguuacccagaacggaggcaguaaugcuugcaagcgcggcccaggguccggauucuuuucucgacucaacugguuaacaaaaagcgguuccacuuaccccgugcugaaugucaccaugccuaacaaugacaacuucgauaaguuguauauuuggggcgugcaccauccaucaacaaaucaagagcagaccaguuuguacguacaggcaagcgggcguguuacggugucuacuagaaggucccagcaaacaaucauucccaacaucgagucacggccuuggguccgcggacugagcaguagaauaucuauuuauuggaccaucgugaacccaggcgacgugcuagucauuaauuccaacgguaaucucaucgccccgaggggguacuuuaagaugcggacuggaaaaagcucgaucaugcgcucugacgcucccauugauacauguauauccgaaugcaucaccccuaacggcucaauuccaaaugacaagcccuuccagaacguuaauaaaaucacguacggcgccuguccuaaguaugugaaacagaacacccugaaacuugcgacagggaugcgaaauguaccagagaagcagacuagaggacuguuuggugcaaaagccggcuucauagaaaacgggugggagggaaugauugauggcugguacgguuuuaggcaccaaaauagugaggggaccggccaggcugccgaccuuaagagcacacaggcagcuaucgaucaaaucaacggaaaacucaaucgggugauugaaaagacuaacgagaaauuccaccagaucgaaaaggaguucuccgaagucgagggccguauucaggaccuggagaaauauguggaagauaccaagauagacuuauggucuuacaaugccgagcugcucguugcgcuugaaaaccagcauacaaucgaucugaccgacagcgagaugaacaaguuguuugaaaagacucgcagacaacuaagggagaaugccgaggauauggggaacggaugcuucaagauuuaucacaaaugugacaaugcaugcaucgaaucaauccggaacgguacguacgaccaugauguguaucgagacgaggcucugaauaaccgcuuucagauuaagggcgucgaacucaaaaguggguacaaggauuggauacuguggaucuccuucgccauuagcugcuuucuucugugugugguauugcucggauucaucaugugggcuugccagagaggcaauauuagguguaacaucugcauauga

SEQ ID NO: 134426 - RNA, 1701 nt, Artificial Sequence
  derived and/or modified CDS sequence (opt3) from hemagglutinin__InfluenzaA__ADV76682
augaagaccaucauugcccugagcuacauacucugccuuguguucgcucagaaacugcccggcaacgacaauuccacagcaacuuuguguuuagggcaccaugccgucccuaacggaacgaucguuaagaccauuacaaaugaucaaaucgaggugacuaacgcgaccgaacugguacagucuucaaguacaggugagauuugcgacagcccacaccagauccuagauggcgaaaauuguacccucauagacgcucugcuuggggauccgcagugcgacggauuucaaaacaaaaagugggaucuguucguggagagauccaaagccuauucuaauuguuaccccuaugacgucccugauuacgcaucguugaggucacucguggccagcaguggcacucuggaauuuaacaaugaguccuucaacuggacagguguuacccagaaugggacgucuagcgcuugcauccggcgcuccaacaauucauuuuucagucgacugaacuggcucacucauuuaaauuuuaaguauccagcacugaacgugaccaugcccaacaaugagcaguucgacaaacuuuacauuuggggaguccaccauccuggcacagauaaggaccagaucuuuuuguaugcccaagcuagcggccguauuacugugucuaccaagagaucccagcaggccguaaucccaaacauagggucaaggccccggguucgcaauauuccuagcagaaucaguauuuacuggacaaucgugaaaccaggagauauccugcuaauuaacucuaccgguaaucucauagcgccgaggggcuacuucaagauccgguccggggaaagcucgauuaugcgcucugacgcacccaucggaaaauguaacuccgagugcauaacgccuaauggcucaauuccaaacgacaagcccuuucagaaugucaaccgaaucacuuauggugccuguccuagauacgugaagcaaaauacacugaaacuugcuaccgggaugaggaacgugccagaaaagcagacucggggaaucuucggcgccauugcaggcuuuaucgagaaugggugggagggaauggucgaugguugguauggcuuccgucaccagaacagugaagggcgcggacaagcugccgaccugaaaagcacacaggcggccauugaucagauaaauggcaaguugaacagacucaucgguaaaaccaacgagaaguuccaccagauugaaaaagaguuuuccgaaguugaggggaggauccaagaccuggagaaguacguggaagauacgaagaucgacuuauggucuuauaaugcagagcugcucguagcucuugaaaaccagcauaccauugaucugacagacagcgagaugaauaaauuguucgaaaagacuaaaaagcagcuacgggagaacgccgaggauaugggcaauggaugcuuuaaaauauaccacaagugugacaacgcuugcaucggcucaauucgaaaugggaccuaugaucaugacguguaccgcgacgaagcccugaacaauagauuccagaucaagggagucgagcucaaaagugguuacaaggauuggauucuguggaucuccuuugcaauaagcugcuuccuucuguguguggccuugcucggcuuuaucaugugggcuugccaaaaagggaacauuagguguaauaucugcauuuga

SEQ ID NO: 134427 - RNA, 1701 nt, Artificial Sequence; identical to SEQ ID NO: 131661
  derived and/or modified CDS sequence (opt3) from hemagglutinin__InfluenzaA__ADV76694

SEQ ID NO: 134428 - RNA, 1701 nt, Artificial Sequence; identical to SEQ ID NO: 131459
  derived and/or modified CDS sequence (opt3) from hemagglutinin__InfluenzaA__ADV76705

SEQ ID NO: 134429 - RNA, 1701 nt, Artificial Sequence; identical to SEQ ID NO: 131661
  derived and/or modified CDS sequence (opt3) from hemagglutinin__InfluenzaA__ADV76716

SEQ ID NO: 134430 - RNA, 1701 nt, Artificial Sequence
  derived and/or modified CDS sequence (opt3) from hemagglutinin__InfluenzaA__ADV76727
augaagaccaucauugcccugagcuacauacucugccuuguguucgcucagaaacugcccggcaacgacaauuccacagcaacuuuguguuuagggcaccaugccgucccuaacggaacgaucguuaagaccauuacaaaugaucaaaucgaggugacuaacgcgaccgaacugguacagucuucaaguacaggugagauuugcgacagcccacaccagauccuagauggcaaaaauuguacccucauagacgcucugcuuggggauccgcagugcgacggauuucaaaacaagaaaugggaucuguucguggaaagauccaaggccuauucuaauuguuaccccuaugacgucccugauuacgcaucguugaggucacucguggccagcaguggcacucuggaguuuaacaaugaauccuucaacuggacagguguuacccagaaugggaagucuagcgcuugcauccggcgcuccaaaaacucauuuuucagucgacugaauuggcucacgcauuuaaacuuuaaguauccagcacugaaugugacuaugcccaacaacgagcaguucgacaaacuuuacauuuggggaguccaccauccuggcaccgauaaggaccagaucuuuuuguaugcccaagcuagcggccguauuacagugucuacuaaaagaucccagcagaccguaaucccaaauauagggucaaggccccggguucgcaacauuccuagcagaaucaguauuuacuggacaaucgugaagccaggagauauccugcuaauuaauucuaccgguaaccucauagccccgaggggcuacuucaagauccgguccgggaaaagcucgauuaugcgcucugacgcgcccaucggaaaguguaauuccgagugcauaacgccuaacggcucaauuccaaaugacaaacccuuucagaacgucaaucgaaucacuuauggugcauguccuagauacgugaagcaaaacacacugaaacuugccaccgggaugaggaaugugccagaaaagcagacucggggaaucuucggcgcuauugccggcuuuaucgagaacgggugggaaggaauggucgaugguugguauggcuuccgucaccagaauagugaggggcgcggacaagcagcugaccugaaaagcacacaggccgcgauugaucagauaaacggcaaguugaauagacucaucgguaagaccaacgagaaauuccaccagauugaaaaggaguuuuccgaaguugaggggaggauccaagaccuggaaaaauacguggaggauacgaagaucgacuuauggucuuauaacgccgagcugcucguagcacuugaaaaucagcauaccauugaucugacagacagcgagaugaacaaauuguucgaaaagacuaagaaacagcuacgggagaaugcugaagauaugggcaacggaugcuuuaagauauaccacaaaugugacaaugccugcaucggcucaauucgaaacgggaccuaugaucaugacguguaccgcgacgaggcucugaauaacagauuccagaucaagggagucgagcucaaaagugguuacaaggauuggauucuguggaucuccuuugccauaagcugcuuccuucuguguguggcauugcucggcuuuaucaugugggccugccaaaaggggaauauuagguguaacaucugcauuuga

SEQ ID NO: 134431 - RNA, 1701 nt, Artificial Sequence
  derived and/or modified CDS sequence (opt3) from hemagglutinin__InfluenzaA__ADV91009
augaaggccauccuggcugugcuccuuuacaccuucgcaacagccaacgcggacacucugugcauuggcuaucacgcuaauaacagcacggauaccgucgacacaguuuuggagaaaaaugugacuguaacccauuccgugaacuuacuggaagauaagcacaaugggaaacuauguaagcucagaggaauagcaccccugcaucuugguaaaugcaacaucgccggcuggauucuggggaauccugagugugaaucuuugucaacagccaguagcugguccuacaucgucgagaccccaucuucggacaacggaacuugcuauccgggcgauuuuauugacuacgaggagcucagggagcagcugucaagcgugaguuccuucgaacgguuugagaucuuccccaagacaucuagcuggccuaaucacgauuccaacaaggguguuaccgcugcauguccacaugccggggcuaaaucauuuuauaagaaucugauauggcucgugaaaaagggaaacaguuaccccaaauuaagcaagucuuauaucaaugacaagggcaaaaagguccuggugcuuuggggcauucaccacccuuccacgucagccgaucaacagagcuuguaccagaacgcggacgcauacguauucguugggaccagucgcuauucuaaaaaguuuaaaccagaaaucgccauucgacccaaggugcgugaucaggagggaagaaugaauuacuauuggacucuggucgagccuggugacaaaaucacauucgaagcuacuggcaaccuaguggugccaagguacgccuuugcaauggagcggaacgcuggguccggaauaauuaucagcgauaccccgguccaugacugcaauacaaccugucaaacgcccaagggcgccauuaacacuucgcucccuuuccagaauauccacccaaucacaauugguaagugccccaaauauguugaaucuaccaagcugcgccuugcgacugggcugagaaacgugccuuccauacagucaaggggauuguuuggcgccaucgcaggcuucauugaagggggauggacagguaugguagacggcugguacggguaucaucaccagaaugaacaaggaaguggcuacgcugccgaucucaaaagcacccagaacgcuaucgacaagauaacgaauaaagugaacuccgucauugagaagaugaauacccaguuuacagccguggguaaggaguucaaccaccuggaaaaacggaucgagaauuuaaacaagaaaguugaugacggguuccuggauaucuggacuuacaaugcagaacuccuugugcuguuggagaacgaacgcacccuagacuaucaugauucuaaugucaagaaccuguacgagaaagugcgaagccagcucaagaacaaugccaaggagauuggcaacggauguuuugaguucuaucacaaaugcgacaauacauguauggaaucaguaaagaacggcacuuacgauuauccaaaauacagugaagaggcuaagcugaauagagaagagaucgacgggguuaaacuugaguccaccaggauuuaucaaauacuggcgaucuacagcacaguggcaucuucauugguccucguggucagucugggagccauuagcuuuuggaugugcuccaacgguucuuuacagugccggaucuguaucuga

SEQ ID NO: 134432 - RNA, 1701 nt, Artificial Sequence
  derived and/or modified CDS sequence (opt3) from hemagglutinin__InfluenzaA__ADV91010
augaaggccauccuggugguccuccuuuacaccuucgcuacagcaaacgccgacacucugugcauuggcuaucacgcgaauaacagcacggauaccguugacacaguguuggagaaaaauguaacugugacccauuccgucaacuuacuggaagauaagcacaaugggaaacuauguaagcucagaggaguggcuccccugcaucuugguaaaugcaacauagccggcuggauccuggggaauccugagugugaaucuuugucaacagcaaguagcugguccuacauuguugagaccucuucgucagacaacggaacuugcuauccaggcgauuuuacagacuacgaggagcucagggagcagcugagcaguguguccucuuucgaacgguuugagaucuucccgaagaccagcuccuggcccaaucacgauucaaacaagggugucacgacugccuguccucaugcuggggcaaaaaguuuuuauaagaaucugauuuggcucgugaaaaagggaaacagcuacccaaaauuaucuaaguccuauaucaaugacaagggcaaagaaguacugguucuuuggggcauacaccaucccccuaccucagccgaucaacagagcuuguaccagaacgcugacgccuacguguucgucgggacaagucgcuauucuaagaaauuuaagccagagaucgcgauucgacccaaagugcgugaucaggagggaagaaugaauuacuauuggacucugguggaaccuggugacaagaucaccuucgaggcaacaggcaaccuagucguuccaagguacgccuuugcuauggaacggaacgccggguccggaauuaucauaagcgauaccccggugcacgacugcaauacgacuugucaaacacccaaaggcgcaauuaacaccucgcucccuuuccagaauauccacccaauuacuaucgguaagugccccaaguauguaaaaucuacaaagcugcgccuugcuaccgggcugagaaacgugccuuccauccagucaaggggauuguuuggcgccauugcgggcuucauagaagggggauggacggguauggucgacggcugguacggguaucaucaccagaaugaacaaggaaguggcuacgccgcagaucucaaaagcacccagaacgcuaucgacgagauuacaaauaaggugaacuccguuaucgagaaaaugaauacucaguuuaccgccguggguaaggaguucaaccaccuggaaaagcggauagaaaauuuaaacaaaaaggucgaugacggguuccuggauauuuggacauacaaugcugagcuccuugugcuguuggaaaacgagcgcacucuagacuaucaugauucuaauguaaagaaccuguacgagaagguucgaagccagcucaaaaacaaugccaaggaaaucggcaacggauguuuugaguucuaucacaagugcgacaauaccuguauggaaucagugaaaaacggcacauacgauuauccaaaguacagugaggaagcaaaacugaauagagaggagaucgacggggucaaacuugaauccaccaggauuuaucaaauccuggccauuuacagcacuguggcuucuucauugguccucgugguuagucugggagcgaucagcuuuuggaugugcuccaacgguucuuuacagugccggauauguauuuga

SEQ ID NO: 134433 - RNA, 1701 nt, Artificial Sequence
  derived and/or modified CDS sequence (opt3) from hemagglutinin__InfluenzaA__ADW01407
auggaggccaagcuguucgugcucuuuugcgcuuucaccgcacuuaaagccgacacaaucugugucggcuaccacgcgaacaauagcacugauacgguugacaccauucuggaaaagaacgugacaguaacucauuccgugaauuuguuagagaacucucacaaugggaaacugugcucacuaaacggaaagauaccccuccagcuggguaauuguaacgucgcuggcuggauccuugggaauccuaaaugcgaucuguugcucaccgccaacaguuggagcuauauuaucgaaacauccaauucuaagaacggagcauguuacccaggcgaguuugccgacuaugaagaacugaaggagcaacugucgaccgugaguagcuucgaaagauuugagauuuucccgaaagcuacuucauggcccaaucaugauacaaccagggguacgacuguugcaugcucccacucuggggccaacagcuuuuaccggaaucucuuauggaucgugaagaaaggaaacuccuauccuaagcugucaaaaaguuacaccaacaauaagggcaaggaaguccuugugauauggggcguacaucacccacccacagacagcgaucagcagacuuuguaucagaacaaucacaccuacguuucugugggguccucaaaauacuauaagcgccugacaccugagaucgucgcucgaccaaaagugcgugagcaagccggaagaaugaacuacuauuggacccuacucgaccagggugauacgauuacuuucgaagcgacaggcaaucugaucgcacccuggcaugccuuugcucuuaagaaagggagcaguucuggaauuaugagguccgacgcccaggugcacaacuguaccacuaagugccagacaccucauggcgcacugaaagguaauuugccauuccaaaacguccacccgguuaccaucggggagugucccaaguacguaaagagcacgcagcuccggauggcuaccggacugcgcaauauaccuucgauucagucuagaggcuuauuuggcgccaucgcgggguucauugaaggagguuggacaggcaugguggaugggugguauggauaccaccauaggaacgagcagggcuccgguuaugccgcagaccaaaaaucaacucagaucgcuaucgaugggauuaguaauaaggugaacagcgucauagagaaaaugaauauccaguuuaccuccgugggcaaggaguucaacucucuggagaaacggauggaaaaucucaacaagaagguugacgacggauuccuugauguguggacauacaacgccgagcuguugauucuacuggaaaaugagcgcacucucgacuuucacgaucugaacgucaaaaaucuuuacgaaaaggugaaaagccaacugcgaaacaaugcuaaggagaucggcaacgggugcuucgaguuuuaucauaaaugugacaaugaaugcauggagucaguaaagaacggaaccuacaauuauccaaaguacagugaagaguccaaauugaacagagaagagauagaugguguuaagcucgagagcaugggcauucaccagauccuggccaucuauucuacaguggcaucaaguuuaguccugcuagugagccucggggccauuuccuucuggaugugcucuaauggaucgcugcaguguagggucugcaucuga

SEQ ID NO: 134434 - RNA, 1698 nt, Artificial Sequence; identical to SEQ ID NO: 131179
  derived and/or modified CDS sequence (opt3) from hemagglutinin__InfluenzaA__ADW09101

SEQ ID NO: 134435 - RNA, 1698 nt, Artificial Sequence
  derived and/or modified CDS sequence (opt3) from hemagglutinin__InfluenzaA__ADW09111
augaaggugaaacugcucguccuucugugcaccuucacagccacuuacgcugacacgaucuguauuggcuaucacgcaaacaauagcaccgauacaguugacacuguguuggagaagaacguaaccgugacacauuccgucaauuuacuggaaaacucucacaaugggaaacuaugccuccugaagggaauagcgccccuucagcuggguaacuguucaguggccggcuggaucuuggggaauccugagugcgaacuccugauuaguaaagagagcugguccuacaucguugaaaagccaaacccggagaauggaaccuguuaucccggccauuuugcugauuacgaggaacugagagagcaacucucuucggugagcucauucgaaagguuugagauuuucccuaaggagaguuccuggccaaaccacacugucacaggugugucugccagcugcucccauaauggggaaucaaguuuuuaucggaacuuacuguggcuuaccggcaaaaauggauuguaccccaaccugagcaagucuuaugcaaauaacaaagagaaggaaguucuaguacucuggggcgugcaccacccuccaaacaucgucgaccagaaaacgcuguaccgcacugagaaugccuacguguccguggucucaagccauuauagucgaaaguucacccccgaaauagcuaagcguccuaaaguuagagaucaggaggggaggaucaacuacuauuggacacuucuggagccaggagacacuauuaucuuugaagcaaaugguaacuugauugccccgcgguacgcuuucgcccucucucgcggcuuuggguccggaaucauaaauagcaacgcgcccauggauaagugugacgcaaaaugccagaccccuagaggcgccauuaauucgucucugccauuccaaaacgugcaccccguaacaaucggugaguguccuaaguaugugagguccgcuaaauuacggauggucaccgggcugcgcaauauuccaucaauccagagucgaggacucuuuggcgccaucgcaggcuucauugaagggggauggacggguaugguggauggcugguacggguaucaucaccagaacgaccagggaagcggcuacgcugccgaucaaaaguccacucagaaugcgauaaacgguaucacaaauaaaguuaacucugugauugagaagaugaauacccaguuuacugccgucgggaaggaguucaacaaacuugaaagaaggauggagaaccugaauaagaaaguggacgauggcuucaucgacauauggacauacaacgcagaauugcuaguacugcucgagaaugaacggacccuggacuuucacgauagcaacguuaagaaucuuuaugagaaagugaagucacagcugaagaacaaugcuaaagaaauuggaaacggcugcuucgaguuuuaccauaaguguaaugacgagugcauggaaagugucaaaaacgggacguaugauuaccccaaguauuccgaggaaagcaaauugaaucgugagaagaucgacggagugaagcucgagucuaugggugucuaccaaauccuggccauuuauucaaccguggcuaguagcuuaguucugcuagugucccucggcgccaucucuuucuggaugugcucgaacgggagccugcagugucgcauuugcauauga

SEQ ID NO: 134436 - RNA, 1698 nt, Artificial Sequence
  derived and/or modified CDS sequence (opt3) from hemagglutinin__InfluenzaA__ADW09120
augaaggugaaacugcucguccuucugugcaccuucacagccacuuacgcugacacgaucuguauuggcuaucacgcaaacaauagcaccgauacaguugacacuguguuggagaagaacguaaccgugacacauuccgucaauuuacuggaaaacucucacaaugggaaacuaugccuccugaagggaauagcgccccuucagcuggguaacuguucaguggccggcuggaucuuggggaauccugagugcgaacuccugauuaguaaagagagcugguccuacaucguugaaaagccaaacccggagaauggaaccuguuaucccggccauuuugcugauuacgaggaacugagagagcaacucucuucggugagcucauucgaaagguuugagauuuucccuaaggagaguuccuggccaaaccacacugucacaggugugucugccagcugcucccauaauggggaaucaaguuuuuaucggaacuuacuguggcuuaccguaaagaauggauuguaccccaaccugagcaagucuuaugcaaauaacaaagagaaggaaguucuagugcucuggggcguccaccacccuccaaacaucguggaccagaaaacgcuguaccauacugagaaugccuacguguccgucguuucaagccacuauagucgcaaguucacccccgaaauagcuaagcgaccuaaagugcgugaucaggagggcagaaucaacuacuauuggacacuucuggagccaggggacacuauuaucuuugaagcaaauggaaacuugauugccccgagguacgcuuucgcccucucuaaggguuuuggcuccgggaucauaaauagcaacgcgcccauggauaaaugugacgcaaagugccagaccccucggggagccauuaauucgucucugccauuccaaaacguacaucccgugacaaucggcgaguguccuaaauauguccgcuccgcuaaguuaagaauggugaccggucugaggaauauuccaucaauccagagucgggggcucuuuggagccaucgcaggcuucauugaaggcggguggacgggaaugguugaugguugguacggcuaucaccaccagaacgagcaggggagcggauacgcugccgaccaaaaauccacucagaaugcgauaaacggcaucacaaauaaggugaacucugucauugaaaagaugaauacccaguuuacugccguggguaaagaguucaacaaacuugagcgccgaauggaaaaccugaauaaaaagguagaugacggguucaucgauauauggacauacaacgcagaguugcuaguucugcucgaaaaugagagaacccuggacuuucaugacagcaacgugaaaaaucuuuaugaaaaggucaagucacagcugaaaaacaaugcuaaggagauuggcaacggaugcuucgaguuuuaccacaaauguaaugaugaaugcauggagagugugaagaacggcacguaugacuaccccaaauauuccgaagagagcaaguugaauagggagaagaucgauggggucaaacucgaaucuaugggaguguaccaaauccuggccauuuauucaaccguugcuaguagcuuagugcugcuaguaucccucggugccaucucuuucuggaugugcucgaacggcagccugcagugucggauuugcauauga

SEQ ID NO: 134437 - RNA, 1698 nt, Artificial Sequence; identical to SEQ ID NO: 131664
  derived and/or modified CDS sequence (opt3) from hemagglutinin__InfluenzaA__ADW09131

SEQ ID NO: 134438 - RNA, 1698 nt, Artificial Sequence
  derived and/or modified CDS sequence (opt3) from hemagglutinin__InfluenzaA__ADW09153
augaaggugaaacugcucguccuucugugcaccuucacagccacuuacgcugacacgaucuguauuggcuaucacgcaaacaauagcaccgauacaguugacacuguguuggagaagaacguaaccgugacacauuccgucaauuuacuggaaaacucucacaaugggaaacuaugccuccugaagggaauagcgccccuucagcuggguaacuguucaguggccggcuggaucuuggggaauccugagugcgaacuccugauuaguaaagagagcugguccuacaucguugaaaagccaaacccggagaauggaaccuguuaucccggccauuuugcugauuacgaggaacugagagagcaacucucuucggugagcucauucgaaagguuugagauuuucccuaaggagaguuccuggccaaaccacacugucacaggugugucugccagcugcucccauaauggggaaucaaguuuuuaucggaacuuacuguggcuuaccgugaaaaauggauuguaccccaaccugagcaagucuuaugcaaauaacaaagagaaggaaguucuagugcucuggggcguccaccacccuccaaacaucguggaccagaaaacgcuguaccgcacugagaaugccuacguguccgucguuucaagccauuauagucgaaaguucacccccgaaauagcuaagcguccuaaagugagagaucaggagggcaggaucaacuacuauuggacacuucuggagccaggggacacuauuaucuuugaagcaaauggaaacuugauugccccgcgguacgcuuucgcccucucucgcgguuuuggcuccgggaucauaaauagcaacgcgcccauggauaagugugacgcaaaaugccagaccccuagaggagccauuaauucgucucugccauuccaaaacguacaccccgugacaaucggcgaguguccuaaguaugucagguccgcuaaauuacggauggugaccggucugcgcaauauuccaucaauccagagucgagggcucuuuggagccaucgcaggcuucauugaaggcggguggacgggaaugguugaugguugguacggcuaucaucaccagaacgagcaggggagcggauacgcugccgaccaaaaguccacucaggaugcgauaaauggcaucacaaacaaaguaaauucugucauugaaaagaugaacacccaguuuacugccguggguaaggaguucaauaaacuugagagaaggauggaaaaccugaacaagaaaguagacgauggguucaucgacauauggacauacaaugcagaguugcuaguucugcucgaaaacgagcggacccuggacuuucacgauagcaaugugaagaaccuuuaugaaaaagucaagucacagcugaagaauaacgcuaaagagauuggcaauggaugcuucgaguuuuaccauaaguguaacgacgaaugcauggagagugugaaaaauggcacguaugauuaccccaaguauuccgaagagagcaaauugaaccgugagaagaucgacggggucaagcucgaaucuaugggaguguaccaaauccuggccauuuauucaaccguugcuaguagcuuagugcugcuaguaucccucggugccaucucuuucuggaugugcucgaauggcagccugcagugucgcauuugcauauga

SEQ ID NO: 134439 - RNA, 1698 nt, Artificial Sequence; identical to SEQ ID NO: 131664
  derived and/or modified CDS sequence (opt3) from hemagglutinin__InfluenzaA__ADW09164

SEQ ID NO: 134440 - RNA, 1698 nt, Artificial Sequence
  derived and/or modified CDS sequence (opt3) from hemagglutinin__InfluenzaA__ADW09186
augaaggugaaacugcucguccuucugugcaccuucacagccacuuacgcugacacgaucuguauuggcuaucacgcaaacaauagcaccgauacaguugacacuguguuggagaagaacguaaccgugacacauuccgucaauuuacuggaaaacucucacaaugggaaacuaugccuccugaagggaauagcgccccuucagcuggguaacuguucaguggccggcuggaucuuggggaauccugagugcgaacuccugauuaguaaagagagcugguccuacaucguugaaaagccaaacccggagaauggaaccuguuaucccggccauuuugcugauuacgaggaacugagagagcaacucucuucggugagcucauucgaaagguuugagauuuucccuaaggagaguuccuggccaaaccacacugucacaggugugucugccagcugcucccauaauggggaaucaaguuuuuaucggaacuuacuguggcuuaccggcaaaaauggauuguaccccaaccugagcaagucuuaugcaaauaacaaagagaaggaaguucuaguacucuggggcgugcaccacccuccaaacaucgucgaccagaaaacgcuguaccgcacugagaaugccuacguguccguggucucaagccauuauagucgaaaguucacccccgaaauagcuaagcguccuaaaguuagagaucaggaggggaggaucaacuacuauuggacacuucuggagccaggagacacuauuaucuuugaagcaaaugguaacuugauugccccgcgguacgcuuucgcccucucucgcggcuuuggguccggaaucauaaauagcaacgcgcccauggauaagugugacgcaaaaugccagaccccucaaggcgccauuaauucgucucugccauuccagaacgugcaccccguaacaaucggugaguguccuaaguaugugagauccgcuaaauuaaggauggucaccgggcugcggaauacgccaucaauucagagucgcggacucuuuggcgccaucgcaggcuucaucgaagggggauggacugguaugguggauggcugguacggguaucaucaccagaacgagcaaggaagcggcuacgcugccgaccagaaguccacacagaaugcgauuaacgguauaaccaauaaaguuaacucugugaucgaaaagaugaauacucaguuuacagccgucgggaaggaguucaacaaacuugagcgaagaauggaaaaccugaauaagaaaguggaugacggcuucauugauaucuggaccuacaacgcagaguugcuaguacugcucgaaaaugagaggacgcuggacuuucacgacagcaacguuaagaaucuuuaugaaaaagugaagucacaacugaagaacaaugcuaaagagauaggaaacggcugcuucgaguuuuaccauaaguguaaugaugaaugcauggagagugucaaaaacgggaccuaugacuaccccaaguauuccgaagagagcaaauugaaucgggagaagauugauggagugaagcucgaaucuaugggugucuaccagauccuggccaucuauucaacaguggcuaguagcuuaguucugcuagugucccucggcgccauuucuuucuggaugugcucgaacgggagccugcagugucguaucugcauuuga

SEQ ID NO: 134441 - RNA, 1698 nt, Artificial Sequence; identical to SEQ ID NO: 131179
  derived and/or modified CDS sequence (opt3) from hemagglutinin__InfluenzaA__ADW09197

SEQ ID NO: 134442 - RNA, 1698 nt, Artificial Sequence; identical to SEQ ID NO: 131664
  derived and/or modified CDS sequence (opt3) from hemagglutinin__InfluenzaA__ADW09208

SEQ ID NO: 134443 - RNA, 1698 nt, Artificial Sequence; identical to SEQ ID NO: 131664
  derived and/or modified CDS sequence (opt3) from hemagglutinin__InfluenzaA__ADW09219

SEQ ID NO: 134444 - RNA, 1698 nt, Artificial Sequence; identical to SEQ ID NO: 131179
  derived and/or modified CDS sequence (opt3) from hemagglutinin__InfluenzaA__ADW09230

SEQ ID NO: 134445 - RNA, 1698 nt, Artificial Sequence
  derived and/or modified CDS sequence (opt3) from hemagglutinin__InfluenzaA__ADW09241
augaaggugaaacugcucguccuucugugcaccuucacagccacuuacgcugacacgaucuguauuggcuaucacgcaaacaauagcaccgauacaguugacacuguguuggagaagaacguaaccgugacacauuccgucaauuuacuggaaaacucucacaaugggaaacuaugccuccugaagggaauagcgccccuucagcuggguaacuguucaguggccggcuggaucuuggggaauccugagugcgaacuccugauuaguaaagagagcugguccuacaucguugaaaagccaaacccggagaauggaaccuguuaucccggccauuuugcugauuacgaggaaaugagagagcaacugucuucggugagcucauucgaaagguuugagauuuucccuaaggagaguuccuggccaaaccacacugucacaggugugucugccagcugcucccauaauggggaaucaaguuuuuaucggaaccucuuauggcugaccguuaaaaauggacuuuaccccaacuugagcaagucuuaugcaaauaacaaagagaaggaaguacuggugcuauggggcguccaccacccuccaaacaucguggaccagaaaacgcucuaccgcacugagaaugccuacguguccgucguuucaagccauuauagucgaaaguucacccccgaaauagcuaagcguccuaaagugagagaucaggagggcaggaucaacuacuauuggacacugcuugagccaggggacacuauuaucuuugaagcaaauggaaaccugauugccccgcgguacgcuuucgccuugucucgcgguuuuggcuccgggaucauaaauagcaacgcgcccauggauaagugugacgcaaaaugccagaccccuagaggagccauuaauucgucucucccauuccaaaacguacaccccgugacaaucggcgaguguccuaaguaugucagguccgcuaaacugcggauggugaccgguuuacgcaauauuccaucaauccagagucgagggcuguuuggagccaucgcaggcuucauugaaggcggguggacgggaaugguugaugguugguacggcuaucaucaccagaacgagcaggggagcggauacgcugccgaccaaaaguccacucagaaugcgauaaacggcaucacaaauaaagugaacucugucauugaaaagaugaauacccaguuuacugccguggguaaggaguucaacaaacucgagagaaggauggaaaaccuuaauaagaaaguagaugacggguucaucgauauauggacauacaacgcagagcuguugguucuacuggaaaaugagcggacccucgacuuucacgacagcaacgugaagaaucuguaugaaaaagucaagucacagcuuaagaacaaugcuaaagagauuggcaacggaugcuucgaguuuuaccauaaguguaaugaugaaugcauggagagugugaaaaacggcacguaugacuaccccaaguauuccgaagagagcaaacugaaucgugagaagaucgauggggucaaguuggaaucuaugggaguguaccaaauccucgccauuuauucaaccguugcuaguagccugguguuacugguaucccuaggugccaucucuuucuggaugugcucgaacggcagccuccagugucgcauuugcauauga

SEQ ID NO: 134446 - RNA, 1698 nt, Artificial Sequence; identical to SEQ ID NO: 131664
  derived and/or modified CDS sequence (opt3) from hemagglutinin__InfluenzaA__ADW09252

SEQ ID NO: 134447 - RNA, 1698 nt, Artificial Sequence
  derived and/or modified CDS sequence (opt3) from hemagglutinin__InfluenzaA__ADW09274
augaaggugaaacugcucguccuucugugcaccuucacagccacuuacgcugacacgaucuguauuggcuaucacgcaaacaauagcaccgauacaguugacacuguguuggagaagaacguaaccgugacacauuccgucaauuuacuggaaaacucucacaaugggaaacuaugccuccugaagggaauagcgccccuucagcuggguaacuguucaguggccggcuggaucuuggggaauccugagugcgaacuccugauuaguaaagagagcugguccuacaucguugaaaagccaaacccggagaauggaaccuguuaucccggccauuuugcugauuacgaggaacugagagagcaacucucuucggugagcucauucgaaagguuugagauuuucccuaaggagaguuccuggccaaaccacacugucacaggugugucugccagcugcucccauaauggggaaucaaguuuuuaucggaacuuacuguggcuuaccguaaagaauggauuguaccccaaccugagcaaaccuuaugcaaauaacaaagagaaggaaguucuagugcucuggggcguccaccacccacccaacaucguggaccagaaaacgcuguaccgcacugagaaugccuacgugucugucguuuccucacauuauagccgaaaguucaccccugaaauagcuaagcguccaaaagugagagaucaggagggcaggaucaacuacuauuggacacuucuggagccgggggacacuauuaucuuugaagcaaauggaaacuugauugcuccccgguacgccuucgcccucagucgcgguuuuggcucugggaucauaaauuccaacgcgccuauggauaagugugacgcaaaaugccagaccccaagaggagccauuaauagcucgcugcccuuccaaaacguacacccugugacaaucggcgaguguccaaaguaugucaggucugcuaaauuacggauggugaccggucugcgcaauauucccuccauccagucacgagggcucuuuggagccaucgcaggcuucauugaaggcggguggacgggaaugguugaugguugguacggcuaucaucaccagaacgagcaggggaguggauacgcugccgaccaaaagagcacucagaaugcgauaaacggcaucacaaauaaagugaacuccgucauugaaaagaugaauacccaguuuacugccguggguaaggaguucaacaaacuugagagaaggauggaaaaccugaauaagaaaguagaugacggguucaucgauauauggacauacaacgcagaguugcuaguucugcucgaaaaugagcggacccuggacuuucacgacucuaacgugaagaaucuuuaugaaaaagucaagagccagcugaagaacaaugcuaaagagauuggcaacggaugcuucgaguuuuaccauaaguguaaugaugaaugcauggagucagugaaaaacggcacguaugacuacccgaaguauagugaagaguccaaauugaaucgugagaagaucgauggggucaagcucgaaagcaugggaguguaccaaauccuggccauuuauucuaccguugcuucaaguuuagugcugcuaguaagccucggugccaucuccuucuggaugugcucuaacggcucgcugcagugucgcauuugcauauga

SEQ ID NO: 134448 - RNA, 1698 nt, Artificial Sequence
  derived and/or modified CDS sequence (opt3) from hemagglutinin__InfluenzaA__ADW09285
augaaggugaaacugcucguccuucugugcaccuucacagccacuuacgcugacacgaucuguauuggcuaucacgcaaacaauagcaccgauacaguugacacuguguuggagaagaacguaaccgugacacauuccgucaauuuacuggaaaacucucacaaugggaaacuaugccuccugaagggaauagcgccccuucagcuggguaacuguucaguggccggcuggaucuuggggaauccugagugcgaacuccugauuaguaaagagagcugguccuacaucguugaaaagccaaacccggagaauggaaccuguuaucccggccauuuugcugauuacgaggaacugagagagcaacucucuucggugagcucauucgaaagguuugagauuuucccuaaggagaguuccuggccaaaccacacugucacaggugugucugccagcugcucccauaauggggaaucaaguuuuuaucggaacuuacuguggcuuaccggcaaaaauggauuguaccccaaccugagcaagucuuaugcaaauaacaaagagaaggaaguucuaguacucuggggcgugcaccacccuccaaacaucgucgaccagaaaacgcuguaccgcacugagaaugccuacguguccguggucucaagccauuauagucgaaaguucacccccgaaauagcuaagcguccuaaaguuagagaucaggaggggaggaucaacuacuauuggacacuucuggagccaggagacacuauuaccuuugaagcaaaugguaacuugaucgccccgcgguacgcuuucgcccucucucgcggcuuuggguccggaauuaucaauagcaacgcgcccauggauaagugugacgcaaaaugccagacaccucaaggcgccauaaauucgucucugccauuccagaacgugcaccccguaaccauuggugaguguccuaaguaugugagauccgcuaaauuaaggauggucacggggcugcggaauaucccaucaauucagagucgcggacucuuuggcgccaucgcaggcuucaucgaagggggauggacugguaugguggauggcugguacggguaucaucaccagaacgagcaaggaagcggcuacgcugccgaccagaaguccacacagaaugcgauuaacgguauaaccaauaaaguuaacucugugaucgaaaagaugaauacucaguuuacagccgucgggaaggaguucaacaaacuugagcgaagaauggaaaaccugaauaagaaaguggaugacggcuucauugauaucuggaccuacaacgcagaguugcuaguacugcucgaaaaugagaggacgcuggacuuucacgacagcaacguuaagaaucuuuaugaaaaagugaagucacaacugaagaacaaugcuaaagagauaggaaacggcugcuucgaguuuuaccauaaguguaaugaugaaugcauggagagugucaaaaacgggaccuaugacuaccccaaguauuccgaagagagcaaauugaaucgggagaagauugauggagugaagcucgaaucuaugggugucuaccagauccuggccaucuauucaacaguggcuaguagcuuaguucugcuagugucccucggcgccauuucuuucuggaugugcucgaacgggagccugcagugucguaucugcauuuga

SEQ ID NO: 134449 - RNA, 1698 nt, Artificial Sequence; identical to SEQ ID NO: 131664
  derived and/or modified CDS sequence (opt3) from hemagglutinin__InfluenzaA__ADW09296

SEQ ID NO: 134450 - RNA, 1698 nt, Artificial Sequence; identical to SEQ ID NO: 131179
  derived and/or modified CDS sequence (opt3) from hemagglutinin__InfluenzaA__ADW09307

SEQ ID NO: 134451 - RNA, 1698 nt, Artificial Sequence
  derived and/or modified CDS sequence (opt3) from hemagglutinin__InfluenzaA__ADW09327
augaaggugaaacugcucguccuucugugcaccuucacagccacuuacgcugacacgaucuguauuggcuaucacgcaaacaauagcaccgauacaguugacacuguguuggagaagaacguaaccgugacacauuccgucaauuuacuggaaaacucucacaaugggaaacuaugccuccugaagggaauagcgccccuucagcuggguaacuguucaguggccggcuggaucuuggggaauccugagugcgaacuccugauuaguaaagagagcugguccuacaucguugaaaagccaaacccggagaauggaaccuguuaucccggccauuuugcugauuacgaggaacugagagagcaacucucuucggugagcucauucgaaagguuugagauuuucccuaaggagaguuccuggccaaaccacacugucacaggugugucugccagcugcucccauaauggggaaucaaguuuuuaucggaacuuacuguggcuuaccggcaaaaauggauuguaccccaaccugagcaagucuuaugcaaauaacaaagagaaggaaguucuaguacucuggggcgugcaccacccuccaaacaucgucgaccagaaaacgcuguaccgcacugagaaugccuacguguccguggucucaagccauuauagucgaaaguucacccccgaaauagcuaagcguccuaaaguuagagaucaggaggggaggaucaacuacuauuggacacuucuggagccaggagacacuauuaucuuugaagcaaaugguaacuugauugccccgcgguacgcuuucgcccucucucgcggcuuuggguccggaaucauaaauagcaacgcgcccauggauaagugugacgcaaaaugccagaccccucaaggcgccauuaauucgucucugccauuccagaacgugcaccccguaacaaucggugaguguccuaaguaugugagauccgcuaaauuaaggauggucaccgggcugcggaauauuccaucaauccagagucgcggacucuuuggcgccaucgcaggcuucauugaagggggauggacggguaugguggauggcugguacggguaucaucaccagaacgagcaaggaagcggcuacgcugccgaccagaaguccacucagaaugcgauaaacgguaucacaaauaaaguuaacucugugauugaaaagaugaauacccaguuuacugccgucgggaaggaguucaacaaacuugagcgaagaauggaaaaccugaauaagaaaguggaugacggcuucaucgauauauggacauacaacgcagaguugcuaguacugcucgaaaaugagaggacccuggacuuucacgacagcaacguuaagaaucuuuaugaaaaagugaagucacaacugaagaacaaugcuaaagagauuggaaacggcugcuucgaguuuuaccauaaguguaauaacgaaugcauggagagugucaaaaaugggacguaugauuaccccaaguauuccgaagagagcaaauugaaccgggagaagaucgacggagugaagcucgaaucuaugggugucuaccagauccuggccauuuauucaaccguggcuaguagcuuaguucugcuagugucccucggcgccaucucuuucuggaugugcucgaaugggagccugcagugucguauuugcauauga

SEQ ID NO: 134452 - RNA, 1698 nt, Artificial Sequence; identical to SEQ ID NO: 131664
  derived and/or modified CDS sequence (opt3) from hemagglutinin__InfluenzaA__ADW10483

SEQ ID NO: 134453 - RNA, 1698 nt, Artificial Sequence
  derived and/or modified CDS sequence (opt3) from hemagglutinin__InfluenzaA__ADW10494
augaaggugaaacugcucguccuucugugcaccuucacagccacuuacgcugacacgaucuguauuggcuaucacgcaaacaauagcaccgauacaguugacacuguguuggagaagaacguaaccgugacacauuccgucaauuuacuggaaaacucucacaaugggaaacuaugccuccugaagggaauagcgccccuucagcuggguaacuguucaguggccggcuggaucuuggggaauccugagugcgaacuccugauuaguaaagagagcugguccuacaucguugaaaagccaaacccggagaauggaaccuguuaucccggccauuuugcugauuacgaggaacugagagagcaacucucuucggugagcucauucgaaagguuugagauuuucccuaaggagaguuccuggccaaaccacacugucacaggugugucugccagcugcucccauaauggggaaucaaguuuuuaucggaacuuacuguggcuuaccggcaaaaauggauuguaccccaaccugagcaagucuuaugcaaauaacaaagagaaggaaguucuaguacucuggggcgugcaccacccuccaaacaucgucgaccagaaaacgcuguaccgcacugagaaugccuacguguccguggucucaagccauuauagucgaaaguucacccccgaaauagcuaagcguccuaaaguuagagaucaggaggggaggaucaacuacuauuggacacuucuggagccaggagacacuauuaucuuugaagcaaaugguaacuugauugccccgcgguacgcuuucgcccucucucgcggcuuuggguccggaaucauaaauagcaacgcgcccauggauaagugugacgcaaaaugccagaccccucaaggcgccauuaauucgucucugccauuccagaacgugcaccccguaacaaucggugaguguccuaaguaugugagauccgcuaaauuaaggauggucaccgggcugcggaauauuccaucaauccagagucgcggacucuuuggcgccaucgcaggcuucauugaagggggauggacggguaugguggauggcugguacggguaucaucaccagaacgagcaaggaagcggcuacgcugccgaccagaaguccacucagaaugcgauaaacgguaucacaaauaaaguuaacucugugauugaaaagaugaauacccaguuuacugccgucgggaaggaguucaacaaacuugagcgaagaauggaaaaccugaauaagaaaguggaugacggcuucaucgauauauggacauacaacgcagaguugcuaguacugcucgaaaaugagaggacccuggacuuucacgacagcaacguuaagaaucuuuaugaaaaagugaagaaccaacugaagaauaacgcuaaagagauuggaaauggcugcuucgaguuuuaccauaaguguaacgaugaaugcauggagucagucaaaaaugggacguaugacuaccccaaguauagugaagaguccaaauugaaccgggagaagaucgauggagugaagcucgaaagcaugggugucuaccagauccuggccauuuauucuaccguggcuucaaguuuaguucugcuagugagccucggcgccaucuccuucuggaugugcucuaaugggucgcugcagugucguauuugcauauga

SEQ ID NO: 134454 - RNA, 1698 nt, Artificial Sequence; identical to SEQ ID NO: 131664
  derived and/or modified CDS sequence (opt3) from hemagglutinin__InfluenzaA__ADW10505

SEQ ID NO: 134455 - RNA, 1698 nt, Artificial Sequence; identical to SEQ ID NO: 131664
  derived and/or modified CDS sequence (opt3) from hemagglutinin__InfluenzaA__ADW10516

SEQ ID NO: 134456 - RNA, 1698 nt, Artificial Sequence
  derived and/or modified CDS sequence (opt3) from hemagglutinin__InfluenzaA__ADW10527
augaaggugaaacugcucguccuucugugcaccuucacagccacuuacgcugacacgaucuguauuggcuaucacgcaaacaauagcaccgauacaguugacacuguguuggagaagaacguaaccgugacacauuccgucaauuuacuggaaaacucucacaaugggaaacuaugccuccugaagggaauagcgccccuucagcuggguaacuguucaguggccggcuggaucuuggggaauccugagugcgaacuccugauuaguaaagagagcugguccuacaucguugaaaagccaaacccggagaauggaaccuguuaucccggccauuuugcugauuacgaggaacugagagagcaacucucuucggugagcucauucgaaagguuugagauuuucccuaaggagaguuccuggccaaaccacacugucacaggugugucugccagcugcucccauaauggggaaucaaguuuuuaucggaacuuacuguggcuuaccggaaagaauggcuuguaccccaaccugagcaagucuuaugcaaauaacaaagagaaggaagugcuaguucucuggggcgugcaccacccuccaaacaucgucgaccagaaaacgcuguaccgcacugagaaugccuacguguccguggucucaagccauuauagucgaaaguucacccccgaaauagcuaagcguccuaaaguuagagaucaggaggggaggaucaacuacuauuggacacuucuggagccaggagacacuauuaucuuugaagcaaaugguaacuugauugccccgcgguacgcuuucgcccucucucgcggcuuugggcugggaaucauaaauuccaacgcgcccauggauaagugugacgcaaaaugccagaccccucaaggcgccauuaauagcucguuaccauuccagaacgugcaccccguaacaaucggugaguguccuaaguaugugagaucugcuaaacugaggauggucaccgggcuccggaauauuccauccauccagucacgcggacuuuuuggcgccaucgcaggcuucauugaagggggauggacggguaugguggauggcugguacggguaucaucaccagaacgagcaaggaaguggcuacgcugccgaccagaaaagcacucagaaugcgauaaacgguaucacaaauaaaguuaacuccgugauugaaaagaugaauacccaguuuacugccgucgggaaggaguucaacaaacuggagcgaagaauggaaaacuugaauaagaaaguggaugacggcuucaucgauauauggacauacaacgcagagcuacugguacuccuggaaaaugagaggacccuugacuuucacgacucuaacguuaagaaucuguaugaaaaaguaaagagccaauugaagaacaaugcuaaagagauuggaaacggcugcuucgaguuuuaccauaaguguaaugaugaaugcauggagucagucaaaaacgggacguaugacuaccccaaguauagugaagaguccaaacucaaucgggagaagaucgauggagugaagcuggaaagcaugggugucuaccagaucuuagccauuuauucuaccguggcuucaagucugguucuacucgugagccugggcgccaucuccuucuggaugugcucuaacgggucgcuucagugucguauuugcauauga

SEQ ID NO: 134457 - RNA, 1698 nt, Artificial Sequence
  derived and/or modified CDS sequence (opt3) from hemagglutinin__InfluenzaA__ADW10538
augaaggugaaacugcucguccuucugugcaccuucacagccacuuacgcugacacgaucuguauuggcuaucacgcaaacaauagcaccgauacaguugacacuguguuggagaagaacguaaccgugacacauuccgucaauuuacuggaaaacucucacaaugggaaacuaugccuccugaagggaauagcgccccuucagcuggguaacuguucaguggccggcuggaucuuggggaauccugagugcgaacuccugauuaguaaagagagcugguccuacaucguugaaaagccaaacccggagaauggaaccuguuaucccggccauuuugcugauuacgaggaacugagagagcaacucucuucggugagcucauucgaaagguuugagauuuucccuaaggagaguuccuggccaaaccacacugucacaggugugucugccagcugcucccauaauggggaaucaaguuuuuaucggaacuuacuguggcuuaccggcaaaaauggauuguaccccaaccugagcaagucuuaugcaaauaacaaagagaaggaaguucuaguacucuggggcgugcaccacccuccaaacaucgucgaccagaaaacgcuguaccgcacugagaaugccuacguguccgugaugucaagccauuauagucgaaaguucacccccgaaauagcuaagcguccuaaagucagagaucaggaggggaggaucaacuacuauuggacacuucuggagccaggagacacuauuaucuuugaagcaaaugguaacuugauugccccgcgguacgcuuucgcccucucucgcggcuuuggguccggaaucauaaauagcaacgcgcccauggauaagugugacgcaaaaugccagaccccucaaggcgccauuaauucgucucugccauuccagaacguucaccccgugacaaucggugaguguccuaaguauguaagauccgcuaaauuaaggauggugaccgggcugcggaauauuccaucaauccagagucgcggacucuuuggcgccaucgcaggcuucauugaagggggauggacggguauggucgauggcugguacggguaucaucaccagaacgagcaaggaagcggcuacgcugccgaccagaaguccacucagaaugcgauaaacgguaucacaaauaaagugaacucuguuauugaaaagaugaauacccaguuuacugccguggggaaggaguucaacaaacuugagcgaagaauggaaaaccugaauaagaaagucgaugacggcuucaucgauauauggacauacaacgcagaguugcuagugcugcucgaaaaugagaggacccuggacuuucacgacagcaacguaaagaaucuuuaugaaaaaguuaagucacaacugaagaacaaugcuaaagagauuggaaacggcugcuucgaguuuuaccauaaguguaaugaugaaugcauggagagugugaaaaacgggacguaugacuaccccaaguauuccgaagagagcaaauugaaucgggagaagaucgauggagucaagcucgaaucuauggguguguaccagauccuggccauuuauucaaccgucgcuaguagcuuagugcugcuaguuucccucggcgccaucucuuucuggaugugcucgaacgggagccugcagugucguauuugcauauga

SEQ ID NO: 134458 - RNA, 1698 nt, Artificial Sequence; identical to SEQ ID NO: 131664
  derived and/or modified CDS sequence (opt3) from hemagglutinin__InfluenzaA__ADW10549

SEQ ID NO: 134459 - RNA, 1698 nt, Artificial Sequence
  derived and/or modified CDS sequence (opt3) from hemagglutinin__InfluenzaA__ADW10560
augaaggugaaacugcucguccuucugugcaccuucacagccacuuacgcugacacgaucuguauuggcuaucacgcaaacaauagcaccgauacaguugacacuguguuugagaagaacguaaccgugacacauuccgucaauuuguuagaaaacucucacaaugggaaacugugccuacucaagggaauagcgccccugcagcuugguaacuguucaguggccggcuggauccuggggaauccugagugcgaauugcucauuaguaaagagagcugguccuacaucguugaaaagccaaacccggagaauggaaccuguuaucccggccauuucgcugauuacgaggaacugagagagcaacugucuucggugucauccuuugaaagguucgagauuuuuccuaaggagaguuccuggccaaaccacacugucacaggugugucugccagcugcucccauaauggggaacggucauucuaucgcaaccucuuauggcugaccggaaagaauggccuuuaccccaacuugaguaagagcuaugcaaauaacaaagagaaggaaguacugguucuauggggcgugcaccacccuccagacaucggggaucagaaaacgcucuaccauacugagaacgccuacgucucugugguguccucacacuauagccgaaaguuuacccccgaaauagcuaagcguccuaaagucagagaccaggagggaaggaucaauuacuauuggacacugcuugagccaggugauacuauuaucuucgaagcaaacggcaaucugauugccccgcgguacgcuuuugccuugagucgcggguucggaucuggcaucauaaacuccaaugcgcccauggacaagugugaugcaaaaugccagaccccucaaggugccauuaacagcucgcucccauuucagaauguucaucccgugacaaucggggaguguccuaaguauguaagaucugcuaaacugaggauggugaccggauuacggaacauuccauccauccagucacgcggccuguucggcgccaucgcaggguuuauugaaggagguuggacgggcauggucgacgggugguacggauaucaccaccagaaugagcaaggcagugguuacgcugccgaucagaaaagcacucagaacgcgauaaaugggaucacaaacaaagugaauagcguuauugaaaagaugaacacccaguucacugccgugggcaaggaguucaauaaacucgagcgaagaauggaaaaccuuaacaagaaagucgacgauggauuuaucgacauauggacauacaaugcagagcuguuggugcuacuggaaaacgagaggacccucgacuuccaugauucuaauguaaagaaccuguaugaaaaaguuaagagccaacuuaagaauaacgcuaaagagauuggcaaugggugcuuugaguucuaccacaaguguaacgacgaaugcauggagucagugaaaaauggaacguaugauuaccccaaguauagugaagaguccaaacugaaccgggagaagaucgacggugucaaguuggaaagcaugggcguguaccagauccucgccauuuauucuaccgucgcuucaagucugguguuacugguuagccuaggggccaucuccuuuuggaugugcucuaauggaucgcuccagugucguauuugcauauga

SEQ ID NO: 134460 - RNA, 1698 nt, Artificial Sequence; identical to SEQ ID NO: 134001
  derived and/or modified CDS sequence (opt3) from hemagglutinin__InfluenzaA__ADW10571

SEQ ID NO: 134461 - RNA, 1698 nt, Artificial Sequence; identical to SEQ ID NO: 131179
  derived and/or modified CDS sequence (opt3) from hemagglutinin__InfluenzaA__ADW10582

SEQ ID NO: 134462 - RNA, 1698 nt, Artificial Sequence; identical to SEQ ID NO: 131664
  derived and/or modified CDS sequence (opt3) from hemagglutinin__InfluenzaA__ADW10593

SEQ ID NO: 134463 - RNA, 1698 nt, Artificial Sequence; identical to SEQ ID NO: 131664
  derived and/or modified CDS sequence (opt3) from hemagglutinin__InfluenzaA__ADW10604

SEQ ID NO: 134464 - RNA, 1698 nt, Artificial Sequence; identical to SEQ ID NO: 131664
  derived and/or modified CDS sequence (opt3) from hemagglutinin__InfluenzaA__ADW10615

SEQ ID NO: 134465 - RNA, 1698 nt, Artificial Sequence
  derived and/or modified CDS sequence (opt3) from hemagglutinin__InfluenzaA__ADW10626
augaaggugaaacugcucguccuucugugcaccuucacagccacuuacgcugacacgaucuguauuggcuaucacgcaaacaauagcaccgauacaguugacacuguguuggagaagaacguaaccgugacacauuccgucaauuuacuggaaaacucucacaaugggaaacuaugccuccugaagggaauagcgccccuucagcuggguaacuguucaguggccggcuggaucuuggggaauccugagugcgaacuccugauuaguaaagagagcugguccuacaucguugaaaagccaaacccggagaauggaaccuguuaucccggccauuuugcugauuacgaggaacugagagagcaacucucuucggugagcucauucgaaagguuugagauuuucccuaaggagaguuccuggccaaaccacacugucacaggugugucugccagcugcucccauaauggggaaucaaguuuuuaucggaacuuacuguggcuuaccguaaagaauggauuguaccccaaccugagcaaaucuuaugcaaauaacaaagagaaggaaguucuagugcucuggggcguccaccacccuccauccaucguggaccagaaaacgcuguaccgcacugagaacgccuacgugucagucguuagcagucauuauucucgaaaguucacccccgaaauagcuaagcguccuaaagugagagaucaggagggcaggaucaauuacuauuggacacuucuggagccaggggacacuauuaucuuugaagcaaacggaaauuugauugccccgcgguacgcuuucgcccucucccgcgguuuuggcagcgggaucauaaacucgaaugcgcccauggauaagugugacgcaaaaugccagaccccuagaggagccauuaacucuucccugccauuccaaaauguacaccccgugacaaucggcgaguguccuaaguaugucaggucagcuaaauuacggauggugaccggucugcgcaacauuccaaguauccagagccgagggcucuuuggagccaucgcaggcuucauugaaggcggguggacgggaaugguugaugguugguacggcuaucaucaccagaaugagcagggguccggauacgcugccgaccaaaagucuacucagaacgcgauaaauggcaucacaaacaaagugaauagcgucauugaaaagaugaacacccaguuuacugccguggguaaggaguucaauaaacuugagagaaggauggaaaaccugaacaagaaaguagaugacggguucaucgauauauggacauacaaugcagaguugcuaguucugcucgaaaacgagcggacccuggacuuucacgacucaaaugugaagaaccuuuaugaaaaagucaagagucagcugaagaauaacgcuaaagagauuggcaauggaugcuucgaguuuuaccauaaguguaacgaugaaugcauggaguccgugaaaaauggcacguaugacuaccccaaguauagcgaagagucuaaauugaaccgugagaagaucgauggggucaagcucgaaucaaugggaguguaccaaauccuggccauuuauaguaccguugcuagcuccuuagugcugcuaguaucucucggugccaucucguucuggaugugcagcaauggcucccugcagugucgcauuugcauauga

SEQ ID NO: 134466 - RNA, 1698 nt, Artificial Sequence
  derived and/or modified CDS sequence (opt3) from hemagglutinin__InfluenzaA__ADW10721
augaaggugaaacugcucguccuucugugcaccuucacagccacuuacgcugacacgaucuguauuggcuaucacgcaaacaauagcaccgauacaguugacacuguguuggagaagaacguaaccgugacacauuccgucaauuuacuggaaaacucucacaaugggaaacuaugccuccugaagggaauagcgccccuucagcuggguaacuguucaguggccggcuggaucuuggggaauccugagugcgaacuccugauuaguaaagagagcugguccuacaucguugaaaagccaaacccggagaauggaaccuguuaucccggccauuuugcugauuacgaggaacugagagagcaacucucuucggugucaucuuucaagagguuugaaauuuucccuaaagagaguuccuggccaaaccacacugucacaggugugucugccagcugcucccauaauggggagucaaguuuuuaucggaacuuacuguggcuuaccguaaagaauggauuguaccccaaccugagcaaaucuuaugcaaauaacaaggaaaaagagguucuagugcucuggggcguccaccacccuccaaacaucguggaccagcgcacgcuguaccauacugaaaaugccuacguguccgucguuucaagccacuauagucgaaaguucacccccgagauagcuaagcguccuaaagugagaaaccaggaaggcaggaucaauuacuauuggacacuucuggagccaggggauacuauuaucuuugaggcaaacggaaauuugauugccccgcgguacgcuuucgcccucucucgcgguuuuggcuccgggaucauaaacagcaaugcgcccauggacaagugugaugcaaaaugccagaccccuagaggagccauuaacucgucucugccauuccaaaauguacaucccgugacaaucggcgaauguccuaaguaugucagguccgcuaaauuacggauggugaccggucugcgcaacauuccaucaauccagagucgagggcucuuuggagccaucgcaggcuucauugagggcggguggacgggaaugguugacgguugguacggcuaucaccaccagaaugaacaggggagcggauacgcugccgaucaaaaguccacucagaacgcgauaaauggcaucacaaacaaagugaauagcgucauugagaagaugaacacccaguuuacugccguggguaaggaguucaacaaacuugaaagaaggauggagaaucugaacaagaaaguagacgauggguucaucgacauauggacauacaaugcagaauugcuaguucugcucgagaacgaacggacccuggauuuucaugacagcaaugugaagaaccuuuaugagaaagucaagucacagcugaagaauaacgcuaaagaaauuggcaauggaugcuucgaguuuuaccacaaguguaacgacgagugcauggaaagugugaaaaauggcacguaugauuaccccaaguauuccgaggaaagcaaauugaaccgugagaagaucgacggggucaagcucgagucuaugggaguguaccaaauccuggccauuuauucaaccguugcuaguagcuuagugcugcuaguaucccucggugccaucucuuucuggaugugcucgaauggcagccugcagugucgcauuugcauauga

SEQ ID NO: 134467 - RNA, 1698 nt, Artificial Sequence
  derived and/or modified CDS sequence (opt3) from hemagglutinin__InfluenzaA__ADW10743
augaaggugaaacugcucguccuucugugcaccuucacagccacuuacgcugacacgaucuguauuggcuaucacgcaaacaauagcaccgauacaguugacacuguguuggagaagaacguaaccgugacacauuccgucaauuuacuggaaaacucucacaaugggaaacuaugccuccugaagggaauagcgccccuucagcuggguaacuguucaguggccggcuggaucuuggggaauccugagugcgaacuccugauuaguaaagagagcugguccuacaucguugaaaagccaaacccggagaauggaaccuguuaucccggccauuuugcugauuacgaggaacugagagagcaacucucuucggugagcucauucgaaagguuugagauuuucccuaaggagaguuccuggccaaaccacacugucacaggugugucugccagcugcucccauaauggggaaucaaguuuuuaucggaacuuacuguggcuuaccguaaagaauggauuguaccccaaccugagcaaaucuuaugcaaauaacaaagagaaggaaguucuagugcucuggggcguccaccacccuccaaacaucguggaccagaaaacgcuguaccgcacugagaauaccuacguguccgucguuucaagccauuauagucgaaaguucacacccgaaauagccaagcguccuaaaaucagagaucaggagggcaggauuaacuacuauuggacucuucuggagccaggggacaccaucauuuuugaagcuaauggaaacuugaucgcaccgcgguacgccuucgcucucucucgcgguuuuggcuccgggauaauuaauagcaacgcccccauggauaagugugacgcgaaaugccagacaccuagaggagcaaucaauucgucucugccauuccaaaacgugcaccccguaaccauuggcgaguguccuaaguaugugagguccgucaaauuacggauggugacgggucugcgcaauaucccaucaauccagagucgagggcucuuuggagccauugcuggcuucauagaaggcggguggacuggaaugguugaugguugguacggcuaucaucaccagaacgagcaggggagcggauacgccgcagaccaaaaguccacacagaaugcuaucaacggcauuaccaauaaagugaacucugucaucgaaaagaugaauacucaguuuacagccguggguaaggaguucaacaaacuugagagaaggauggaaaaccugaauaagaaaguagaugacggguucauagauauuuggaccuacaacgcggaguugcuaguucugcucgaaaaugagcggacgcuggacuuucacgacagcaacgugaagaaucuuuaugaaaaagucaagucacagcugaagaacaaugccaaagagaucggcaacggaugcuucgaguuuuaccauaaguguaaugaugaaugcauggagagugugaaaaacggcaccuaugacuaccccaaguauuccgaagagagcaaauugaaucgugagaagaucgauggggucaagcucgaaucuaugggaguguaccaaauucuggcaaucuauucaacaguugcuaguagcuuagugcugcuaguaucccucggugccauuucuuucuggaugugcucgaacggcagccugcagugucgcauaugcaucuga

SEQ ID NO: 134468 - RNA, 1698 nt, Artificial Sequence
  derived and/or modified CDS sequence (opt3) from hemagglutinin__InfluenzaA__ADW10754
augaaggugaaacugcucguccuucugugcaccuucacagccacuuacgcugacacgaucuguauuggcuaucacgcaaacaauagcaccgauacaguugacacuguguuggagaagaacguaaccgugacacauuccgucaauuuacuggaaaacucucacaaugggaaacuaugccuccugaagggaauagcgccccuucagcuggguaacuguucaguggccggcuggaucuuggggaauccugagugcgaacuccugauuaguaaagagagcugguccuacaucguugaaaagccaaacccggagaauggaaccuguuaucccggccauuuugcugauuacgaggaacugagagagcaacucucuucggugagcucauucgaaagguuugagauuuucccuaaggagaguuccuggccaaaccacacugucacaggugugucugccagcugcucccauaauggggaaaacucauuuuaucggaauuuacuguggcuuaccggaaagaacggcuuguaccccaaucugaguaagagcuaugcaaacaacaaagagaaggaagugcuaguucucuggggcgugcaccacccuccaaauaucgccgaccagaaaacgcuguaccauacugagaacgcuuacgucucugugguguccucacacuauagccgcaaguucacccccgaaauagcaaagcgaccuaaaguccgugaucaggaggggagaaucaauuacuauuggacacuucuggagccaggagacacuauuaucuuugaagccaacgguaauuugauugcuccgagguacgccuucgcgcucagucggggcuuugggucuggaaucauaaacuccaaugcacccauggauaagugugacgccaaaugccagaccccucaaggcgcuauuaacagcucgcugccauuccagaauguucaucccgugacaaucggugaguguccuaaguauguacgcucugccaaauuaagaauggugaccgggcugaggaacauuccauccguccagucacggggacucuuuggcgcaaucgcuggcuucaucgaagggggauggacggguaugguggauggcugguacggguaucaccaccagaaugagcaaggaaguggcuacgccgcggaccagaaaagcacucagaacgccauuaaugguauaacaaacaaaguuaauuccgugaucgaaaagaugaacacccaguuuacugcagucgggaaggaguucaacaaacuugagcgccgaauggaaaaucugaacaagaaaguggaugacggcuucauugauaucuggacauacaaugcugaguugcuaguacugcucgaaaacgagagaacccuggacuuucaugacucuaauguuaagaaccuuuaugaaaaaguaaagagccaacugaagaauaacgccaaagagauaggaaauggcugcuucgaguuuuaccacaaguguaacgaugaaugcauggagucagucaaaaaugggacguaugacuaccccaaguauagugaagaguccaaauugaacagggagaagauugauggagugaagcucgaaagcaugggugucuaccagauccuggcuaucuauucuaccguggccucaaguuuaguucugcuagugagccucggcgcaauuuccuucuggaugugcucuaaugggucgcugcagugucggaucugcauuuga

SEQ ID NO: 134469 - RNA, 1698 nt, Artificial Sequence
  derived and/or modified CDS sequence (opt3) from hemagglutinin__InfluenzaA__ADW10765
augaaggugaaacugcucguccuucugugcaccuucacagccacuuacgcugacacgaucuguauuggcuaucacgcaaacaauagcaccgauacaguugacacuguguuggagaagaacguaaccgugacacauuccgucaauuuacuggaaaacucucacaaugggaaacuaugccuccugaagggaauagcgccccuucagcuggguaacuguucaguggccggcuggaucuuggggaauccugagugcgaacuccugauuaguaaagagagcugguccuacaucguugaaaagccaaacccggagaauggaaccuguuaucccggccauuuugcugauuacgaggaacugagagagcaacucucuucggugagcucauucgaaagguuugagauuuucccuaaggagaguuccuggccaaaccacacugucacaggugugucugccagcugcucccauaauggggaaucaaguuuuuaucggaacuuacuguggcuuaccgugaaaaauggauuguaccccaaccugagcaagucuuaugcaaauaacaaagagaaggaaguucuagugcucuggggcguccaccacccuccaaacaucguggaccagaaaacgcuguaccauacugagaaugccuacguguccgucguuucaagccacuauagucgcaaguucacccccgaaauagcuaagcgaccuaaagugcguaaccaggagggcagaaucaauuacuauuggacacuucuggagccaggggauacuauuaucuuugaagcaaacggaaauuugauugccccgagguacgcuuucgcccucucucgggguuuuggcuccgggaucauaaacagcaaugcgcccauggacaagugugaugcaaaaugccagaccccucgcggagccauuaacucgucucugccauuccaaaauguacaucccgugacaaucggcgaguguccuaaguaugucagauccgcuaaauuaaggauggugaccggucugcggaacauuccaucaauccagagucgcgggcucuuuggagccaucgcaggcuucauugaaggcggguggacgggaaugguugacgguugguacggcuaucaccaccagaaugagcaggggagcggauacgcugccgaucaaaaguccacucagaacgcgauaaauggcaucacaaacaaaguaaauucugucauugaaaagaugaacacccaguuuacugccguggguaaggaguucaacaaacuugagcgaagaauggaaaaucugaacaagaaaguagacgauggguucaucgacauauggacauacaaugcagaguugcuaguucugcucgaaaacgagaggacccuggauuuucaugacagcaaugugaagaaccuuuaugaaaaagucaagucacagcugaagaauaacgcuaaagagauuggcaauggaugcuucgaguuuuaccacaaguguaacgacgaaugcauggagagugugaaaaauggcacguaugauuaccccaaguauuccgaagagagcaaauugaaccgggagaagaucgacggggucaagcucgaaucuaugggaguguaccaaauccuggccauuuauucaaccguugcuaguagcuuagugcugcuaguaucccucggugccaucucuuucuggaugugcucgaauggcagccugcagugucguauuugcauauga

SEQ ID NO: 134470 - RNA, 1698 nt, Artificial Sequence
  derived and/or modified CDS sequence (opt3) from hemagglutinin__InfluenzaA__ADW10776
augaaggugaaacugcucguccuucugugcaccuucacagccacuuacgcugacacgaucuguauuggcuaucacgcaaacaauagcaccgauacaguugacacuguguuggagaagaacguaaccgugacacauuccgucaauuuacuggaaaacucucacaaugggaaacuaugccuccugaagggaauagcgccccuucagcuggguaacuguucaguggccggcuggaucuuggggaauccugagugcgaacuccugauuaguaaagagagcugguccuacaucguugaaaagccaaacccggagaauggaaccuguuaucccggccauuuugcugauuacgaggaacugagagagcaacucucuucggugagcucauucgaaagguuugagauuuucccuaaggagaguuccuggccaaaccacacugucacaggugugucugccagcugcucccauaauggggaaucaaguuuuuaucggaacuuacuguggcuuaccggcaaaaauggauuguaccccaaccugagcaagucuuaugcaaaugacaaagagaaggaaguucuaguacucuggggcgugcaccacccuccaaacaucgucgaucagaaaacgcuguaccgcacugagaacgccuacguguccguggucucaagccauuauagucgaaaguucacccccgaaauagcuaagcguccuaaaguuagagaccaggaggggaggaucaauuacuauuggacacuucuggagccaggagauacuauuaucuuugaagcaaacgguaauuugauugccccgcgguacgcuuucgcccucucucgcggcuuuggguccggaaucauaaacagcaaugcgcccauggacaagugugaugcaaaaugccagaccccucaaggcgccauuaacucgucucugccauuccagaaugugcaccccguaacaaucggugaguguccuaaguaugugagauccgcuaaauuaaggauggucaccgggcugcggaacauuccaucaauccagagucgcggacucuuuggcgccaucgcaggcuucauugaagggggauggacggguaugguggacggcugguacggguaucaucaccagaaugagcaaggaagcggcuacgcugccgaucagaaguccacucagaacgcgauaaaugguaucacaaacaaaguuaauucugugauugaaaagaugaacacccaguuuacugccgucgggaaggaguucaauaaacuugagcgaagaauggaaaaccugaacaagaaaguggacgauggcuucaucgacauauggacauacaaugcagaguugcuaguacugcucgaaaacgagaggacccuggacuuucacgauagcaauguuaagaaccuuuaugaaaaagugaagucacaacugaagaauaacgcuaaagagauuggaaauggcugcuucgaguuuuaccauaaguguaacgacgaaugcauggagagugucaaaaaugggacguaugauuaccccaaguauuccgaagagagcaaauugaaccgggagaagaucgacggagugaagcucgaaucuaugggugucuaccagauccuggccauuuauucaaccguggcuaguagcuuaguucugcuagugucccucggcgccaucucuuucuggaugugcucgaaugggagccugcagugucguauuugcauauga

SEQ ID NO: 134471 - RNA, 1698 nt, Artificial Sequence
  derived and/or modified CDS sequence (opt3) from hemagglutinin__InfluenzaA__ADW10787
augaaggugaaaauccugguccuccuuugcaccuucacagccacuuacgcugacacgauuuguauaggcuaucacgcaaacaauagcaccgauacaguugacacugugcuggagaagaacguaaccgugacacauuccgucaauuuguuagaaaacucucacaaugggaaacugugccuacucaagggaaucgcgccccugcagcuugguaacuguucaguggccggcuggauucuggggaauccugagugcgaauugcucaucaguaaagagagcugguccuacauuguugaaaagccaaacccggagaauggaaccuguuaucccggccauuuugcugauuacgaggaacugagagagcaacugucuucggugagcucauucgaaagguuugagaucuucccuaaggagaguuccuggccaaaccacacugucacaggugugucugccagcugcucccauaauggggaaucaaguuuuuaucggaaccucuuauggcugaccguuaaaaauggacuuuaccccaacuugagcaagucuuaugcaaauaacaaagagaaggaaguacuggugcuauggggcguccaccacccuccaaacauaguggaccagaaaacgcucuaccgcacugagaaugccuacguguccgucguuucaagccauuauagucgaaaguucacccccgaaaucgcuaagcguccuaaagugagagaucaggagggcaggauuaacuacuauuggacacugcuugagccaggggacacuaucauuuuugaagcaaauggaaaccugaucgccccgcgguacgcuuucgccuugucucgcgguuuuggcuccgggauaauuaauagcaacgcgcccauggauaagugugacgcaaaaugccagaccccuagaggagccaucaauucgucucucccauuccaaaacguacaccccgugacaauuggcgaguguccuaaguaugucagguccgcuaaacugcggauggugaccgguuuacgcaauaucccaucaauccagagucgagggcuguuuggagccauugcaggcuucauagaaggcggguggacgggaaugguugaugguugguacggcuaucaucaccagaacgagcaggggagcggauacgcugccgaccaaaaguccacucagaaugcgaucaacggcauuacaaauaaagugaacucugucaucgaaaagaugaauacccaguuuacugccguggguaaggaguucaacaaacucgagagaaggauggaaaaccuuaauaagaaaguagaugacggguucauagauauuuggacauacaacgcagagcuguugguucuacuggaaaaugagcggacccucgacuuucacgacagcaacgugaagaaucuguaugaaaaagucaagucacagcuuaagaacaaugcuaaagagaucggcaacggaugcuucgaguuuuaccauaaguguaaugaugaaugcauggagagugugaaaaacggcacguaugacuaccccaaguauuccgaagagagcaaacugaaucgugagaagaucgauggggucaaguuggaaucuaugggaguguaccaaauucucgccaucuauucaaccguugcuaguagccugguguuacugguaucccuaggugccauuucuuucuggaugugcucgaacggcagccuccagugucgcauaugcaucuga

SEQ ID NO: 134472 - RNA, 1698 nt, Artificial Sequence
  derived and/or modified CDS sequence (opt3) from hemagglutinin__InfluenzaA__ADW10798
augaaggugaaacugcucguccuucugugcaccuucacagccacuuacgcugacacgaucuguauuggcuaucacgcaaacaauagcaccgauacaguugacacuguguuggagaagaacguaaccgugacacauuccgucaauuuacuggaaaacucucacaaugggaaacuaugccuccugaagggaauagcgccccuucagcuggguaacuguucaguggccggcuggaucuuggggaauccugagugcgaacuccugauuaguaaagagagcugguccuacaucguugaaaagccaaacccggagaauggaaccuguuaucccggccauuuugcugauuacgaggaacugagagagcaacucucuucggugagcucauucgaaagguuugagauuuucccuaaggagaguuccuggccaaaccacacugucacaggugugucugccagcugcucccauaauggggaaucaaguuuuuaucggaacuuacuguggcuuaccggcaaaaauggauuguaccccaaccugagcaagucuuaugcaaauaacaaagagaaggaaguucuaguacucuggggcgugcaccacccuccaaacaucgucgaccagaaaacgcuguaccgcacugagaaugccuacguguccguggucucaagccauuauagucgaaaguucacccccgaaauagcuaagcguccuaaaguuagagaucaggaggggaggaucaacuacuauuggacacuucuggagccaggagacacuauuaucuuugaagcaaaugguaacuugauugccccgcgguacgcuuucgcccucucucgcggcuuuggguccggaaucauaaauagcaacgcgcccaugggcaagugugaugcaaaaugccagaccccucaaggugccauuaauucgucucugccauuccagaacgugcaccccguaacaaucggggaguguccuaaguaugugagauccgcuaaauuaaggauggucaccggacugcggaauauuccaucaauccagagucgcggccucuuuggcgccaucgcaggguucauugaaggagguuggacgggcaugguggacgggugguacggauaucaucaccagaacgagcaaggcagcgguuacgcugccgaucagaaguccacucagaaugcgauaaacgggaucacaaauaaaguuaacucugugauugaaaagaugaauacccaguuuacugccgucggcaaggaguucaacaaacuugagcgaagaguggaaaaccugaauaagaaaguagacgauggauucaucgacauauggacauacaacgcagaguugcuaguucugcucgaaaaugagaggacccuggauuuucacgacagcaacgugaagaaucuuuaugaaaaagucaagucacaacugaagaacaaugcuaaagagauuggcaacgggugcuucgaguuuuaccauaaguguaaugacgaaugcauggagagugugaaaaacggaacguaugauuaccccaaguauuccgaagagagcaaauugaaucgggagaagaucgacggugucaagcucgaaucuaugggcguguaccagauccuggccauuuauucaaccguugcuaguagcuuagugcugcuaguaucccucggggccaucucuuucuggaugugcucgaacggaagccugcagugucguauuugcauauga

SEQ ID NO: 134473 - RNA, 1698 nt, Artificial Sequence; identical to SEQ ID NO: 134469
  derived and/or modified CDS sequence (opt3) from hemagglutinin__InfluenzaA__ADW10809

SEQ ID NO: 134474 - RNA, 1698 nt, Artificial Sequence; identical to SEQ ID NO: 131664
  derived and/or modified CDS sequence (opt3) from hemagglutinin__InfluenzaA__ADW10820

SEQ ID NO: 134475 - RNA, 1698 nt, Artificial Sequence; identical to SEQ ID NO: 131179
  derived and/or modified CDS sequence (opt3) from hemagglutinin__InfluenzaA__ADW10831

SEQ ID NO: 134476 - RNA, 1698 nt, Artificial Sequence
  derived and/or modified CDS sequence (opt3) from hemagglutinin__InfluenzaA__ADW10842
augaaggugaaacugcucguccuucugugcaccuucacagccacuuacgcugacacgaucuguauuggcuaucacgcaaacaauagcaccgauacaguugacacuguguuggagaagaacguaaccgugacacauuccgucaauuuacuggaaaacucucacaaugggaaacuaugccuccugaagggaauagcgccccuucagcuggguaacuguucaguggccggcuggaucuuggggaauccugagugcgaacuccugauuaguaaagagagcugguccuacaucguugaaaagccaaacccggagaauggaaccuguuaucccggccauuuugcugauuacgaggaacugagagagcaacucucuucggugagcucauucgaaagguuugagauuuucccuaaggagaguuccuggccaaaccacacugucacaggugugucugccagcugcucccauaauggggaaucaaguuuuuaucggaacuuacuguggcuuaccguaaagaauggauuguaccccaaccugagcaaaucuuaugcaaauaacaaagagaaggaaguucuagugcucuggggcguccaccacccuccaaacaucguggaccagaaaacgcuguaccgcacugagaaugccuacguguccgucguuucaagccauuauagucgaaaguucgcucccgaaauagcaaagcguccuaaagugagagaucaggagggcaggaucaacuacuauuggacccuucuggagccaggggacacaauuaucuuugaagccaauggaaacuugauugcuccgcgguacgccuucgcgcucucucgcgguuuuggcuccgggaucauaaauagcaacgcacccauggauaagugugacgccaaaugccagacuccuagaggagcuauuaauucgucucugccauuccaaaacguacaccccgugaccaucggcgaguguccuaaguaugucagguccgccaaauuacggauggugacaggucugcgcaauauuccaucaauccagagucgagggcucuuuggagcaaucgcuggcuucauugaaggcggguggaccggaaugguugaugguugguacggcuaucaucaccagaacgagcaggggagcggauacgccgcggaccaaaaguccacgcagaaugccauaaacggcaucacuaauaaagugaacucugucauugaaaagaugaauacacaguuuaccgcaguggguaaggaguucaacaaacuugagagaaggauggaaaaccugaauaagaaaguagaugacggguucaucgauauauggacuuacaacgcugaguugcuaguucugcucgaaaaugagcggacacuggacuuucacgacagcaacgugaagaaucuuuaugaaaaagucaagucacagcugaagaacaaugccaaagagauuggcaacggaugcuucgaguuuuaccauaaguguaaugaugaaugcauggagagugugaaaaacggcaccuaugacuaccccaaguauuccgaagagagcaaauugaaucgugagaagaucgauggggucaagcucgaaucuaugggaguguaccaaauccuggcuauuuauucaacgguugccaguagcuuagugcugcuaguaucccucggugcaaucucuuucuggaugugcucgaacggcagccugcagugucgcauuugcauauga

SEQ ID NO: 134477 - RNA, 1698 nt, Artificial Sequence; identical to SEQ ID NO: 134020
  derived and/or modified CDS sequence (opt3) from hemagglutinin__InfluenzaA__ADW10853

SEQ ID NO: 134478 - RNA, 1698 nt, Artificial Sequence; identical to SEQ ID NO: 134469
  derived and/or modified CDS sequence (opt3) from hemagglutinin__InfluenzaA__ADW10864

SEQ ID NO: 134479 - RNA, 1698 nt, Artificial Sequence; identical to SEQ ID NO: 134469
  derived and/or modified CDS sequence (opt3) from hemagglutinin__InfluenzaA__ADW10875

SEQ ID NO: 134480 - RNA, 1698 nt, Artificial Sequence; identical to SEQ ID NO: 131664
  derived and/or modified CDS sequence (opt3) from hemagglutinin__InfluenzaA__ADW10886

SEQ ID NO: 134481 - RNA, 1698 nt, Artificial Sequence
  derived and/or modified CDS sequence (opt3) from hemagglutinin__InfluenzaA__ADW10897
augaaggugaaacugcucguccuucugugcaccuucacagccacuuacgcugacacgaucuguauuggcuaucacgcaaacaauagcaccgauacaguugacacuguguuggagaagaacguaaccgugacacauuccgucaauuuacuggaaaacucucacaaugggaaacuaugccuccugaagggaauagcgccccuucagcuggguaacuguucaguggccggcuggaucuuggggaauccugagugcgaacuccugauuaguaaagagagcugguccuacaucguugaaaagccaaacccggagaauggaaccuguuaucccggccauuuugcugauuacgaggaacugagagagcaacucucuucggugagcucauucgaaagguuugagauuuucccuaaggagaguuccuggccaaaccacacugucacaggugugucugccagcugcucccauaauggggaaucaaguuuuuaucggaacuuacuguggcuuaccggaaagaauggcuuguaccccaaccugagcaagucuuaugcaaauaacaaagagaaggaagugcuaguucucuggggcgugcaccacccuccauccaucucagaccagaaaacgcuguaccauacugagaacgccuacgucagcguggugaguucucacuauucccgcaaguucacccccgaaauagcuaagcgaccuaaaguccgugaucaggaggggagaaucaauuacuauuggacacuucuggagccaggagacacuauuaucuuugaagcaaacgguaauuugauugccccgagguacgcuuucgcccucagccggggcuuugggucgggaaucauaaacucuaaugcgcccauggauaagugugacaccaaaugccagacaccucaaggcgcaauuaacuccucacugccauuccagaauguucaucccgugaccaucggugaguguccuaaguauguacgcagugccaaauuaagaauggugacggggcugaggaacauuccaagcauccagucccggggacucuuuggcgcuaucgccggcuucauugaagggggauggacugguauggucgauggcugguacggguaucaccaccagaaugagcaaggaucuggcuacgcagcugaccagaaaagcacacagaacgccauaaaugguaucaccaacaaaguaaauucaguuauugaaaagaugaacacucaguuuacagcgguggggaaggaguucaauaaacuugagcgccgaauggaaaaccugaacaagaaagucgaugacggcuucaucgauauauggaccuacaaugccgaguugcuagugcugcucgaaaacgagagaacgcuggacuuucaugacaguaauguaaagaaccuuuaugaaaaaguuaagucccaacugaagaauaacgcaaaagaggugggaaauggcugcuucgaguuuuaccacaaguguaacgaugaaugcauggagagcgucaaaaaugggaccuaugacuaccccaaguauucugaagagucaaaauugaacagggagaagauugauggagugaagcucgaaaguaugggugucuaccagauccuggcuaucuauagcacaguggccuccucuuuaguucugcuagugucgcucggcgcuauuagcuucuggaugugcuccaaugggucacugcagugucggaucugcauuuga

SEQ ID NO: 134482 - RNA, 1701 nt, Artificial Sequence
  derived and/or modified CDS sequence (opt3) from hemagglutinin__InfluenzaA__ADW23115
augaagaccaucauugcccugagcuacauacucugccuuguguucgcucagaaacugcccggcaacggaaauuccacagcaacuuuguguuuagggcaccaugccgucccuaacgguacgaucguuaagaccauuacaaaugaccaaaucgaggugacuaacgcgaccgaacugguacagucuucaaguacaggcgagauuugcgauagcccacaccagauccuagacggggaaaauuguacccucauagaugcucugcuuggagacccgcagugcgauggcuuucaaaacaaaaagugggaccuguucguggagagauccaaagccuauucuaauuguuaccccuaugaugucccugacuacgcaucguugaggucacucguggccagcagugguacucuggaauuuaacaaugaguccuucaacuggacagggguuacccagaauggaacgucuagcgcuugcauccggcgcuccaacaauucauuuuucagucgacugaacuggcucacucauagcaaguuuaaguauccagcauuaaaugugaccaugcccaacaacgagcaguucgauaaacuguacauuuggggcguccaccauccuggcacagacaaugaucagaucuuucuuuaugcccaggcuucugggcguauuacuguguccaccaagagaucacaacagacaguaaucccaaacauaggaagcaggccccggguucgcaauauuccuaguagaaucucuauuuacuggaccaucgugaaaccaggugacaucuugcugauuaacuccacgggcaaucuaauagccccgaggggguacuucaagauccggagcggaaaaucgucuauuaugcgcuccgaugcgcccaucggcaaguguaacucagaaugcauaacuccuaaugguaguauuccaaacgacaagcccuuucagaaugucaaccgaaucacauauggggcauguccuagauacgugaaacaaaauacccucaagcuggccacuggaaugaggaacgugccagagaaacagacacggggcaucuucggcgcuauugccggguuuaucgaaaauggaugggaggguauggucgacggcugguauggguuccgucaccagaacagcgagggacgcggccaagcagcugaucuuaaguccacccaggccgcgauugaccagauaaaugguaaacugaacagauugaucgggaagacgaacgaaaaauuccaccagauugagaaggaauuuucugagguugaaggcaggauccaagaucucgagaaguacguggaggacaccaaaaucgaucuguggagcuauaaugccgaauuacugguagcacucgagaaccagcauacaauugaccuuacugauucagaaaugaauaagcuguucgagaaaaccaagaaacaguugcgggaaaacgcugaggacaugggaaauggcugcuuuaagauauaccacaagugugauaacgccugcaucgggaguauucgaaauggaacauaugaccaugauguguaccgcgacgaggcucuaaacaauagauuccagaucaaaggugucgaacugaaguccggcuacaaagacuggauucucuggaucagcuuugccauaucuugcuuccugcuuuguguggcacuguugggguuuaucaugugggccugccaaaagggaaacauuagguguaauaucugcauuuga

SEQ ID NO: 134483 - RNA, 1701 nt, Artificial Sequence
  derived and/or modified CDS sequence (opt3) from hemagglutinin__InfluenzaA__ADW54481
augaaggccauccuggugguccuccuuuacaccuucgcuacagcaaacgccgacacucugugcauuggcuaucacgcgaauaacagcacggauaccguugacacaguguuggagaaaaauguaacugugacccauuccgucaacuuacuggaagauaagcacaaugggaaacuauguaagcucagaggaguggcuccccugcaucuugguaaaugcaacauagccggcuggauccuggggaauccugagugugaaucuuugucaacagcaaguagcugguccuacauuguugagaccucuucgucagacaacggaacuugcuauccaggcgauuuuaucgacuacgaggagcucagggagcagcugagcaguguguccucuuucgaacgguuugagauuuucccgaagacaagcuccuggcccaaucacgauucaaacaagggugucaccgccgcuuguccucaugcaggggccaaaaguuuuuauaagaaucugaucuggcucgugaaaaagggaaacagcuacccaaaauuaucuaaguccuauauaaaugacaagggcaaagaaguacugguucuuuggggcauccaccaccccucaacgacugcugaucaacagagcuuguaccagaacgccgacaccuacguguucgucgggacaagucgcuauucuaagaaauuuaagccugagauugcgauccgaccaaaagugcgugaucaggagggaagaaugaauuacuauuggacucugguggaacccggugacaagauuaccuucgaggcaacaggcaaccuagucguuccuagguacgccuuugcuauggaacggaacgccggguccggaaucauaauuagcgauaccccagugcaugacugcaauacgacuugucaaacaccgaaaggcgcaaucaacaccucgcuccccuuccagaauauucacccuaucacuaucgguaagugcccaaaguauguaaaaucuacaaagcugcgccuugcuaccgggcugagaaacgugcccuccauucagucaaggggauuguuuggcgccauagcgggcuucaucgaagggggauggacggguauggucgacggcugguacggguaucaucaccagaaugaacaaggaaguggcuacgccgcagaucucaaaagcacccagaacgcuauugacaagaucacaaauaaagugaacuccguuauagagaagaugaauacucaguuuaccgccguggguaaggaguucaaccaccuggaaaaacggauugagaauuuaaacaagaaagucgaugacggguuccuggauaucuggacauacaaugcugaacuccuugugcuguuggagaacgaacgcacucuagacuaucaugauucuaauguaaagaaccuguacgagaaaguucgaaaccagcucaagaauaacgccaaggagaucggcaauggauguuuugaguucuaucacaaaugcgacaacaccuguauggaaagcgugaagaauggcacauacgauuauccuaaauacucagaagaggcaaagcugaacagagaagagauugacggggucaaacuugagaguaccaggaucuaucaaauucuggccauauacuccacuguggcuagcucuuugguccucgugguuucacugggagcgaucaguuuuuggaugugcagcaaugguuccuuacagugccggauuuguaucuga

SEQ ID NO: 134484 - RNA, 1701 nt, Artificial Sequence
  derived and/or modified CDS sequence (opt3) from hemagglutinin__InfluenzaA__ADW54512
augaaggccauccuggugguccuccuuuacaccuucgcuacagcaaacgccgacacucugugcauuggcuaucacgcgaauaacagcacggauaccguugacacaguguuggagaaaaauguaacugugacccauuccgucaacuuacuggaagauaagcacaaugggaaacuauguaagcucagaggaguggcuccccugcaucuugguaaaugcaacauagccggcuggauccuggggaauccugagugugaaucuuugucaacagcaaguagcugguccuacauuguugagaccucuucgucagacaacggaacuugcuauccaggcgauuuuaucgacuacgaagaacucagggagcagcugagcaguguguccucuuucaagcgguuugaaauuuucccgaagacaagcuccuggcccaaucacgauucaaacaaaggugucaccacggccuguccucaugcuggggcaaagaguuuuuauaaaaaucugaucuggcucgugaagaaaggaaacagcuacccaaaguuaucuaaguccuauauaaaugacaaaggcaaggagguacugguucuuuggggcauccaccaucccccuacuucagccgaucaacagagcuuguaccagaacgcugacgccuacguguucgucgggaccagucgcuauucuaaaaaguuuaaaccagaaauugcgauccgacccaaggugcgugaucaggagggaagaaugaauuacuauuggacacugguggagccuggugacaaaauuacuuucgaagcaaccggcaaccuagucguuccaagguacgccuuugcuauggagcggaacgccggguccggaaucauaauuagcgauacaccggugcacgacugcaauaccacgugucaaacucccaagggcgcaaucaacacaucgcucccuuuccagaauauucacccaaucaccaucgguaagugccccaaauauguaaagucuacuaaacugcgccuugcuacagggcugagaaacgugccuuccauucagucaaggggauuguuuggcgccauagcgggcuucaucgaagggggauggaccgguauggucgacggcugguacggguaucaucaccagaaugagcaaggaaguggcuacgccgcagaucucaagagcacgcagaacgcuauugacgaaaucaccaauaaagugaacuccguuauagagaagaugaauacacaguuuacugccguggguaaggaguucaaccaccuggaaaaacggauugagaauuuaaacaagaaagucgaugacggguuccuggauaucuggaccuacaaugcugaacuccuugugcuguuggagaacgaacgcacacuagacuaucaugauucuaauguaaagaaccuguacgagaaaguucgaagccagcucaagaacaaugccaaggagaucggcaacggauguuuugaguucuaucacaaaugcgacaauacuuguauggagucagugaagaacggcaccuacgauuauccaaaauacagugaagaggcaaagcugaauagagaagagauugacggggucaaacuugaguccacaaggaucuaucaaauucuggccauauacagcaccguggcuucuucauugguccucgugguuagucugggagcgaucagcuuuuggaugugcuccaacgguucuuuacagugccggauuuguaucuga

SEQ ID NO: 134485 - RNA, 1701 nt, Artificial Sequence
  derived and/or modified CDS sequence (opt3) from hemagglutinin__InfluenzaA__ADW54527
augaaggccauccuggugguccuccuuuacaccuucgcuacagcaagcgccgacacucugugcauuggcuaucacgcgaacaauuccacggauaccguugacacaguguuggagaaaaacguaacugugacccauucugucaauuuacuggaagauaagcacaacgggaaacuauguaagcucagaggaguggcuccccugcaucuugguaaaugcaauauagccggcuggauccuggggaacccugagugugaaucauugaguacagcaagcuccuggucuuacauuguugagaccucgucaagcgacaauggaacuugcuauccaggcgauuuuaucgacuacgaggagcucagggagcagcugaguuccgugucuagcuucgaacgguuugagauuuucccgaagacauccucauggcccaaccacgauaguaauaagggugucaccacggccuguccucaugcuggggcaaagagcuuuuauaaaaaccugaucuggcucgugaaaaagggaaauucuuacccaaaauuauccaagucauauauaaacgacaagggcaaagaaguacugguucuuuggggcauccaccaucccccuacuagcgccgaucaacagaguuuguaccagaaugcugacgccuacguguucgucgggaccucucgcuauuccaagaaauuuaagccagagauugcgauccgacccaaagugcgugaucaggagggaagaaugaacuacuauuggacacugguggaaccuggugacaagauuacuuucgaggcaaccggcaaucuagucguuccaagguacgccuuugcuauggaacggaacgccgggagcggaaucauaauuucggauacaccggugcacgacugcaacaccacgugucaaacucccaauggcgcaaucaacacaucucucccuuuccagaauauucacccaaucaccaucgguaaaugccccaaguauguaaaguccacuaaacugcgccuugcuacagggcugagaaacgugccuucaauucagaguaggggauuguuuggcgccauagcgggcuucaucgaagggggauggaccgguauggucgacggcugguacggguaucaucaccagaaugaacaaggaagcggcuacgccgcagaucucaaguccacgcagaacgcuauugacgagaucaccaauaaagugaacucuguuauagagaagaugaauacacaguuuacugccguggguaaagaguucaaccaccuggaaaagcggauugaaaauuuaaacaagaaagucgaugacggguuccuggauaucuggaccuacaaugcugagcuccuugugcuguuggaaaacgagcgcacacuagacuaucaugauagcaauguaaagaaccuguacgagaaaguucgaucacagcucaagaacaaugccaaagaaaucggcaacggauguuuugaguucuaucacaagugcgacaauacuuguauggaaagugugaagaacggcaccuacgauuauccaaaauacuccgaggaagcaaagcugaauagagaggagauugacggggucaaacuugaaagcacaaggaucuaucaaauucuggccauauacucuaccguggcuucaaguuugguccucgugguuagccugggagcgaucuccuuuuggaugugcucuaacgguucguuacagugccggauuuguaucuga

SEQ ID NO: 134486 - RNA, 1701 nt, Artificial Sequence; identical to SEQ ID NO: 134483
  derived and/or modified CDS sequence (opt3) from hemagglutinin__InfluenzaA__ADW65825

SEQ ID NO: 134487 - RNA, 1701 nt, Artificial Sequence
  derived and/or modified CDS sequence (opt3) from hemagglutinin__InfluenzaA__ADW82135
augaagaccaucauugcccugagcuacauacucugccuuguguucgcucagaaacugcccggcaacgacaauuccacagcaacuuuguguuuagggcaccaugccgucccuaacggaacgguugugaagaccaucacaaaugaucaaauugagguaacuaacgcgaccgaacuggugcagucuucaaguacaggugagaucugcgacagcccacaccagauucuagauggcaaaaauuguacccucaucgacgcucugcuuggggauccgcagugcgacggauuucaaaacaagaaaugggaucuguucgucgaaagauccaaggccuauucuaauuguuaccccuaugacgugccugauuacgcaucguugaggucacucguugccagcaguggcacucuggaguuuaacaaugaauccuucaacuggacaggugugacccagaaugggacgucuagcgcuugcauacggcgcuccaagaacucauuuuucagucgacugaauuggcucacucauuuaaacuuuaaauauaccgcacugaaugucacaaugccaaacaacgagcaguucgacaagcuguacaucuggggagugcaccaucccggcacugauaaagaccagauuuuucuuuaugcccaagcuagcggccguaucaccguaucuacaaagagaucccagcagaccguuauuccuaauaucgggucaaggccacgggugcgcaacauacccagcagaauuaguaucuacuggacgauugucaaaccuggagauauccugcuaaucaauucuacugguaaccucauugccccaaggggcuacuucaagauacgguccgggaaaagcucgaucaugcgcucugacgcgccgauuggaaaauguaauuccgagugcaucacacccaacggcucaauaccuaaugacaagccauuucagaacgugaaucgaauuaccuauggugcaugucccagauacgugaaacaaaacacucugaaguuggccacagggaugaggaaugucccugaaaaacagacccggggaaucuucggcgcuaucgccggcuuuauugagaacgggugggaaggaaugguugaugguugguauggcuuccgucaccagaauagugaggggcgcggacaagcagcugaccuuaagagcacgcaggccgcgaucgaucagauuaacggcaaauugaauagacucauagguaagaccaacgagaaguuccaccagaucgaaaaagaguuuuccgaaguggaggggaggauucaagaccuggaaaaguacguagaggauacaaaaaucgacuuauggucuuauaacgccgagcugcucguggcacuugaaaaucagcauacuaucgaucugaccgacagcgagaugaacaaguuguucgaaaagacaaagaagcagcuacgggagaaugcugaagauaugggcaacggaugcuuuaaaauuuaccacaagugugacaaugccugcauaggcucaauccgaaacgggacuuaugaucaugacgucuaccgcgacgaggcucugaauaacagauuccagauuaaaggaguggagcucaagagugguuacaaagauuggauccuguggauuuccuuugccaucagcugcuuccuucuguguguugcauugcucggcuuuauaaugugggccugccaaaaggggaauaucagguguaacauuugcaucuga

SEQ ID NO: 134488 - RNA, 1701 nt, Artificial Sequence; identical to SEQ ID NO: 134487
  derived and/or modified CDS sequence (opt3) from hemagglutinin__InfluenzaA__ADW82155

SEQ ID NO: 134489 - RNA, 1701 nt, Artificial Sequence; identical to SEQ ID NO: 134487
  derived and/or modified CDS sequence (opt3) from hemagglutinin__InfluenzaA__ADW82166

SEQ ID NO: 134490 - RNA, 1701 nt, Artificial Sequence; identical to SEQ ID NO: 134487
  derived and/or modified CDS sequence (opt3) from hemagglutinin__InfluenzaA__ADW82177

SEQ ID NO: 134491 - RNA, 1701 nt, Artificial Sequence; identical to SEQ ID NO: 130717
  derived and/or modified CDS sequence (opt3) from hemagglutinin__InfluenzaA__ADW82188

SEQ ID NO: 134492 - RNA, 1701 nt, Artificial Sequence; identical to SEQ ID NO: 130717
  derived and/or modified CDS sequence (opt3) from hemagglutinin__InfluenzaA__ADW82198

SEQ ID NO: 134493 - RNA, 1701 nt, Artificial Sequence; identical to SEQ ID NO: 130717
  derived and/or modified CDS sequence (opt3) from hemagglutinin__InfluenzaA__ADW82208

SEQ ID NO: 134494 - RNA, 1701 nt, Artificial Sequence; identical to SEQ ID NO: 130717
  derived and/or modified CDS sequence (opt3) from hemagglutinin__InfluenzaA__ADW82218

SEQ ID NO: 134495 - RNA, 1701 nt, Artificial Sequence; identical to SEQ ID NO: 130717
  derived and/or modified CDS sequence (opt3) from hemagglutinin__InfluenzaA__ADW82228

SEQ ID NO: 134496 - RNA, 1701 nt, Artificial Sequence; identical to SEQ ID NO: 130717
  derived and/or modified CDS sequence (opt3) from hemagglutinin__InfluenzaA__ADW82238

SEQ ID NO: 134497 - RNA, 1701 nt, Artificial Sequence; identical to SEQ ID NO: 130717
  derived and/or modified CDS sequence (opt3) from hemagglutinin__InfluenzaA__ADW82248

SEQ ID NO: 134498 - RNA, 1701 nt, Artificial Sequence; identical to SEQ ID NO: 130717
  derived and/or modified CDS sequence (opt3) from hemagglutinin__InfluenzaA__ADW82258

SEQ ID NO: 134499 - RNA, 1701 nt, Artificial Sequence
  derived and/or modified CDS sequence (opt3) from hemagglutinin__InfluenzaA__ADW82268
augaaggccauccuggugguccuccuuuacaccuucgcuacagcaaacgccgacacucugugcauuggcuaucacgcgaauaacagcacggauaccguugacacaguguuggagaaaaauguaacugugacccauuccgucaacuuacuggaagauaagcacaaugggaaacuauguaagcucagaggaguggcuccccugcaucuugguaaaugcaacauagccggcuggauccuggggaauccugagugugaaucuuugucaacagcaaguagcugguccuacauuguugagaccucuucgucagacaacggaacuugcuauccaggcgauuuuaucgacuacgaggagcucagggagcagcugagcaguguguccucuuucgaacgguuugagauuuucccgaagacaagcuccuggcccaaucacgauucaaacaagggugucaccgccgcuuguccucaugcaggggccaaaaguuuuuauaagaaucugaucuggcucgugaaaaagggaaacagcuacccaaaauuaucuaaguccuauauaaaugacaagggcaaagaaguacugguucuuuggggcauccaccaccccucaacgagcgcugaucaacagaguuuguaccagaacgccgacgcguacguguucgucgggacuucucgcuauuccaagaaauuuaagccugagauugcaauccgaccaaaagugcgugaucaggagggaagaaugaauuacuauuggacccugguggaacccggugacaagauuacauucgaggccacuggcaaccuagucguuccuagguacgcuuuugccauggaacggaacgcagggagcggaaucauaauuucggauaccccagugcaugacugcaauacaaccugucaaacgccgaaaggcgcuaucaacacuucucuccccuuccagaauauucacccuaucacaaucgguaagugcccaaaguauguaaaauccaccaagcugcgccuugccacugggcugagaaacgugcccucaauucagaguaggggauuguuuggcgcgauagccggcuucaucgaagggggauggacagguauggucgacggcugguacggguaucaucaccagaaugaacaaggaagcggcuacgcagcugaucucaaauccacccagaacgccauugacgagaucacgaauaaggugaacucuguuauagagaaaaugaauacccaguuuacagcuguggguaaggaguucaaccaccuggaaaagcggauugaaaauuuaaacaaaaaggucgaugacggguuccuggauaucuggacuuacaaugccgagcuccuugugcuguuggaaaacgagcgcacccuagacuaucaugauagcaauguaaagaaccuguacgagaagguucgaucacagcucaaaaacaaugcaaaggaaaucggcaacggauguuuugaguucuaucacaagugcgacaauacauguauggaaagugugaaaaacggcacuuacgauuauccuaaguacuccgaggaagccaaacugaauagagaggagauugacggggucaaacuugaaagcaccaggauccaucaaauucuggcuauauauucuacaguggcgucaaguuugguccucgugguuagccugggagcaaucuccuuuuggaugugcucuaacgguucguuacagugccggauuuguaucuga

SEQ ID NO: 134500 - RNA, 1701 nt, Artificial Sequence; identical to SEQ ID NO: 134487
  derived and/or modified CDS sequence (opt3) from hemagglutinin__InfluenzaA__ADW93760

SEQ ID NO: 134501 - RNA, 1701 nt, Artificial Sequence
  derived and/or modified CDS sequence (opt3) from hemagglutinin__InfluenzaA__ADW95319
augaaggccauccuggugguccuccuuuacaccuucgcuacagcaaacgccgacacucugugcauuggcuaucacgcgaauaacagcacggauaccguugacacaguguuggagaaaaauguaacugugacccauuccgucaacuuacuggaagauaagcacaaugggaaacuauguaagcucagaggaguggcuccccugcaucuugguaaaugcaacauagccggcuggauccuggggaauccugagugugaaucuuugucaacagcaaguagcugguccuacauuguugagaccucuucgucagacaacggaacuugcuauccaggcgauuuuaucgacuacgaagaacucagggagcagcugagcaguguguccucuuucgaacgguuugagauuuucccgaagacaagcuccuggcccaaucacgauucaaacaagggugucaccgccgcuuguccucaugcaggggccaaaggauuuuauaagaaucugaucuggcucgugaaaaagggcaacaguuacccaaaauuaagcaagucuuauauaaaugacaagggcaaagaaguacugguucuuugggggauccaccaccccuccacgacugcugaucaacagucauuguaccagaacgccgacaccuacguguucgucggaacaagccgcuauaguaagaaauuuaagccugagauugcgauccgaccaaaagugcgugaucaggaggguagaaugaauuacuauuggacucugguggaacccggcgacaagauuaccuucgaggcaacagggaaccuagucguuccuagguacgccuuugcuauggaacggaacgccggaucuggcaucauaauuuccgauaccccagugcaugacugcaauacgacuugucaaacaccgaaaggugcaaucaacaccagccuccccuuccagaauauucacccuaucacuaucgggaagugcccaaaguauguaaaaucgacaaagcugcgccuugcuaccggacugagaaacgugcccucuauucaguccaggggcuuguuuggcgccauagcgggguucaucgagggagguuggacgggcauggucgacgggugguacggauaucaucaccagaaugaacaaggcucagguuacgccgcagaucucaaaaguacccagaacgcuauugacgagaucacaaauaaggugaacagcguuauagagaaaaugaauacucaguuuaccgccguggggaaggaguucaaccaccuggagaagcggauugaaaauuuaaacaaaaaggucgaugacggcuuccuggauaucuggacauacaaugcugagcuccuugugcuguuggaaaacgagcgcacucuagacuaucaugauuccaauguaaagaaccuguacgagaagguucgaaaccagcucaaaaauaacgccaaggaaaucggaaauggcuguuuugaguucuaucacaagugcgacaacaccuguauggaaucugugaaaaaugggacauacgauuauccuaaguacagcgaggaagcaaaacugaacagagaggagauugacggagucaaacuugaaucaaccaggaucuaucaaauucuggccauauacaguacuguggcuuccagcuugguccucgugguuucucugggugcgaucucauuuuggaugugcaguaauggcagcuuacagugccggauuuguaucuga

SEQ ID NO: 134502 - RNA, 1701 nt, Artificial Sequence
  derived and/or modified CDS sequence (opt3) from hemagglutinin__InfluenzaA__ADW95332
augaaggccauccuggugguccuccuuuacaccuucgcuacagcaaacgccgacacucugugcauuggcuaucacgcgaauaacagcacggauaccguugacacaguguuggagaaaaauguaacugugacccauuccgucaacuuacuggaagauaagcacaaugggaaacuauguaagcucagaggaguggcuccccugcaucuugguaaaugcaacauagccggcuggauccuggggaauccugagugugaaucuuugucaacagcaaguagcugguccuacauuguugagaccucuucgucagacaacggaacuugcuauccaggcgauuuuaucgacuacgaagaacucagggagcagcugagcaguguguccucuuucgaacgguuugagauuuucccgaagacaagcuccuggcccaaucacgauucaaacaagggugucaccgccgcuuguccucaugcaggggccaaaggauuuuauaagaaucugaucuggcucgugaaaaagggcaacaguuacccaaaauuaagcaagucuuauauaaaugacaagggcaaagaaguacugguucuuugggggauccaccaccccuccacgacugcugaucaacagucauuguaccagaacgccgacaccuacguguucgucggaacaagccgcuauaguaagaaauuuaagccugagauugcgauccgaccaaaagugcgugaucaggaggguagaaugaauuacuauuggacucugguggaacccggcgacaagauuaccuucgaggcaacagggaaccuagucguuccuagguacgccuuugcuauggaacggaacgccggaucuggcaucauaauuuccgauaccccagugcaugacugcaauacgacuugucaaacaccgaaaggugcaaucaacaccagccuccccuuccagaauauucacccuaucacuaucgggaagugcccaaaguauguaaaaucgacaaagcugcgccuugcuaccggacugagaaacgugcccucuauucaguccaggggcuuguuuggcgccauagcgggguucaucgagggagguuggacgggcauggucgacgggugguacggauaucaucaccagaaugaacaaggcucagguuacgccgcagaucucaaaaguacccagaacgcuauugacaagaucacaaauaaagugaacagcguuauagagaagaugaauacucaguuuaccgccguggggaaggaguucaaccaccuggaaaaacggauugagaauuuaaacaagaaagucgaugacggcuuccuggauaucuggacauacaaugcugaacuccuugugcuguuggagaacgaacgcacucuagacuaucaugauuccaauguaaagaaccuguacgagaaaguucgaaaccagcucaagaauaacgccaaggagaucggaaauggcuguuuugaguucuaucacaaaugcgacaacaccuguauggagucugugaagaaugggacauacgauuauccuaaauacagcgaagaggcaaagcugaacagagaagagauugacggagucaaacuugagucaaccaggaucuaucaaauucuggccauauacaguacuguggcuuccagcuugguccucgugguuucucugggugcgaucucauuuuggaugugcaguaauggcagcuuacagugccggauuuguaucuga

SEQ ID NO: 134503 - RNA, 1701 nt, Artificial Sequence
  derived and/or modified CDS sequence (opt3) from hemagglutinin__InfluenzaA__ADX21078
augaagaccaucauugcccugagcuacauacucugccuuguguucgcucagaaacugcccggcaacgacaauuccacagcaacuuuguguuuagggcaccaugccgucccuaacggaacgguugugaagaccaucacaaaugaucaaauugagguaacuaacgcgaccgaacuggugcagucuucaaguacaggugagaucugcgacagcccacaccagauucuagauggcaaaaauuguacccucaucgacgcucugcuuggggauccgcagugcgacggauuucaaaacaagaaaugggaucuguucgucgaaagauccaaggccuauucuaauuguuaccccuaugacgugccugauuacgcaucguugaggucacucguugccagcaguggcacucuggaguuuaacaaugaauccuucaacuggacaggugugacccagaaugggacgucuagcgcuugcauacggcgcuccaagaacucauuuuucagucgacugaauuggcucacucauuuaaacuuuaaauauaccgcacugaaugucacaaugccaaacaacgagcaguucgacaagcuguacaucuggggagugcaccaucccggcacugauaaagaccagauuuuucuuuaugcccaagcuagcggccguaucaccguaucuacaaagagaucccagcagaccguuauuccuaauaucgggucaaggccacgggugcgcaacauacccagcagaauuaguaucuacuggacgauugucaaaccuggagauauccugcuaaucaauucuacugguaaccucauugccccaaggggcuacuucaagauacgguccgggaaaagcucgaucaugcgcucugacgcgccgauuggaaaauguaauuccgagugcaucacacccaacggcucaauaccuaaugacaagccauuucagaacgugaaucgaauuaccuauggugcaugucccagauacgugaaacaaaacacucugaaguuggccacagggaugaggaaugucccugaaaaacagacccggggaaucuucggcgcuaucgccggcuuuauugagaacgggugggaaggaaugguugaugguugguauggcuuccgucaccagaauagugaggggcgcggacaagcagcugaccuuaagagcacgcaggccgcgaucgaucagauuaacggcaaauugaauagacucauaaggaagaccaacgagaaguuccaccagaucgaaaaagaguuuuccgaaguggagggucggauucaagaccuggaaaaguacguagaggauacaaaaaucgacuuauggucuuauaacgccgagcugcucguggcacuugaaaaucagcauacuaucgaucugaccgacagcgagaugaacaaguuguucgaaaagacaaagaagcagcuacgagagaaugcugaagauauggggaacggcugcuuuaaaauuuaccacaagugugacaaugccugcauaggaucaauccgcaacggcacuuaugaucaugacgucuacagagacgaggcucugaauaacagguuccagauuaaagggguggagcucaagaguggauacaaagauuggauccuguggauuuccuuugccaucagcugcuuccuucuguguguugcauugcucgguuuuauaaugugggccugccaaaagggcaauauccgguguaacauuugcaucuga

SEQ ID NO: 134504 - RNA, 1701 nt, Artificial Sequence; identical to SEQ ID NO: 134503
  derived and/or modified CDS sequence (opt3) from hemagglutinin__InfluenzaA__ADX21088

SEQ ID NO: 134505 - RNA, 1701 nt, Artificial Sequence
  derived and/or modified CDS sequence (opt3) from hemagglutinin__InfluenzaA__ADX21098
augaaggccauccuggugguccuccuuuacaccuucgcuacagcaaacgccgacacucugugcauuggcuaucacgcgaauaacagcacggauaccguugacacaguguuggagaaaaauguaacugugacccauuccgucaacuuacuggaagauaagcacaaugggaaacuauguaagcucagaggaguggcuccccugcaucuugguaaaugcaacauagccggcuggauccuggggaauccugagugugaaucuuugucaacagcaaguagcugguccuacauuguugagaccucuucgucagacaacggaacuugcuauccaggcgauuuuaucgacuacgaggagcucagggagcagcugagcaguguguccucuuucgaacgguuugagauuuucccgaagacaagcuccuggcccaaucacgauucaaacaagggugucaccgccgcuuguccucaugcaggggccaaaaguuuuuauaagaaucugaucuggcucgugaaaaagggaaacagcuacccaaaauuaucuaaguccuauauaaaugacaagggcaaagaaguacugguucuuuggggcauccaccaccccucaacgagcgcugaucaacagaguuuguaccagaacgccgacgcguacguguucgucgggacuucucgcuauuccaagaaauuuaagccugagauugcaauccgaccaaaagugcgugaucaggagggaagaaugaauuacuauuggacccugguggaacccggugacaagauuacauucgaggccacuggcaaccuagucguuccuagguacgcuuuugccauggaacggaacgcagggagcggaaucauaauuucggauaccccagugcaugacugcucuacaaccugucaaacgccgaaaggcgcuaucaauacuucccuccccuuccagaacauucacccuaucacaaucgguaagugcccaaaguauguaaaaucaaccaagcugcgccuugccacugggcugagaaaugugcccaguauucagagcaggggauuguuuggcgcgauagccggcuucaucgaagggggauggacagguauggucgacggcugguacggguaucaucaccagaacgaacaaggauccggcuacgcagcugaucucaaaucuacccagaaugccauugacgagaucacgaacaaggugaauagcguuauagagaaaaugaacacccaguuuacagcuguggguaaggaguucaaucaccuggaaaagcggauugaaaacuuaaauaaaaaggucgaugacggguuccuggauaucuggacuuacaacgccgagcuccuugugcuguuggaaaaugagcgcacccuagacuaucaugauucaaacguaaagaaucuguacgagaagguucgaagucagcucaaaaacaacgcaaaggaaaucggcaauggauguuuugaguucuaucacaagugcgacaacacauguauggaauccgugaaaaauggcacuuacgauuauccuaaguacagcgaggaagccaaacugaacagagaggagauugacggggucaaacuugaaucuaccaggauccaucaaauucuggcuauauauucaacaguggcgaguagcuugguccucgugguuucccugggagcaaucucuuuuuggaugugcucgaaugguagcuuacagugccggauuuguaucuga

SEQ ID NO: 134506 - RNA, 1701 nt, Artificial Sequence; identical to SEQ ID NO: 131636
  derived and/or modified CDS sequence (opt3) from hemagglutinin__InfluenzaA__ADX36109

SEQ ID NO: 134507 - RNA, 1701 nt, Artificial Sequence
  derived and/or modified CDS sequence (opt3) from hemagglutinin__InfluenzaA__ADX96278
augaaggccauccuggugguccuccuuuacaccuucgcuacagcaaacgccgacacucugugcauuggcuaucacgcgaauaacagcacggauaccguugacacaguguuggagaaaaauguaacugugacccauuccgucaacauauuagaagauaagcacaaugggaaacuguguaagcuaagaggaguggcuccccuccaucuggguaaaugcaacaucgccggcuggauucuugggaauccugagugugaaucucugucaacagcaaguagcugguccuacaucguugagaccucuucgucagacaacggaacuugcuauccaggcgauuuuauugacuacgaagaguugagggagcagcucagcaguguguccucuuucgaacgguuugagaucuucccgaagacaagcuccuggcccaaucacgauucaaacaagggugucaccgccgcuuguccucaugcaggggccaaaggauuuuauaagaaucugauauggcuggugaaaaagggcaacaguuacccaaaacucagcaagucuuauaucaaugacaagggcaaagaaguauuaguucugugggggauucaccaccccuccacgucagcugaucaacagagccuuuaccagaacgccgacgcguacguguucgucggaaguucucgcuauuccaagaaauuuaagccugagaucgcaauucgaccaaaagugcgugaucaggaggguagaaugaauuacuauuggacuuugguggaacccggcgacaagaucaccuucgaggccacagggaaccuggucguuccuagguacgcuuuugccauggaacggaacgcaggaagcggcauaauuaucucggauacuccagugcaugacugcaauaccacaugucaaaccccgaaaggugcuguaaacacgucucuacccuuccagaauauucacccuaucacuaucgggaagugcccaaaguaugugaaauccacaaagcuccgccuggccaccggacuuagaaacguccccucaauucagaguaggggccuguuuggcgcgauagccggguucaucgagggagguuggacuggcaugguggacgggugguacggauaucaucaccagaaugaacaaggcagcgguuacgcagcugauuugaaauccacacagaacgccauugacgagaucaccaauaagguuaacucugugauagagaaaaugaauacgcaguuuaccgcugucgggaaggaguucaaccaccucgaaaagcggauugaaaaucugaacaaaaagguggaugacggcuucuuagauaucuggacauacaaugccgagcugcucguacuucuggaaaacgagcgcacuuuggacuaucaugauagcaauguuaaaaaccuauacgagaaggugcgaucacagcugaaaaacaaugcaaaggaagucggaaacggcuguuuugaguucuaucacaagugcgacaauaccuguauggaaagugugaaaaacgggacauacgauuauccuaaguacuccgaggaagccaaacucaauagagaggagaucgacggagucaagcuggaaagcacuaggauuuaucaaauccuugcuauuuacucuaccgcggcaucaagucugguguugguugugagccucggugccauauccuuuuggaugugcucuaacggcucgcugcagugccggaucuguauuuga

SEQ ID NO: 134508 - RNA, 1701 nt, Artificial Sequence
  derived and/or modified CDS sequence (opt3) from hemagglutinin__InfluenzaA__ADX96288
augaaggccauccuggugguccuccuuuacaccuucgcuacagcaaacgccgacacucugugcauuggcuaucacgcgaauaacagcacggauaccguugacacaguguuggagaaaaauguaacugugacccauuccgucaacauauuagaagauaagcacaaugggaaacuguguaagcuaagaggaguggcuccccuccaucuggguaaaugcaacaucgccggcuggauucuugggaauccugagugugaaucucugucaacagcaaguagcugguccuacaucguugagaccucuucgucagacaacggaacuugcuauccaggcgauuuuauugacuacgaagaguugagggagcagcucagcaguguguccucuuucgaacgguuugagaucuucccgaagacaagcuccuggcccaaucacgauucaaacaagggugucaccgccgcuuguccucaugcaggggccaaaaguuuuuauaagaaucugauauggcuggugaaacaaggaaacagcuacccaaagcucucuaaauccuauaucaaugacaagggcaaggaaguauuaguucuguggggcauucaccaccccucaacgagcgcugaucagcagagucuuuaccagaacgccgacgcguacguguucgucgggucuucccgcuauagcaaaaaguuuaaaccugagaucgcaauucgaccaaaggugcgugaucaagagggaagaaugaauuacuauuggacuuugguggaacccggugacaaaaucaccuucgaggccacaggcaaccuggucguuccuagguacgcuuuugccauggaacggaacgcagggucgggaauaauuaucucugauacuccagugcaugacugcaauaccacaugucagaccccgaagggcgcuauuaacacgucccuacccuuccagaauauccacccuaucacuauugguaaaugcccaaaguauguaaagucaacaaaacuccgccuggccaccgggcuuagaaacgugcccaguauacagagcaggggacuguuuggcgcgaucgccggcuucauugaagggggauggacugguauggucgacggcugguacggguaucaucaccaaaaugaacagggauccggcuacgcagcugauuugaagucuacacagaacgccaucgacgagauaaccaauaaagugaacagcguuauugagaagaugaauacgcaguuuaccgcuguggguaaagaguucaaccaccucgagaagcggaucgaaaaucugaacaagaaagucgaugacggguucuuagauaucuggacauacaaugccgagcugcucgugcuucuggaaaacgagcgcacuuuggacuaucaugauucaaauguaaagaaccuauacgagaaaguucgaagucaacugaagaacaaugcaaaagaagugggcaacggauguuuugaguucuaucacaagugcgacaauaccuguauggaauccgucaagaacggcacauacgauuauccuaaauacagcgaggaagccaagcucaauagagaggagauugacggggugaaacuggaaucuacuaggaucuaucagauucuugcuauauacucaaccgcggcaaguagccuggucuuggugguuucccucggagccaucucuuuuuggaugugcucgaacgguagccugcagugccggauuuguaucuga

SEQ ID NO: 134509 - RNA, 1701 nt, Artificial Sequence
  derived and/or modified CDS sequence (opt3) from hemagglutinin__InfluenzaA__ADX96298
augaaggccauccuggugguccuccuuuacaccuucgcuacagcaaacgccgacacucugugcauuggcuaucacgcgaauaacagcacggauaccguugacacaguguuggagaaaaauguaacugugacccauuccgucaacauauuagaagauaagcacaaugggaaacuguguaagcuaagaggaguggcuccccuccaucuggguaaaugcaacaucgccggcuggauucuugggaauccugagugugaaucucugucaacagcaaguagcugguccuacaucguugagaccucuucgucagacaacggaacuugcuauccaggcgauuuuauugacuacgaagaguugagggagcagcucagcaguguguccucuuucgaacgguuugagaucuucccgaagacaagcuccuggcccaaucacgauucaaacaagggugucaccgccgcuuguccucaugcaggggccaaaaguuuuuauaagaaucugauauggcuggugaaaaagggaaacagcuacccaaaacucucuaaguccuauaucaaugacaagggcaaagaaguauuaguucuguggggcauucaccaccccucaacgagcgcugaucaacagagucuuuaccagaacgccgacgcguacguguucgucgggacuucucgcuauuccaagaaauuuaagccugagaucgugauucgaccaaaagugcgugaucaggagggaagaaugaauuacuauuggaccuuggucgaacccggugacaagaucacauucgaggcaacuggcaaccugguugugccuagguacgccuuugcuauggaacggaacgccgggagcggaauaauuaucucggauaccccaguacaugacugcaauacaaccugucaaacgccgaaaggcgcaauuaacacuucucuacccuuccagaauauccacccuaucacaauugguaagugcccaaaguaugugaaauccaccaagcuccgccuggcuacugggcuuagaaacguccccucaauacagaguaggggacuguuuggcgccaucgcgggcuucauugaagggggauggacagguaugguggacggcugguacggguaucaucaccagaaugaacaaggaagcggcuacgccgcagauuugaaauccacccagaacgcuaucgacgagauaacgaauaagguuaacucugugauugagaaaaugaauacccaguuuacagccgucgguaaggaguucaaccaccucgagaagcggaucgaaaaucugaacaaaaagguggaugacggguucuuagauaucuggacuuacaaugcugagcugcucguacuucuggaaaacgagcgcaccuuggacuaucaugauagcaauguuaaaaaccuauacgagaaggugcgaucacagcugaaaaacaaugccaaggaaauuggcaacggauguuuugaguucuaucacaagugcgacaauacauguauggaaagugucaaaaacggcacuuacgauuauccuaaguacuccgaggaagcaaaacucaauagagaggagaucgacggggugaagcuggaaagcaccaggauuuaucaaauacuugccaucuacucuacagucgcuucaagucugguguugguugugagccucggagcgauuuccuuuuggaugugcucuaccgguucgcugcagugccggaucuguaucuga

SEQ ID NO: 134510 - RNA, 1701 nt, Artificial Sequence; identical to SEQ ID NO: 132314
  derived and/or modified CDS sequence (opt3) from hemagglutinin__InfluenzaA__ADX96308

SEQ ID NO: 134511 - RNA, 1701 nt, Artificial Sequence
  derived and/or modified CDS sequence (opt3) from hemagglutinin__InfluenzaA__ADX96318
augaaggccauccuggugguccuccuuuacaccuucgcuacagcaaacgccgacacucugugcauuggcuaucacgcgaauaacagcacggauaccguugacacaguguuggagaaaaauguaacugugacccauuccgucaacuuacuggaagauaagcacaaugggaaacuauguaagcucagaggaguggcuccccugcaucuugguaaaugcaacauagccggcuggauccuggggaauccugagugugaaucuuugucaacagcaaguagcugguccuacauuguugagaccucuucgucagacaacggaacuugcuauccaggcgauuuuaucgacuacgaggagcucagggagcagcugagcaguguguccucuuucgaacgguuugagauuuucccgaagacaagcuccuggcccaaucacgauucaaacaagggugucaccgccgcuuguccucaugcaggggccaaaaguuuuuauaagaaucugaucuggcucgugaaaaagggaaacagcuacccaaaauuaucuaaguccuauauaaaugacaagggcaaagaaguacugguucuuuggggcauccaccaccccucaacgagcgcugaucaacagaguuuguaccagaacgccgacucuuacguguucgucgggacuucccgcuauagcaagaaauuuaagccugagauugcgauccgaccaaaagugcgugaucaggagggaagaaugaauuacuauuggacccugguggaacccggugacaagauuacauucgaggcaacuggcaaccuagucguuccuagguacgccuuugcuauggaacggaacgccgggucgggaaucauaauuucugauaccccagugcaugacugcaauacaaccugucaaacgccgaaaggcgcaaucaacacuucccuccccuuccagaauauucacccuaucacaaucgguaagugcccaaaguauguaaaaucaaccaagcugcgccuugcuacugggcugagaaacgugcccaguauucagagcaggggauuguuuggcgccauagcgggcuucaucgaagggggauggacagguauggucgacggcugguacggguaucaucaccagaaugaacaaggauccggcuacgccgcagaucucaaaucuacccagaacgcuauugacaagaucacgaauaaagugaacagcguuauagagaagaugaauacccaguuuacagccguggguaaggaguucaaccaccuggaaaaacggauugagaauuuaaacaagaaagucgaugacggguuccuggauaucuggacuuacaaugcugaacuccuugugcuguuggagaacgaacgcacccuagacuaucaugauucaaauguaaagaaccuguacgagaaaguucgaagucagcucaagaacaaugccaaggagaucggcaacggauguuuugaguucuaucacaaaugcgacaauacauguauggaauccgugaagaacggcacuuacgauuauccuaaauacagcgaagaggcaaagcugaauagagaagagauugacggggucaaacuugagucuaccaggaucuaucaaauucuggccauauacucaacaguggcuaguagcuugguccucgugguuucccugggagcgaucucuuuuuggaugugcucgaacgguagcuuacagugccggauuuguaucuga

SEQ ID NO: 134512 - RNA, 1701 nt, Artificial Sequence
  derived and/or modified CDS sequence (opt3) from hemagglutinin__InfluenzaA__ADX96328
augaaggccauccuggugguccuccuuuacaccuucgcuacagcaaacgccgacacucugugcauuggcuaucacgcgaauaacagcacggauaccguugacacaguguuggagaaaaauguaacugugacccauuccgucaacuuacuggaagauaagcacaaugggaaacuauguaagcucagaggaguggcuccccugcaucuugguaaaugcaacauagccggcuggauccuggggaauccugagugugaaucuuugucaacagcaaguagcugguccuacauuguugagaccucuucgucagacaacggaacuugcuauccaggcgauuuuaucgacuacgaggagcucagggagcagcugagcaguguguccucuuucgaacgguuugagauuuucccgaagacaagcuccuggcccaaucacgauucaaacaagggugucaccgccgcuuguccucaugcaggggccaaaaguuuuuauaagaaucugaucuggcucgugaaaaagggaaacagcuacccaaaauuaucuaaguccuauauaaaugacaagggcaaagaaguacugguucuuuggggcauccaccaccccucaacgagcgcugaucaacagaguuuguaccagaacgccgacgcguacguguucgucgggacuucucgcuauuccaagaaauuuaagccugagauugcaauccgaccaaaagugcgugaucaggagggaagaaugaauuacuauuggacccugguggaacccggugacaagauuacauucgaggccacuggcaaccuagucgcuccuagguacgccuuugcaauggaacggaacgcugggagcggaaucauaauuucggauaccccaguucaugacugcaauacaaccugucaaacgccgaaaggcgccaucaacacuucucuccccuuccagaauauucacccuaucacaaucgguaagugcccaaaguaugugaaauccaccaagcugcgccuugcgacugggcugagaaacguacccucaauucagaguaggggauuguuuggcgccauagcaggcuucaucgaagggggauggacagguaugguggacggcugguacggguaucaucaccagaaugaacaaggaagcggcuacgcugccgaucucaaauccacccagaacgcuauugacaagaucacgaauaaagucaacucugugauagagaagaugaauacccaguuuacagccguugguaaggaguucaaccaccuggaaaaacggauugagaauuuaaacaagaaaguggaugacggguuccuggauaucuggacuuacaaugcagaacuccuuguccuguuggagaacgaacgcacccuagacuaucaugauagcaaugugaagaaccuguacgagaaaguacgaucacagcucaagaacaaugccaaggagaucggcaacggauguuuugaguucuaucacaaaugcgacaauacauguauggaaaguguuaagaacggcacuuacgauuauccuaaauacuccgaagaggcuaagcugaauagagaagagauugacggggugaaacuugagagcaccaggaucuaucaaauucuggcgauauacucuacagucgcaucaaguuuggugcucgucgugagccugggagccaucuccuuuuggaugugcucuaacgguucguuacagugccggauuuguaucuga

SEQ ID NO: 134513 - RNA, 1701 nt, Artificial Sequence
  derived and/or modified CDS sequence (opt3) from hemagglutinin__InfluenzaA__ADX96347
augaaggccauccuggugguccuccuuuacaccuucgcuacagcaaacgccgacacucugugcauuggcuaucacgcgaauaacagcacggauaccguugacacaguguuggagaaaaauguaacugugacccauuccgucaacuuacuggaagauaagcacaaugggaaacuauguaagcucagaggaguggcuccccugcaucuugguaaaugcaacauagccggcuggauccuggggaauccugagugugaaucuuugucaacagcaaguagcugguccuacauuguugagaccucuucgucagacaacggaacuugcuauccaggcgauuuuaucgacuacgaggagcucagggagcagcugagcaguguguccucuuucgaacgguuugagauuuucccgaagacaagcuccuggcccaaucacgauucaaacaagggugucaccgccgcuuguccucaugcaggggccaaaaguuuuuauaagaaucugaucuggcucgugaaaaagggaaacagcuacccaaaauuaucuaaguccuauauaaaugacaagggcaaagaaguacugguucuuuggggcauccaccaccccucaacgagcgcugaucaacagaguuuguaccagaacgccgacgcguacguguucgucgggacuucucgcuauuccaagaaauuuaagccugagauugcaauccgaccaaaagugcgugaucaggagggaagaaugaauuacuauuggacccugguggaacccggugacaagauuacauucgaggccacuggcaaccuagucguuccuagguacgcuuuugccauggaacggaacgcagggagcggaaucauaauuucggauaccccagugcauaauugcaacacaaccugucaaacgccgaaaggcgcuaucaauacuucucuccccuuccagaacauucacccuaucacaaucgguaagugcccaaaguauguaaaauccaccaagcugcgccuugccacugggcugagaaaugugcccucaauucagaguaggggauuguuuggcgcgauagccggcuucaucgaagggggauggacagguauggucgacggcugguacggguaucaucaccagaacgaacaaggaagcggcuacgcagcugaccucaaauccacccagaaugccauugauaagaucacgaacaaaguuaauucugugauagagaagaugaacacccaguuuacagcuguggguaaggaguucaaucaccuggaaaaacggauugagaacuuaaauaagaaagucgacgauggguuccuggacaucuggacuuacaacgccgaacuccuugugcuguuggagaaugaacgcacccuagauuaucaugacagcaacguaaagaaccuguacgagaaaguucgaucacagcucaagaauaacgcaaaggagaucggcaauggauguuuugaguucuaucacaaaugcgauaacacauguauggaaagugugaagaauggcacuuacgacuauccuaaauacuccgaagaggccaagcugaacagagaagagauugauggggucaaacuugagagcaccaggaucuaucaaauucuggcuauauacucuacaguggcgucaaguuugguccucgugguuagccugggagcaaucuccuuuuggaugugcucuaaugguucguuacagugccggauuuguaucuga

SEQ ID NO: 134514 - RNA, 1701 nt, Artificial Sequence
  derived and/or modified CDS sequence (opt3) from hemagglutinin__InfluenzaA__ADX96357
augaaggccauccuggugguccuccuuuacaccuucgcuacagcaaacgccgacacucugugcauuggcuaucacgcgaauaacagcacggauaccguugacacaguguuggagaaaaauguaacugugacccauuccgucaacauauuagaagauaagcacaaugggaaacuguguaagcuaagaggaguggcuccccuccaucuggguaaaugcaacaucgccggcuggauucuugggaauccugagugugaaucucugucaacagcaaguagcugguccuacaucguugagaccucuucgucagacaacggaacuugcuauccaggcgauuuuauugacuacgaagaguugagggagcagcucagcaguguguccucuuucgaacgguuugagaucuucccgaagacaagcuccuggcccaaucacgauucaaacaagggugucaccgccgcuuguccucaugcaggggccaaaaguuuuuauaagaaucugauauggcuggugaaaaagggaaacagcuacccaaaacucucuaaguccuauaucaaugacaagggcaaagaaguauuaguucuguggggcauucaccaccccucaacgagcgcugaucaacagagucuuuaccagaacgccgacgcguacguguucgucgggacuucucgcuauuccaagaaauuuaagccugagaucgugauucgaccaaaagugcgugaucaggagggaagaaugaauuacuauuggaccuuggucgaacccggugacaagaucacauucgaggcaacuggcaaccugguugugccuagguacgccuuugcuauggaacggaacgccgggagcggaauaauuaucucggauaccccaguacaugacugcaauacaaccugucaaacgccgaaaggcgcaauuaacacuucucuacccuuccagaauauccacccuaucacaauugguaagugcccaaaguaugugaaauccaccaagcuccgccuggcuacugggcuuagaaacguccccucaauacagaguaggggacuguuuggcgccaucgcgggcuucauugaagggggauggacagguaugguggacggcugguacggguaucaucaccagaaugaacaaggaagcggcuacgccgcagauuugaaauccacccagaacgcuaucgacgagauaacgaauaagguuaacucugugauugagaaaaugaauacccaguuuacagccgucgguaaggaguucaaccaccucgagaagcggaucgaaaaucugaacaaaaagguggaugacggguucuuagauaucuggacuuacaaugcugagcugcucguacuucuggaaaacgagcgcaccuuggacuaucaugauagcaauguuaaaaaccuauacgagaaggugcgaucacagcugaaaaacaaugccaaggaaauuggcaacggauguuuugaguucuaucacaagugcgacaauacauguauggaaagugucaaaaacggcacuuacgauuauccuaaguacuccgaggaagcaaaacucaauagagaggagaucgacggggugaagcuggaaagcaccaggauuuaucaaauacuugccaucuacucuacagucgcuucaagucugguguugguugugagccucggagcgauuuccuuuuggaugugcucuaacgguucgcugcagugccggaucuguaucuga

SEQ ID NO: 134515 - RNA, 1701 nt, Artificial Sequence; identical to SEQ ID NO: 133654
  derived and/or modified CDS sequence (opt3) from hemagglutinin__InfluenzaA__ADX96367

SEQ ID NO: 134516 - RNA, 1701 nt, Artificial Sequence
  derived and/or modified CDS sequence (opt3) from hemagglutinin__InfluenzaA__ADX96378
augaaggccauccuggugguccuccuuuacaccuucgcuacagcaaacgccgacacucugugcauuggcuaucacgcgaauaacagcacggauaccguugacacaguguuggagaagaauguaacugugacccauuccgucaacuuacuggaagauaagcacaaugggaaacuauguaagcucagaggaguggcuccccugcaucuugguaaaugcaacauagccggcuggauccuggggaauccugagugugaaucuuugucaacagcaaguagcugguccuacauuguugagaccucuucgucagacaacggaacuugcuauccaggcgauuuuaucgacuacgaggagcucagggagcagcugagcaguguguccucuuucgaacgguuugagauuuucccgaagacaagcuccuggcccaaucacgauucaaacaagggugucaccgccgcuuguccucaugcaggggccaaaaguuuuuauaagaaucugaucuggcucgugaaaaagggaaacagcuacccaaaauuaucuaaguccuauauaaaugacaagggcaaagaaguacugguucuuuggggcauccaccaccccucaacgagcgcugaucaacagaguuuguaccagaacgccgacgcguacguguucgucgggacuucucgcuauuccaagaaauuuaagccugagauugcaauccgaccaaaagugcgugaucaggagggaagaaugaauuacuauuggacccugguggaacccggugacaagauuacauucgaggccacuggcaaccuagucguuccuagguacgcuuuugccauggaacggaacgcagggagcggaaucauaauuucggauaccccaauccaugacugcaauacaaccugucaaacgccgaaaggcgcuauuaacacuucucuccccuuccagaauauccacccuaucacaauugguaagugcccaaaguaugugaaauccaccaagcugcgccuugccacugggcugagaaacguacccucaauacagaguaggggauuguuuggcgcgaucgccggcuucauugaagggggauggacagguaugguggacggcugguacggguaucaucaccagaaugaacaaggaagcggcuacgcagcugaucucaaauccacccagaacgccaucgacgagauaacgaauaaggucaacucugugauugagaaaaugaauacccaguuuacagcuguugguaaggaguucaaccaccuggaaaagcggaucgaaaauuuaaacaaaaagguggaugacggguuccuggauaucuggacuuacaaugccgagcuccuuguccuguuggaaaacgagcgcacccuagacuaucaugauagcaaugugaaaaaccuguacgagaagguacgaucacagcucaaaaacaaugcaaaggaaauuggcaacggauguuuugaguucuaucacaagugcgacaauacauguauggaaaguguuaaaaacggcacuuacgauuauccuaaguacuccgaggaagccaaacugaauagagaggagaucgacggggugaaacuugaaagcaccaggauuuaucaaauacuggcuaucuacucuacagucgcgucaaguuuggugcucgucgugagccugggagcaauuuccuuuuggaugugcucuaacgguucguuacagugccggaucuguaucuga

SEQ ID NO: 134517 - RNA, 1701 nt, Artificial Sequence; identical to SEQ ID NO: 134516
  derived and/or modified CDS sequence (opt3) from hemagglutinin__InfluenzaA__ADX96398

SEQ ID NO: 134518 - RNA, 1701 nt, Artificial Sequence
  derived and/or modified CDS sequence (opt3) from hemagglutinin__InfluenzaA__ADX96408
augaaggccauccuggugguccuccuuuacaccuucgcuacagcaaacgccgacacucugugcauuggcuaucacgcgaauaacagcacggauaccguugacacaguguuggagaaaaauguaacugugacccauuccgucaacauauuagaagauaagcacaaugggaaacuguguaagcuaagaggaguggcuccccuccaucuggguaaaugcaacaucgccggcuggauucuugggaauccugagugugaaucucugucaacagcaaguagcugguccuacaucguugagaccucuucgucagacaacggaacuugcuauccaggcgauuuuauugacuacgaagaguugagggagcagcucagcaguguguccucuuucgaacgguuugagaucuucccgaagacaagcuccuggcccaaucacgauucaaacaagggugucaccgccgcuuguccucaugcaggggccaaaaguuuuuauaagaaucugauauggcuggugaaaaagggaaacagcuacccaaaacucucuaaguccuauaucaaugacaagggcaaagaaguauuaguucuguggggcauucaccaccccucaacgagcgcugaucaacagagucuuuaccagaacgccgacgcguacguguucgucgggacuucucgcuauuccaagaaauuuaagccugagaucgcaauucgaccaaaagugcgugaucaggagggaagaaugaauuacuauuggaccuugguggaacccggugacaagaucacauucgaggccacuggcaaccuggucguuccuagguacgcuuuugccauggaacggaacgcagggagcggaauaauuaucucggauaccccaauucaugacugcaauacaaccugucaaacgccgaaaggcgcuaucaacacuucucuacccuuccagaauauccacccuauuacaauagguaagugcccaaaguaugugaaauccaccaagcuccgccuggccacugggcuuagaaacguacccucaauccagaguaggggacuguuuggcgcgauugccggcuucaucgaagggggauggacagguaugguggacggcugguacggguaucaucaccagaaugaacaaggaagcggcuacgcagcugauuugaaauccacccagaacgccauagacgagauuacgaauaaggucaacucugugaucgagaaaaugaauacccaguuuacagcuguugguaaggaguucaaccaccucgagaagcggaucgaaaaucugaacaaaaagguggaugacggguucuuagauauuuggacuuacaaugccgagcugcucguccuucuggaaaacgagcgcaccuuggacuaucaugauagcaaugugaaaaaccuauacgagaagguacgaucacagcugaaaaacaaugcaaaggaaaucggcaacggauguuuugaguucuaucacaagugcgacaauacauguauggaaaguguuaaaaacggcacuuacgauuauccuaaguacuccgaggaagccaaacucaauagagaggagauugacggggugaagcuggaaagcaccaggauauaucaaauccuugcuauuuacucuacagucgcgucaagucugguguuggucgugagccucggagcaaucuccuuuuggaugugcucuaacgguucgcugcagugccggaucuguauuuga

SEQ ID NO: 134519 - RNA, 1701 nt, Artificial Sequence; identical to SEQ ID NO: 131030
  derived and/or modified CDS sequence (opt3) from hemagglutinin__InfluenzaA__ADX96427

SEQ ID NO: 134520 - RNA, 1701 nt, Artificial Sequence
  derived and/or modified CDS sequence (opt3) from hemagglutinin__InfluenzaA__ADX96437
augaaggccauccuggugguccuccuuuacaccuucgcuacagcaaacgccgacacucugugcauuggcuaucacgcgaauaacagcacggauaccguugacacaguguuggagaaaaauguaacugugacccauuccgucaacauauuagaagauaagcacaaugggaaacuguguaagcuaagaggaguggcuccccuccaucuggguaaaugcaacaucgccggcuggauucuugggaauccugagugugaaucucugucaacagcaaguagcugguccuacaucguugagaccucuucgucagacaacggaacuugcuauccaggcgauuuuauugacuacgaagaguugagggagcagcucagcaguguguccucuuucgaacgguuugagaucuucccgaagacaagcuccuggcccaaucacgauucaaacaagggugucaccgccgcuuguccucaugcaggggccaaaaguuuuuauaagaaucugauauggcuggugaaaaagggaaacagcuacccaaaacucucuaaguccuauaucaaugacaagggcaaagaaguauuaguucuguggggcauucaccaccccucaacgagcgcugaucaacagagucuuuaccagaacgccgacgcguacguguucgucgggucuucccgcuauagcaagaaauuuaagccugagaucgcaauucgaccaaaagugcgugaucaggagggaagaaugaauuacuauuggacuuugguggaacccggugacaagaucaccuucgaggccacaggcaaccuggucguuccuagguacgcuuuugccauggaacggaacgcagggucgggaauaauuaucucugauacuccagugcaugacugcaauaccacaugucaaaccccgaaaggcgcuauuaacacgucccuacccuuccagaauauccacccuaucacuauugguaagugcccaaaguauguaaaaucaacaaagcuccgccuggccaccgggcuuagaaacgugcccaguauacagagcaggggacuguuuggcgcgaucgccggcuucauugaagggggauggacugguauggucgacggcugguacggguaucaucaccagaaugaacaaggauccggcuacgcagcugauuugaaaucuacacagaacgccaucgacgagauaaccaauaaggugaacagcguuauugagaaaaugaauacgcaguuuaccgcuguggguaaggaguucaaccaccucgagaagcggcuggaaaauuuaaacaaaaaggucgaugacggguuccuggauaucuggacauacaaugccgagcuccuugugcuguuggaaaacgagcgcacucuagacuaucaugauucaaauguaaagaaccuguacgagaagguucgaagucagcucaaaaacaaugcaaaggaagugggcaacggauguuuugaguucuaucacaagugcgacaauaccuguauggaauccgucaaaaacggcacauacgauuauccuaaguacagcgaggaagccaaacugaauagagaggagaucgacggggugaaacuugaaucuacuaggauuuaucaaauccuggcuauuuacucaaccgcggcaaguagcuugguccucgugguuucccugggagccauaucuuuuuggaugugcucgaacgguagcuuacagugccggaucuguauuuga

SEQ ID NO: 134521 - RNA, 1701 nt, Artificial Sequence; identical to SEQ ID NO: 130704
  derived and/or modified CDS sequence (opt3) from hemagglutinin__InfluenzaA__ADX96447

SEQ ID NO: 134522 - RNA, 1701 nt, Artificial Sequence; identical to SEQ ID NO: 130717
  derived and/or modified CDS sequence (opt3) from hemagglutinin__InfluenzaA__ADX96497

SEQ ID NO: 134523 - RNA, 1701 nt, Artificial Sequence
  derived and/or modified CDS sequence (opt3) from hemagglutinin__InfluenzaA__ADX96507
augaaggccauccuggugguccuccuuuacaccuucgcuacagcaaacgccgacacucugugcauuggcuaucacgcgaauaacagcacggauaccguugacacaguguuggagaaaaauguaacugugacccauuccgucaacuuacuggaagauaagcacaaugggaaacuauguaagcucagaggaguggcuccccugcaucuugguaaaugcaacauagccggcuggauccuggggaauccugagugugaaucuuugucaacagcaaguagcugguccuacauuguugagaccucuucgucagacaacggaacuugcuauccaggcgauuuuaucgacuacgaggagcucagggagcagcugagcaguguguccucuuucgaacgguuugagauuuucccgaagacaagcuccuggcccaaucacgauucaaacaagggugucaccgccgcuuguccucaugcaggggccaaaaguuuuuauaagaaucugaucuggcucgugaaaaagggaaacagcuacccaaaauuaucuaaguccuauauaaaugacaagggcaaagaaguacugguucuuuggggcauccaccaccccucaacgagcgcugaucaacagaguuuguaccagaacgccgacgcguacguguucgucgggacuucucgcuauuccaagaaauuuaagccugagauugcaauccgaccaaaagugcgugaucaggagggaagaaugaauuacuauuggacccugguggaacccggugacaagauuacauucgaggccacuggcaaccuagucguuccuagguacgcuuuugccauggaacggaacgcagggagcggaaucauaauuucggauaccccagugcaugacugcaauacaaccugucaaacgccgaaaggcgcuaucaacacuucucuccccuuccagaauauucacccuaucacaaucgguaagugcccaaaguauguaaaauccaccaagcugcgccuugccacugggcugagaaacgugcccucaauucagaguaggggauuguuuggcgcgauagccggcuucaucgaagggggauggacagguauggucgacggcugguacggguaucaucaccagaaugaacaaggaagcggcuacgcagcugaucucaaauccacccagaacgccauugacgagaucacgaauaaggugaacucuguuauagagaaaaugaauacccaguuuacagcuguggguaaggaguucaaccaccuggaaaagcggauugaaaauuuaaacaaaaaggucgaugacggguuccuggauaucuggacuuacaaugccgagcuccuugugcuguuggaaaacgagcgcacccuagacuaucaugauagcaauguaaagaaccuguacgagaagguucgaucacagcucaaaaacaaugcaaaggaaaucggcaacggauguuuugaguucuaucacaagugcgacaauacauguauggaaagugugaaaaacggcacuuacgauuauccuaaguacuccgaggaagccaaacugaauagagaggagauugacggggucaaacuugaaagcaccaggaucuaucaaauucuggcuauauacucuacaguggcgucaaguuugguccucgugguuagccugggagcaaucuccuuuuggaugugcucuaccgguucguuacagugccggauuuguaucuga

SEQ ID NO: 134524 - RNA, 1701 nt, Artificial Sequence; identical to SEQ ID NO: 134523
  derived and/or modified CDS sequence (opt3) from hemagglutinin__InfluenzaA__ADX96517

SEQ ID NO: 134525 - RNA, 1701 nt, Artificial Sequence
  derived and/or modified CDS sequence (opt3) from hemagglutinin__InfluenzaA__ADX96527
augaaggccauccuggugguccuccuuuacaccuucgcuacagcaaacgccgacacucugugcauuggcuaucacgcgaauaacagcacggauaccguugacacaguguuggagaaaaauguaacugugacccauuccgucaacuuacuggaagauaagcacaaugggaaacuauguaagcucagaggaguggcuccccugcaucuugguaaaugcaacauagccggcuggauccuggggaauccugagugugaaucuuugucaacagcaaguagcugguccuacauuguugagaccucuucgucagacaacggaacuugcuauccaggcgauuuuaucgacuacgaggagcucagggagcagcugagcaguguguccucuuucgaacgguuugagauuuucccgaagacaagcuccuggcccaaucacgauucaaacaagggugucaccgccgcuuguccucaugcaggggccaaaaguuuuuauaagaaucugaucuggcucgugaaaaagggaaacagcuacccaaaauuaucuaaguccuauauaaaugacaagggcaaagaaguacugguucuuuggggcauccaccaccccucaacgagcgcugaucaacagaguuuguaccagaacgccgacgcguacguguucgucgggacuucucgcuauuccaagaaauuuaagccugagauugcaauccgaccaaaagugcgugaucaggagggaagaaugaauuacuauuggacccugguggaacccggugacaagauuacauucgaggccacuggcaaccuagucguuccuagguacgcuuuugccauggaacggaacgcagggagcggaaucauaauuucggauaccccagugcaugacugcaauacaaccugucaaacgccgaaaggcgcuaucaacacuucucuccccuuccagaauauucacccuaucacaaucgguaagugcccaaaguauguaaaauccaccaagcugcgccuugccacugggcugagaaacgugcccucaauucagaguaggggauuguuuggcgcgauagccggcuucaucgaagggggauggacagguauggucgacggcugguacggguaucaucaccagaaugaacaaggaagcggcuacgcagcugaucucaaauccacccagaacgccauugacgagaucacgaauaaggugaacucuguuauagagaaaaugaauacccaguuuacagcuguggguaaggaguucaaccaccuggaaaagcggauugaaaauuuaaacaaaaaggucgaugacggguuccuggauaucuggacuuacaaugccgagcuccuugugcuguuggaaaacgagcgcacccuagacuaucaugauagcaauguaaagaaccuguacgagaagguucgaucacagcucaaaaacaaugcaaaggaaaucggcaacggauguuuugaguucuuucacaagugcgacaauacauguauggaaagugugaaaaacggcacuuaugauuacccuaaguauuccgaggaagccaaacugaauagagaggagauugacggggucaaacuugaaagcaccaggaucuaccaaauucuggcuauauauucuacaguggcgucaaguuugguccucgugguuagccugggagcaaucuccuucuggaugugcucuaacgguucguuacagugccggauuuguaucuga

SEQ ID NO: 134526 - RNA, 1701 nt, Artificial Sequence; identical to SEQ ID NO: 130717
  derived and/or modified CDS sequence (opt3) from hemagglutinin__InfluenzaA__ADX96537

SEQ ID NO: 134527 - RNA, 1701 nt, Artificial Sequence; identical to SEQ ID NO: 130717
  derived and/or modified CDS sequence (opt3) from hemagglutinin__InfluenzaA__ADX96547

SEQ ID NO: 134528 - RNA, 1701 nt, Artificial Sequence; identical to SEQ ID NO: 131818
  derived and/or modified CDS sequence (opt3) from hemagglutinin__InfluenzaA__ADX96557

SEQ ID NO: 134529 - RNA, 1701 nt, Artificial Sequence; identical to SEQ ID NO: 130717
  derived and/or modified CDS sequence (opt3) from hemagglutinin__InfluenzaA__ADX96587

SEQ ID NO: 134530 - RNA, 1701 nt, Artificial Sequence; identical to SEQ ID NO: 130704
  derived and/or modified CDS sequence (opt3) from hemagglutinin__InfluenzaA__ADX96597

SEQ ID NO: 134531 - RNA, 1701 nt, Artificial Sequence; identical to SEQ ID NO: 130704
  derived and/or modified CDS sequence (opt3) from hemagglutinin__InfluenzaA__ADX96607

SEQ ID NO: 134532 - RNA, 1701 nt, Artificial Sequence
  derived and/or modified CDS sequence (opt3) from hemagglutinin__InfluenzaA__ADX96627
augaaggccauccuggugguccuccuuuacaccuucgcuacagcaaacgccgacacucugugcauuggcuaucacgcgaauaacagcacggauaccguugacacaguguuggagaaaaauguaacugugacccauuccgucaacuuacuggaagauaagcacaaugggaaacuauguaagcucagaggaguggcuccccugcaucuugguaaaugcaacauagccggcuggauccuggggaauccugagugugaaucuuugucaacagcaaguagcugguccuacauuguugagaccucuucgucagacaacggaacuugcuauccaggcgauuuuaucgacuacgaagaacucagggagcagcugagcaguguguccucuuucgaacgguuugagauuuucccgaagacaagcuccuggcccaaucacgauucaaacaagggugucaccgccgcuuguccucaugcaggggccaaaaguuuuuauaagaaucugaucuggcucgugaaaaagggaaacagcuacccaaaauuaucuaaguccuauauaaaugacaagggcaaagaaguacugguucuuuggggcauccaccaccccucaacgagcgcugaucaacagaguuuguaccagaacgccgacgcguacguguucgucgggacuucucgcuauuccaagaaauuuaagccugagauugcaauccgaccaaaagugcgugaucaggagggaagaaugaauuacuauuggacccugguggaacccggugacaagauuacauucgaggccacuggcaaccuagucguuccuagguacgcuuuugccauggagaaaaacgcagggagcggaaucauaauuucggauaccccagugcaugacugcaauacaaccugucaaacgccgaagggcgcuaucaacacuucucuccccuuccagaauauucacccuaucacaaucgguaagugcccaaaauauguaaaguccaccaaacugcggcuugccacugggcugcgcaacgugcccucaauucagaguagaggauuguuuggcgcgauagccggcuucaucgaagggggauggacagguauggucgacggcugguacggguaucaucaccagaaugaacaaggaagcggcuacgcagcugaucucaaguccacccagaacgccauugacgagaucacgaauaaagugaacucuguuauagagaagaugaauacccaguuuacagcuguggguaaggaguucaaccaccuggagaaaaggauugaaaauuuaaacaagaaagucgaugacggguuccuggauaucuggacuuacaaugccgagcuccuugugcuguuggaaaacgagcggacccuagacuaucaugauagcaauguaaagaaccuguacgagaaaguucgcucacagcucaagaacaaugcaaaggaaaucggcaacggauguuuugaguucuaucacaaaugcgacaauacauguauggaaagugugaagaacggcacuuacgauuauccuaaauacuccgaggaagccaagcugaaucgagaggagauugacggggucaaacuugaaagcaccagaaucuaucaaauucuggcuauauacucuacaguggcgucaaguuugguccucgugguuagccugggagcaaucuccuuuuggaugugcucuaccgguucguuacagugcaggauuuguaucuga

SEQ ID NO: 134533 - RNA, 1701 nt, Artificial Sequence; identical to SEQ ID NO: 131164
  derived and/or modified CDS sequence (opt3) from hemagglutinin__InfluenzaA__ADX96637

SEQ ID NO: 134534 - RNA, 1701 nt, Artificial Sequence; identical to SEQ ID NO: 130717
  derived and/or modified CDS sequence (opt3) from hemagglutinin__InfluenzaA__ADX96647

SEQ ID NO: 134535 - RNA, 1701 nt, Artificial Sequence; identical to SEQ ID NO: 130704
  derived and/or modified CDS sequence (opt3) from hemagglutinin__InfluenzaA__ADX96657

SEQ ID NO: 134536 - RNA, 1701 nt, Artificial Sequence; identical to SEQ ID NO: 130717
  derived and/or modified CDS sequence (opt3) from hemagglutinin__InfluenzaA__ADX96667

SEQ ID NO: 134537 - RNA, 1701 nt, Artificial Sequence
  derived and/or modified CDS sequence (opt3) from hemagglutinin__InfluenzaA__ADX96677
augaaggccauccuggugguccuccuuuacaccuucgcuacagcaaacgccgacacucugugcauuggcuaucacgcgaauaacagcacggauaccguugacacaguguuggagaaaaauguaacugugacccauuccgucaacuuacuggaagauaagcacaaugggaaacuauguaagcucagaggaguggcuccccugcaucuugguaaaugcaacauagccggcuggauccuggggaauccugagugugaaucuuugucaacagcaaguagcugguccuacauuguugagaccucuucgucagacaacggaacuugcuauccaggcgauuuuaucgacuacgaggagcucagggagcagcugagcaguguguccucuuucgaacgguuugagauuuucccgaagacaagcuccuggcccaaucacgauucaaacaagggugucaccgccgcuuguccucaugcaggggccaaaaguuuuuauaagaaucugaucuggcucgugaaaaagggaaacagcuacccaaaauuaucuaaguccuauauaaaugacaagggcaaagaaguacugguucuuuggggcauccaccaccccucaacgagcgcugaucaacagaguuuguaccagaacgccgacgcguacguguucgucgggucuucccgcuauagcaagaaauuuaagccugagauugcaauccgaccaaaagugcgugaucaggagggaagaaugaauuacuauuggacuguggucgaacccggugacaagauuaccuucgaggccacaggcaaccugguugugccuagguacgcuuuugccauggaacggaacgcagggucgggaaucauaauuucugauacuccaguacaugacugcaauaccacaugucaaaccccgaaaggcgcuaucaacacgucccuacccuuccacaauauucauccuaucacuaucgguaagugcccaaaguaugugaaaucaacaaagcuccgccuggccaccgggcuuagaaacguccccaguauucagagcaggggacuguuuggcgcgauagccggcuucaucgaagggggauggacugguaugguggacggcugguacggguaucaccaccagaaugaacagggauccggcuacgcagcugauuugaaaucuacacaaaacgccauugacgagaucaccaauaagguuaacagcgugauagagaaaaugaauacgcaguuuaccgcugucgguaaggaguucaaccaucucgaaaagcggauugaaaaucugaacaaaaagguggaugacggguucuuagauaucuggacauacaaugccgagcugcucguacuucuggaaaacgagcgcacuuuggacuaucacgauucaaauguuaaaaaccuauacgagaaggugcgaagucagcugaaaaacaaugcaaaggaaaucggcaacggauguuuugaguucuaucauaagugcgacaauaccuguauggaauccgucaaaaacggcacauacgauuauccuaaguacagcgaggaagccaaacucaauagagaggagauugacggggugaagcuggaaucuacuaggaucuaucagauucuugcuauauacucaaccgucgcgaguagccugguguugguugugucccucggagcaaucucuuuuuggaugugcucgaacgguagccugcaaugccggauuuguaucuga

SEQ ID NO: 134538 - RNA, 1701 nt, Artificial Sequence
  derived and/or modified CDS sequence (opt3) from hemagglutinin__InfluenzaA__ADX96687
augaaggccauccuggugguccuccuuuacaccuucgcuacagcaaacgccgacacucugugcauuggcuaucacgcgaauaacagcacggauaccguugacacaguguuggagaaaaauguaacugugacccauuccgucaacuuacuggaagauaagcacaaugggaaacuauguaagcucagaggaguggcuccccugcaucuugguaaaugcaacauagccggcuggauccuggggaauccugagugugaaucuuugucaacagcaaguagcugguccuacauuguugagaccucuucgucagacaacggaacuugcuauccaggcgauuuuaucgacuacgaagaacucagggagcagcugagcaguguguccucuuucaagcgguuugaaauuuucccgaagacaagcuccuggcccaaucacgauucaaacaaaggugucaccgccgcuuguccucaugcaggggccaagaguuuuuauaaaaaucugaucuggcucgugaagaaaggaaacagcuacccaaaguuaucuaaguccuauauaaaugacaaaggcaaggagguacugguucuuuggggcauccaccaccccucaacgagcgcugaucaacagaguuuguaccagaacgccgacgcguacguguucgucgggacuucucgcuauuccaaaaaguuuaaaccugaaauugcaauccgaccaaaggugcgugaucaggagggaagaaugaauuacuauuggacccugguggagcccggugacaaaauuacauucgaagccacuggcaaccuagucguuccuagguacgcuuuugccauggagcggaacgcagggagcggaaucauaauuucggauaccccaguguaugacugcaauacaaccugucaaacgccgaagggcgcuaucaacacuucucuccccuuccagaauauucauccuaucacaaucgguaagugcccaaaauacguaaaguccaccaaacugcgccuugccacugggcugagaaacgugcccucaauucagaguaggggauuguuuggcgcgauagccggcuucaucgaagggggauggacagguauggucgacggcugguauggguaccaccaucagaaugagcaaggaagcggcuacgcagcugaucucaaguccacccagaacgccauugacgaaaucacgaauaaagugaacucuguuauagagaagaugaauacccaguuuacagcuguggguaaggaguucaaccaccuggaaaaacggauugagaauuuaaacaagaaagucgaugacggguuccuggauaucuggacuuauaaugccgaacuccuugugcuguuggagaacgaacgcacccuagacuaccacgauagcaauguaaagaaccuguaugagaaaguucgaucacagcucaagaacaaugcaaaggagaucggcaacggauguuuugaguucuaccauaaaugcgacaauacauguauggagagugugaagaacggcacuuaugauuacccuaaauauuccgaagaggccaagcugaauagagaagagauugacggggucaaacuugagagcaccaggaucuaccaaauucuggcuauauacucuacaguggcgucaaguuugguccucgugguuagccugggagcaaucuccuuuuggaugugcucuaacgguucguuacagugccggauuuguaucuga

SEQ ID NO: 134539 - RNA, 1701 nt, Artificial Sequence; identical to SEQ ID NO: 130717
  derived and/or modified CDS sequence (opt3) from hemagglutinin__InfluenzaA__ADX96697

SEQ ID NO: 134540 - RNA, 1701 nt, Artificial Sequence
  derived and/or modified CDS sequence (opt3) from hemagglutinin__InfluenzaA__ADX96707
augaaggccauccuggugguccuccuuuacaccuucgcuacagcaaacgccgacacucugugcauuggcuaucacgcgaauaacagcacggauaccguugacacaguguuggagaaaaauguaacugugacccauuccgucaacuuacuggaagauaagcacaaugggaaacuauguaagcucagaggaguggcuccccugcaucuugguaaaugcaacauagccggcuggauccuggggaauccugagugugaaucuuugucaacagcaaguagcugguccuacauuguugagaccucuucgucagacaacggaacuugcuauccaggcgauuuuaucgacuacgaggagcucagggagcagcugagcaguguguccucuuucgaacgguuugagauuuucccgaagacaagcuccuggcccaaucacgauucaaacaagggugucaccgccgcuuguccucaugcaggggccaaaaguuuuuauaagaaucugaucuggcucgugaaaaagggaaacagcuacccaaaauuaucuaaguccuauauaaaugacaagggcaaagaaguacugguucuuuggggcauccaccaccccucaacgagcgcugaucaacagaguuuguaccagaacgccgacgcguacguguucgucgggacuucucgcuauuccaagaaauuuaagccugagauugcaauccgaccaaaagugcgugaucaggagggaagaaugaauuacuauuggacccugguggaacccggugacaagauuacauucgaggccacuggcaaccuagucguuccuagguacgcuuuugccauggaacggaacgcagggagcggaaucauaauuucggauaccccagugcaugacugcgacacaaccugucaaacgccgaaaggcgcuaucaauacuucucuccccuuccagaacauucacccuaucacaaucgguaagugcccaaaguauguaaaauccaccaagcugcgccuugccacugggcugagaaaugugcccucaauucagaguaggggauuguuuggcgcgauagccggcuucaucgaagggggauggacagguauggucgauggcugguacggguaucaucaccagaacgaacaaggaagcggcuacgcagcugaccucaaauccacccagaaugccauugauaagaucacgaacaaaguuaauucugugauagagaagaugaacacccaguuuacagcuguggguaaggaguucaaucaccuggaaaaacggauugagaacuuaaauaagaaagucgacgauggguuccuggacaucuggacuuacaacgccgaacuccuugugcuguuggagaaugaacgcacccuagauuaucaugacagcaacguaaagaaucuguacgagaaaguucgaucacagcucaagaacaacgcaaaggagaucggcaauggauguuuugaguucuaucacaaaugcgauaacacauguauggaaagugugaagaauggcacuuacgacuauccuaaauacuccgaagaggccaagcugaacagagaagagauugauggggucaaacuugagagcaccaggaucuaucaaauucuggcuauauacucuacaguggcgucaaguuugguccucgugguuagccugggagcaaucuccuuuuggaugugcucuaccgguucguuacagugccggauuuguaucuga

SEQ ID NO: 134541 - RNA, 1701 nt, Artificial Sequence; identical to SEQ ID NO: 131877
  derived and/or modified CDS sequence (opt3) from hemagglutinin__InfluenzaA__ADX96727

SEQ ID NO: 134542 - RNA, 1701 nt, Artificial Sequence
  derived and/or modified CDS sequence (opt3) from hemagglutinin__InfluenzaA__ADX96737
augaaggccauccuggugguccuccuuuacaccuucgcuacagcaaacgccgacacucugugcauuggcuaucacgcgaauaacagcacggauaccguugacacaguguuggagaaaaauguaacugugacccauuccgucaacuuacuggaagauaagcacaaugggaaacuauguaagcucagaggaguggcuccccugcaucuugguaaaugcaacauagccggcuggauccuggggaauccugagugugaaucuuugucaacagcaaguagcugguccuacauuguugagaccucuucgucagacaacggaacuugcuauccaggcgauuuuaucgacuacgaagaacucagggagcagcugagcaguguguccucuuucgaacgguuugagauuuucccgaagacaagcuccuggcccaaucacgauucaaacaagggugucaccgccgcuuguccucaugcaggggccaaaaguuuuuauaagaaucugaucuggcucgugaaaaagggaaacagcuacccaaaauuaucuaaguccuauauaaaugacaagggcaaagaaguacugguucuuuggggcauccaccaccccucaacgagcgcugaucaacagaguuuguaccagaacgccgacgcguacguguucgucgggacuucucgcuauuccaagaaauuuaagccugagauugcaauccgaccaaaagugaaggagcaggaaggacguaugaauuacuauuggacccugguggagcccggugauaaaauuacauucgaagccacuggcaaccuagucguuccuagauacgcuuuugccauggagaggaaggcagggagcggaaucauaauuucggacaccccagugcaugauugcaacacaaccugucaaacgccgaagggcgcuaucaauacuucucuccccuuccagaacauucacuccaucacaaucgguaaaugcccuaaguauguaaaaucaaccaagcugcggcuugccacugggcugcgcaaugugccaaguauucagagcagaggauuguuuggcgcgauagccggcuucaucgaagggggauggacagguauggucgacggcugguacggguaucaucaccagaacgagcaaggauccggcuacgcagcugaccucaaaucuacccagaaugccauugaugagaucacgaacaaggugaauagcguuauagaaaagaugaacacccaguuuacagcuguggguaaagaguucaaucaccuggaaaagaggauugagaacuuaaauaaaaaggucgacgauggguuccuggacaucuggacuuacaacgccgaacuccuugugcuguuggagaaugagcggacccuagauuaucaugacucaaacguaaagaaucuguacgaaaagguucgcagucagcucaagaacaacgcaaaagagaucggcaauggauguuuugaguucuaucacaagugcgauaacacauguauggaguccgugaaaaauggcacuuacgacuaucccaaguacagcgaagaggccaaacugaaccgagaggaaauugauggggucaaacuugagucuaccagaaucuaucaaauucuggcuauauacucaacaguggcgaguagcuugguccucgugaucucccugggagcaauuucuuuuuggaugugcucgaccgguagcuuacagugcaggaucuguaucuga

SEQ ID NO: 134543 - RNA, 1701 nt, Artificial Sequence; identical to SEQ ID NO: 130717
  derived and/or modified CDS sequence (opt3) from hemagglutinin__InfluenzaA__ADX96747

SEQ ID NO: 134544 - RNA, 1701 nt, Artificial Sequence
  derived and/or modified CDS sequence (opt3) from hemagglutinin__InfluenzaA__ADX96757
augaaggccauccuggugguccuccuuuacaccuucgcuacagcaaacgccgacacucugugcauuggcuaucacgcgaauaacagcacggauaccguugacacaguguuggagaagaauguaacugugacccauuccgucaacuuacuggaagauaagcacaaugggaaacuauguaagcucagaggaguggcuccccugcaucuugguaaaugcaacauagccggcuggauccuggggaauccugagugugaaucuuugucaacagcaaguagcugguccuacauuguugagaccucuucgucaggaaacggcacuugcuauccaggugacuuuaucgauuacgaagaacucagggagcagcugagcaguguguccucuuucgaacgguuugagauuuucccgaagacaagcuccuggcccaaucacgacucaaacaagggggucaccgccgcuuguccucaugcaggagccaaaaguuuuuauaagaaucugaucuggcucgugaaaaagggcaacagcuacccaaaauuaucuaaguccuauauaaaugauaagggcaaagaaguacugguucuuugggggauccaccaccccucaacgagcgcugaccaacagaguuuguaccagaacgccgaugcguacguguucgucggaacuucucgcuauuccaagaaauuuaagccugagauugcaauccgaccaaaagugcgugaccaggaggguagaaugaauuacuauuggacccuggugguccccggcgauaagauuacauucgaagccacugggaaccuaguugugccuagguacgcuuuugccauggagcggaacgcaggaagcggcaucauaauuucggacaccccaguacaugauugcaauacaaccugucaaacgccgaaaggugcuaucaacacuucucuccccuuccagaauauucacccuaucacaaucgggaagugcccaaaguaugugaaauccaccaagcugcgccuugccacuggacugagaaacguccccucaauucagaguaggggcuuguuuggcgcgauagccggguucaucgaaggagguuggacaggcaugguggacgggugguacggauaucaucaccagaaugagcaaggcagcgguuacgcagcugaccucaaauccacccagaacgccauugaugaaaucacgaauaagguuaacucugugauagagaaaaugaauacccaguuuacagcugucgggaaggaguucaaccaccuggaaaagcggauugagaauuuaaacaaaaagguggacgauggcuuccuggacaucuggacuuacaaugccgaacuccuuguacuguuggagaacgaacgcacccuagauuaucaugacagcaauguuaaaaaccuguacgagaaggugcgaucacagcucaaaaacaaugcaaaggagaucggaaacggcuguuuugaguucuaucacaagugcgauaauacauguauggagagugucaaaaacgggacuuacgacuauccuaaguacuccgaagaggccaaacugaauagagaagagauugauggagugaaacuugagagcaccaggaucuaucaaauucuggcuauauacucuacagucgcgucaaguuuggugcucguugugagccugggugcaaucuccuuuuggaugugcucuaccggcucguuacagugccggauuuguaucuga

SEQ ID NO: 134545 - RNA, 1701 nt, Artificial Sequence
  derived and/or modified CDS sequence (opt3) from hemagglutinin__InfluenzaA__ADX96767
augaaggccauccuggugguccuccuuuacaccuucgcuacagcaaacgccgacacucugugcauuggcuaucacgcgaauaacagcacggauaccguugacacaguguuggagaaaaauguaacugugacccauuccgucaacuuacuggaagauaagcacaaugggaaacuauguaagcucagaggaguggcuccccugcaucuugguaaaugcaacauagccggcuggauccuggggaauccugagugugaaucuuugucaacagcaaguagcugguccuacauuguugagaccucuucgucagacaacggaacuugcuauccaggcgauuuuaucgacuacgaggagcucagggagcagcugagcaguguguccucuuucgaacgguuugagauuuucccgaagacaagcuccuggcccaaucacgauucaaacaagggugucaccgccgcuuguccucaugcaggggccaaaaguuuuuauaagaaucugaucuggcucgugaaaaagggaaacagcuacccaaaauuaucuaaguccuauauaaaugacaagggcaaagaaguacugguucuuuggggcauccaccaccccucaacgagcgcugaucaacagaguuuguaccagaacgccgacgcguacguguucgucgggacuucucgcuauuccaagaaauuuaagccugagauugcaauccgaccaaaagugcgugaucaggagggaagaaugaauuacuauuggacccugguggaaagcggugacaagauuacauucgaggccacuggcaaccuagucguucccagguacgcuuuugccauggaacggaacgcagggucgggaaucauaauuucugauaccccugugcaugacugcaauacaaccugucaaacgccaaaaggcgcuaucaacacuucccucccguuccagaauauucaccccaucacaaucgguaagugcccuaaguauguaaaaucaaccaagcugcgccuugccacugggcugagaaacgugccaaguauucagagcaggggauuguuuggcgcgauagccggcuucaucgaagggggauggacagguauggucgacggcugguacggguaucaucaccagaaugaacaaggauccggcuacgcagcugaucucaaaucuacccagaacgccauugacgagaucacgaauaaggugaacagcguuauagagaaaaugaauacccaguuuacagcuguggguaaggaguucaaccaccuggaaaagcggauugaaaauuuaaacaaaaaggucgaugacggguuccuggauaucuggacuuacaaugccgagcuccuugugcuguuggaaaacgagcgcacccuagacuaucaugauucaaauguuaaaaagcuguacgagaaaguacgaagucagcucaagaacaacgcaaaggaaaucggcaauggauguuuugaguucuaucacaaaugcgacaacacauguauggaauccgugaagaauggcacuuacgauuaucccaaauacagcgaggaagccaagcugaacagagaggagauugacggggucaaacuugaaucuaccaggaucuaucaaauucuggcuauauacucaacaguggcgaguagcuugguccucgugguuucccugggagcaaucucuuuuuggaugugcucgaccgguagcuuacagugccggauuuguaucuga

SEQ ID NO: 134546 - RNA, 1701 nt, Artificial Sequence
  derived and/or modified CDS sequence (opt3) from hemagglutinin__InfluenzaA__ADX96777
augaaggccauccuggugguccuccuuuacaccuucgcuacagcaaacgccgacacucugugcauuggcuaucacgcgaauaacagcacggauaccguugacacaguguuggagaagaauguaacugugacccauuccgucaacuuacuggaagauaagcacaaugggaaacuauguaagcucagaggaguggcuccccugcaucuugguaaaugcaacauagccggcuggauccuggggaauccugagugugaaucuuugucaacagcaaguagcugguccuacauuguugagaccucuucgucagacaacggaacuugcuauccaggcgauuuuaucgacuacgaagaacucagggagcagcugagcaguguguccucuuucgaacgguuugagauuuucccgaagacaagcuccuggcccaaucacgauucaaacaagggugucaccgccgcuuguccucaugcaggggccaaaaguuuuuauaagaaucugaucuggcucgugaaaaagggaaacagcuacccaaaauuaucuaaguccuauauaaaugacaagggcaaagaaguacugguucuuuggggcauccaccaccccucaacgagcgcugaucaacagaguuuguaccagaacgccgacgcguacguguucgucgggacuucucgcuauuccaagaaauuuaagccugagauugcaauccgaccaaaagugcgugaucaggagggaagaaugaauuacuauuggacccuggugguccccggugacaagauuacauucgaagccacuggcaaccuaguugugccuagguacgcuuuugccauggagcggaacgcagggagcggaaucauaauuucggauaccccaguacaugacugcaauacaaccugucaaacgccgaaaggcgcuaucaacacuucucuccccuuccagaauauucacuccaucacaaucgguaagugcccuaaguaugugaaaucaaccaagcugcgccuugccacugggcugagaaacgucccaaguauucagagcaggggauuguuuggcgcgauagccggcuucaucgaagggggauggacagguaugguggacggcugguacggguaucaucaccagaaugagcaaggauccggcuacgcagcugaucucaaaucuacccagaacgccauugacgaaaucacgaauaagguuaacagcgugauagagaaaaugaauacccaguuuacagcugucgguaaggaguucaaccaccuggaaaagcggauugagaauuuaaacaaaaagguggaugacggguuccuggauaucuggacuuacaaugccgaacuccuuguacuguuggagaacgaacgcacccuagacuaucaugauucaaauguuaaaaaccuguacgagaaggugcgaagucagcucaaaaacaaugcaaaggagaucggcaacggauguuuugaguucuaucacaagugcgacaauacauguauggaguccgucaaaaacggcacuuacgauuaucccaaguacagcgaagaggccaaacugaauagagaagagauugacggggugaaacuugagucuaccaggaucuaucaaauucuggcuauauacucaacagucgcgaguagcuuggugcucguugugucccugggagcaaucucuuuuuggaugugcucgaacgguagcuuacagugccggauuuguaucuga

SEQ ID NO: 134547 - RNA, 1701 nt, Artificial Sequence; identical to SEQ ID NO: 130717
  derived and/or modified CDS sequence (opt3) from hemagglutinin__InfluenzaA__ADX96787

SEQ ID NO: 134548 - RNA, 1701 nt, Artificial Sequence; identical to SEQ ID NO: 133944
  derived and/or modified CDS sequence (opt3) from hemagglutinin__InfluenzaA__ADX96797

SEQ ID NO: 134549 - RNA, 1701 nt, Artificial Sequence
  derived and/or modified CDS sequence (opt3) from hemagglutinin__InfluenzaA__ADX96807
augaaggccauccuggugguccuccuuuacaccuucgcuacagcaaacgccgacacucugugcauuggcuaucacgcgaauaacagcacggauaccguugacacaguguuggagaaaaauguaacugugacccauuccgucaacauauuagaagauaagcacaaugggaaacuguguaagcuaagaggaguggcuccccuccaucuggguaaaugcaacaucgccggcuggauucuugggaauccugagugugaaucucugucaacagcaaguagcugguccuacaucguugagaccucuucgucagacaacggaacuugcuauccaggcgauuuuauugacuacgaagaguugagggagcagcucagcaguguguccucuuucgaacgguuugagaucuucccgaagacaagcuccuggcccaaucacgauucaaacaagggugucaccgccgcuuguccucaugcaggggccaaaaguuuuuauaagaaucugauauggcuggugaaaaagggaaacagcuacccaaaacucucuaaguccuauaucaaugacaagggcaaagaaguauuaguucuguggggcauucaccaccccucaacgagcgcugaucaacagagucuuuaccagaacgccgacgcguacguguucgucgggucuucccgcuuuagcaagaaauucaagccugagaucgcaauucgaccaaaagugcgugaucaggagggaagaaugaauuauuacuggacuuugguggaacccggugacaagaucaccuuugaggccacaggcaaccuggucguuccuagguaugcuuucgccauggaacggaacgcagggucgggaauaauuaucucugauacuccagugcaugacugcaauaccacaugucaaaccccgaaaggcgcuauuaacacgucccuacccuuucagaauauccacccuaucacuauugguaagugcccaaaguacguaaaaucaacaaagcuccgccuggccaccgggcuuagaaacgugcccaguauacagagcaggggacuguucggcgcgaucgccggcuuuauugaagggggauggacugguauggucgacggcugguauggguaccaucaccagaaugaacaaggauccggcuaugcagcugauuugaaaucuacacagaacgccaucgacgagauaaccaauaaggugaacagcguuauugagaaaaugaauacgcaguucaccgcuguggguaaggaguucaaccaccucgagaagcggaucgaaaaucugaacaaaaaggucgaugacggguuuuuagauaucuggacauacaaugccgagcugcucgugcuucuggaaaacgagcgcacuuuggacuaccaugauucaaauguuaaaaaccuauaugagaagguacgaagucagcugaaaaacaaugcaaaggaagugggcaacggauguuucgaguuuuaccacaagugcgacaauaccuguauggaauccgucaaaaacggcacauaugauuacccuaaguauagcgaggaagccaaacucaauagagaggagauugacggggugaagcuggaaucuacuaggaucuaccaaauucuugcuauauauucaaccgucgcgaguagccugguguugguugugucccucggagcaaucucuuucuggaugugcucgaacgguagccugcagugccggauuuguaucuga

SEQ ID NO: 134550 - RNA, 1701 nt, Artificial Sequence; identical to SEQ ID NO: 130704
  derived and/or modified CDS sequence (opt3) from hemagglutinin__InfluenzaA__ADX96817

SEQ ID NO: 134551 - RNA, 1701 nt, Artificial Sequence
  derived and/or modified CDS sequence (opt3) from hemagglutinin__InfluenzaA__ADX96837
augaaggccauccuggugguccuccuuuacaccuucgcuacagcaaacgccgacacucugugcauuggcuaucacgcgaauaacagcacggauaccguugacacaguguuggagaaaaauguaacugugacccauuccgucaacauauuagaagauaagcacaaugggaaacuguguaagcuaagaggaguggcuccccuccaucuggguaaaugcaacaucgccggcuggauucuugggaauccugagugugaaucucugucaacagcaaguagcugguccuacaucguugagaccucuucgucagacaacggaacuugcuauccaggcgauuuuauugacuacgaagaguugagggagcagcucagcaguguguccucuuucgaacgguuugagaucuucccgaagacaagcuccuggcccaaucacgauucaaacaagggugucaccgccgcuuguccuuaugcaggggccaaaaguuuuuacaagaaucugauauggcuggugaaaaagggaaacagcuauccaaaacucucuaaguccuacaucaaugacaagggcaaagaaguauuaguucuguggggcauucaucaccccucaacgagcgcugaucaacagagucuuuaccagaacgccgacgcguauguguucgucgggucuucccgcuacagcaagaaauuuaagccugagaucgcaauucgaccaaaagugcgugaucaggagggaagaaugaauuauuacuggacuuugguggaacccggugacaagaucaccuucgaggccacaggcaaccuggucguuccuagguaugcuuuugccauggaacggaacgcagggucgggaauaauuaucucugauacuccagugcacgacugcaauaccacaugucaaaccccgaaaggcgcuauuaacacgucccuacccuuccagaauauccauccuaucacuauugguaagugcccaaaguacguaaaaucaacaaagcuccgccuggccaccgggcuuagaaacgugcccaguauacagagcaggggacuguuuggcgcgaucgccggcuucauugaagggggauggacugguauggucgacggcugguauggguaccaccaucagaaugaacaaggauccggcuacgcagcugauuugaaaucuacacagaacgccaucgacgagauaaccaauaaggugaacagcguuauugagaaaaugaauacgcaguuuaccgcuguggguaaggaguucaaccaccucgagaagcggaucgaaaaucugaacaaaaaggucgaugacggguucuuagauaucuggacauauaaugccgagcugcucgugcuucuggaaaacgagcgcacuuuggacuaccacgauucaaauguuaaaaaccuauaugagaagguacgaagucagcugaaaaacaaugcaaaggaagugggcaacggauguuuugaguucuaccauaagugcgacaauaccuguauggaauccgucaaaaacggcacauaugauuacccuaaguauagcgaggaagccaaacucaauagagaggagauugacggggugaagcuggaaucuacuaggaucuaccaaauucuugcuauauacucaaccgucgcgaguagccugguguugguugugucccucggagcaaucucuuuuuggaugugcucgacagguagccugcagugccggauuuguaucuga

SEQ ID NO: 134552 - RNA, 1701 nt, Artificial Sequence; identical to SEQ ID NO: 130717
  derived and/or modified CDS sequence (opt3) from hemagglutinin__InfluenzaA__ADX96847

SEQ ID NO: 134553 - RNA, 1701 nt, Artificial Sequence; identical to SEQ ID NO: 130717
  derived and/or modified CDS sequence (opt3) from hemagglutinin__InfluenzaA__ADX96857

SEQ ID NO: 134554 - RNA, 1701 nt, Artificial Sequence; identical to SEQ ID NO: 130897
  derived and/or modified CDS sequence (opt3) from hemagglutinin__InfluenzaA__ADX96867

SEQ ID NO: 134555 - RNA, 1701 nt, Artificial Sequence; identical to SEQ ID NO: 133654
  derived and/or modified CDS sequence (opt3) from hemagglutinin__InfluenzaA__ADX96877

SEQ ID NO: 134556 - RNA, 1701 nt, Artificial Sequence
  derived and/or modified CDS sequence (opt3) from hemagglutinin__InfluenzaA__ADX96897
augaaggccauccuggugguccuccuuuacaccuucgcuacagcaaacgccgacacucugugcauuggcuaucacgcgaauaacagcacggauaccguugacacaguguuggagaaaaauguaacugugacccauuccgucaacuuacuggaagauaagcacaaugggaaacuauguaagcucagaggaguggcuccccugcaucuugguaaaugcaacauagccggcuggauccuggggaauccugagugugaaucuuugucaacagcaaguagcugguccuacauuguugagaccucuucgucagacaacggaacuugcuauccaggcgauuuuaucgacuacgaggagcucagggagcagcugagcaguguguccucuuucgaacgguuugagauuuucccgaagacaagcuccuggcccaaucacgauucaaacaagggugucaccgccgcuuguccucaugcaggggccaaaaguuuuuauaagaaucugaucuggcucgugaaaaagggaaacagcuacccaaaauuaucuaaguccuauauaaaugacaagggcaaagaaguacugguucuuuggggcauccaccaccccucaacgagcgcugaucaacagaguuuguaccagaacgccgacgcguacguguucgucgggacuucucgcuauuccaagaaauuuaagccugagauugcaauccgaccaaaagugcgugaucaggagggaagaaugaauuacuauuggacccugguggaacccggugacaagauuacauucgaggccacuggcaaccuagucguuccuagguacgcuuuugccauggaacggaacgcagggagcggaaucauaauuucggauaccccaauccaugacugcaauacaaccugucaaacgccgaaaggcgcuauuaacacuucucuccccuuccagaauauccacccuaucacaauugguaagugcccaaaguaugugaaauccaccaagcugcgccuugccacugggcugagaaacguacccucaauacagaguaggggauuguuuggcgcgaucgccggcuucauugaagggggauggacagguaugguggacggcugguacggguaucaucaccagaaugaacaaggaagcggcuacgcagcugaucucaaauccacccagaacgccaucgacaagauaacgaauaaagucaacucugugauugagaagaugaauacccaguuuacagcuguugguaaggaguucaaccaccuggaaaaacggaucgagaauuuaaacaagaaaguggaugacggguuccuggauaucuggacuuacaaugccgaacuccuuguccuguuggagaacgaacgcacccuagacuaucaugauagcaaugugaagaaccuguacgagaaaguacgaucacagcucaagaacaaugcaaaggagauuggcaacggauguuuugaguucuaucacaaaugcgacaauacauguauggaaaguguuaagaacggcacuuacgauuauccuaaauacuccgaagaggccaagcugaauagagaagagaucgacggggugaaacuugagagcaccaggauuuaucaaauacuggcuaucuacucuacagucgcgucaaguuuggugcucgucgugagccugggagcaauuuccuuuuggaugugcucuaacgguucguuacagugccggaucuguaucuga

SEQ ID NO: 134557 - RNA, 1701 nt, Artificial Sequence
  derived and/or modified CDS sequence (opt3) from hemagglutinin__InfluenzaA__ADX96907
augaaggccauccuggugguccuccuuuacaccuucgcuacagcaaacgccgacacucugugcauuggcuaucacgcgaauaacagcacggauaccguugacacaguguuggagaaaaauguaacugugacccauuccgucaacuuacuggaagauaagcacucugggaaacuauguaagcucagaggaguggcuccccugcaucuugguaaaugcaauauagccggcuggauccuggggaacccugagugugaaucauugaguacagcaagcuccuggucuuacauuguugagaccucgucaagcgacaauggaacuugcuauccaggcgauuuuaucgacuacgaggagcucagggagcagcugaguuccgugucuagcuucgaacgguuugagauuuucccgaagacauccucauggcccaaccacgauaguagcaagggugucaccgccgcuuguccucaugcaggggccaaaucuuuuuauaagaaucugaucuggcucgugaaaaagggaaacuccuacccaaaauuaucaaagagcuauauaaaugacaagggcaaagaaguacugguucuuuggggcauccaccaccccaguacgucugcugaucaacaguccuuguaccagaacgccgacgcguacguguucgucgggacuagccgcuauucgaagaaauuuaagccugagauugcaauccgaccaaaagugcgugaucaggagggaagaaugaauuacuauuggacccugguggaacccggugacaagauuacauucgaggccacuggcaaccuagucguuccuagguacgcuuuugccauggaacggaaugcagggucuggaaucauaauuuccgauaccccagugcaugacugcaacacaaccugucaaacgccgaaaggcgcuaucaacacuucacuccccuuccagaauauucacccuaucacaaucgguaagugcccaaaguauguaaaaaguaccaagcugcgccuugccacugggcugagaaacgugcccagcauucaguccaggggauuguuuggcgcgauagccggcuucaucgaagggggauggacagguauggucgacggcugguacggguaucaucaccagaaugaacaaggaucuggcuacgcagcugaucucaaaagcacccagaacgccauugacaagaucacgaauaaagugaacucaguuauagagaagaugaauacccaguuuacagcuguggguaaggaguucaaccaccuggaaaaacggauugagaauuuaaacaagaaagucgaugacggguuccuggauaucuggacuuacaaugccgaacuccuugugcuguuggagaacgaacgcacccuagacuaucaugauaguaauguaaagaaccuguacgagaaaguucgaucccagcucaagaauaacgcaaaggagaucggcaacggauguuuugaguucuaucacaaaugcgacaauacauguauggaaagcgugaagaacggcacuuacgauuauccuaaauacucugaagaggccaagcugaauagagaagagauugacggggucaaacuugagucaaccaggaucuaucaaauucuggcuauauacaguacaguggcgagcuccuugguccucgugguuucucugggagcaaucucguuuuggaugugcagcaacgguuccuuacagugccggauuuguaucuga

SEQ ID NO: 134558 - RNA, 1701 nt, Artificial Sequence
  derived and/or modified CDS sequence (opt3) from hemagglutinin__InfluenzaA__ADX96927
augaaggccauccuggugguccuccuuuacaccuucgcuacagcaaacgccgacacucugugcauuggcuaucacgcgaauaacagcacggauaccguugacacauuguuagagaaaaaugugacuguaacccauuccgugaaccugcuagaagauaagcacaaugggaaacucuguaagcugagaggagucgcuccccuucaucuggguaaaugcaacauagccggcuggaucuuggggaauccugagugugaaucucucucaacagcaaguagcugguccuacauuguggagaccucuucgucagacaacggaacuugcuauccaggcgauuuuaucgacuacgaagaacugagggagcagcugagcaguguuuccucuuucgaacgguuugagauuuucccgaagacaagcuccuggcccaaucacgauucaaacaagggugugaccgccgcuuguccucaugcaggggccaaaaguuuuuauaagaaucucaucugguuagucaaaaagggaaacagcuacccaaaacugucuaaguccuauauaaaugacaagggcaaagaagugcuuguauuguggggcauccaccaccccucaacgagcgcugaucaacagagucuguaccagaacgccgacgcguacguuuucguggggacuucucgcuauuccaagaaauuuaagccugagauugcaauccgaccaaaaguccgugaucaggagggaagaaugaauuacuauuggacccuaguggaacccggugacaagauuacauucgaggccacuggcaaccucguggucccuagguacgcuuuugccauggaucggaacgcagggagcggaaucauaauuucggacaccccaguucaugacugcaauacaaccugucaaacgccgaaaggcgcuaucaacacuucucugcccuuccagaauauucacccuaucacaaucgguaagugcccaaaguaugugaaauccaccaaacuucgccuggccacuggguugagaaacguacccucaauucagaguaggggacucuuuggcgcgauagccggcuucaucgaagggggauggacagguaugguggauggcugguacggguaucaucaccagaaugagcaaggaagcggcuacgcagcugaccugaaguccacccagaacgccauugaugaaaucacgaauaaggucaacucugugauagagaaaaugaauacccaguuuacagcuguugguaaggaguucaaccacuuagaaaagcggauugagaaucugaacaaaaagguggacgauggguuccucgacaucuggacuuacaaugccgaacuucuggucuugcuagagaacgaacgcacccuggauuaucaugacagcaaugugaaaaaccucuacgagaagguacgaucacagcugaaaaacaaugcaaaggagaucggcaacggauguuuugaguucuaucacaagugcgauaauacauguauggagaguguuaaaaacggcacuuacgacuauccuaaguacuccgaagaggccaaacuuaauagagaagagauugauggggugaagcuggagagcaccaggaucuaucaaauuuuggcuauauacucuacagucgcgucaagucucgugcuggucgugagcuuaggagcaaucuccuuuuggaugugcucuaacgguucgcugcagugccggauuuguaucuga

SEQ ID NO: 134559 - RNA, 1701 nt, Artificial Sequence; identical to SEQ ID NO: 132137
  derived and/or modified CDS sequence (opt3) from hemagglutinin__InfluenzaA__ADX96937

SEQ ID NO: 134560 - RNA, 1701 nt, Artificial Sequence; identical to SEQ ID NO: 130704
  derived and/or modified CDS sequence (opt3) from hemagglutinin__InfluenzaA__ADX96947

SEQ ID NO: 134561 - RNA, 1701 nt, Artificial Sequence; identical to SEQ ID NO: 131881
  derived and/or modified CDS sequence (opt3) from hemagglutinin__InfluenzaA__ADX96957

SEQ ID NO: 134562 - RNA, 1701 nt, Artificial Sequence; identical to SEQ ID NO: 131030
  derived and/or modified CDS sequence (opt3) from hemagglutinin__InfluenzaA__ADX96967

SEQ ID NO: 134563 - RNA, 1701 nt, Artificial Sequence; identical to SEQ ID NO: 130897
  derived and/or modified CDS sequence (opt3) from hemagglutinin__InfluenzaA__ADX96977

SEQ ID NO: 134564 - RNA, 1701 nt, Artificial Sequence
  derived and/or modified CDS sequence (opt3) from hemagglutinin__InfluenzaA__ADX96987
augaaggccauccuggugguccuccuuuacaccuucgcuacagcaaacgccgacacucugugcauuggcuaucacgcgaauaacagcacggauaccguugacacaguguuggagaaaaauguaacugugacccauuccgucaacauauuagaagauaagcacaaugggaaacuguguaagcuaagaggaguggcuccccuccaucuggguaaaugcaacaucgccggcuggauucuugggaauccugagugugaaucucugucaacagcaaguagcugguccuacaucguugagaccucuucgucagacaacggaacuugcuauccaggcgauuuuauugacuacgaagaguugagggagcagcucagcaguguguccucuuucgaacgguuugagaucuucccgaagacaagcuccuggcccaaucacgauucaaacaagggugucaccgccgcuuguccucaugcaggggccaaaaguuuuuauaagaaucugauauggcuggugaaaaagggaaacagcuacccaaaacucucuaaguccuauaucaaugacaagggcaaagaaguauuaguucuguggggcauucaccaccccucaacgagcgcugaucaacagagucuuuaccagaacgccgacgcguacguguucgucgggucuucccgcuauagcaagaaauuuaagccugagaucgcaauucgaccaaaagugcgugaucaggagggaagaaugaauuacuauuggacuuugguggaacccggugacaagaucaccuucgaggccacaggcaaccuggucguuccuagguacgcuuuugccauggaacggaacgcagggucgggaauaauuaucucugauacuccagugcaugacugcaauaccacaugucaaaccccgaaaggcgcuauuaacacgucccuacccuuccagaauauccacccuaucacuauugguaagugcccaaaguauguaaaaucaacaaagcuccgccuggccaccgggcuuagaaacgugcccaguauacagagcaggggacuguuuggcgcgaucgccggcuucauugaagggggauggacugguauggucgacggcugguacggguaucaucaccagaaugaacaaggauccggcuacgcagcugauuugaaaucuacacagaacgccaucgacgagauaaccaauaaggugaacagcguuauugagaaaaugaauacgcaguuuaccgcuguggguaaggaguucaaccaccucgagaagcggaucgaaaaucugaacaaaaaggucgaugacggguucuuagauaucuggacauacaaugccgagcugcucgugcuucuggaaaacgagcgcacuuuggacuaucaugauucaaauguuaaaaaccuauacgagaagguacgaagucagcugaaaaacaaugcaaaggaaauuggcaacggauguuuugaguucuaucacaagugcgacaauaccuguauggaauccgugaaaaacggcacauacgauuauccuaaguacagcgaggaagccaaacucaauagagaggagaucgacgggauuaagcuggaaucuacuaggauauaucaaauccuugcuauuuacucaaccgucgcgaguagccugguguuggucgugucccucggagcaaucucuuuuuggaugugcucgaacgguagccugcagugccggaucuguauuuga

SEQ ID NO: 134565 - RNA, 1701 nt, Artificial Sequence; identical to SEQ ID NO: 130897
  derived and/or modified CDS sequence (opt3) from hemagglutinin__InfluenzaA__ADX96997

SEQ ID NO: 134566 - RNA, 1701 nt, Artificial Sequence
  derived and/or modified CDS sequence (opt3) from hemagglutinin__InfluenzaA__ADX97007
augaaggccauccuggugguccuccuuuacaccuucgcuacagcaaacgccgacacucugugcauuggcuaucacgcgaauaacagcacggauaccguugacacaguguuggagaaaaauguaacugugacccauuccgucaacuuacuggaagauaagcacaaugggaaacuauguaagcucagaggaguggcuccccugcaucuugguaaaugcaacauagccggcuggauccuggggaauccugagugugaaucuuugucaacagcaaguagcugguccuacauuguugagaccucuucgucagacaacggaacuugcuauccaggcgauuuuaucgacuacgaggagcucagggagcagcugagcaguguguccucuuucgaacgguuugagauuuucccgaagacaagcuccuggcccaaucacgauucaaacaagggugucaccgccgcuuguccucaugcaggggccaaaaguuuuuauaagaaucugaucuggcucgugaaaaagggaaacagcuacccaaaauuaucuaaguccuauauaaaugacaagggcaaagaaguacugguucuuuggggcauccaccaccccucaacgagcgcugaucaacagaguuuguaccagaacgccgacgcguacguguucgucgggacuucucgcuauuccaagaaauuuaagccugagauugcaauccgaccaaaagugcgugaucaggagggaagaaugaauuacuauuggacccugguggaacccggugacaagauuacauucgaggccacuggcaaccuagucguuccuagguacgcuuuugccauggaacggaacgcagggagcggaaucauaauuucggaugcuccagugcaugacugcaauaccacaugucaaaccccgaaaggcgccaucaacacgucucuccccuuccagaauauucacccuaucacuaucgguaagugcccaaaguauguaaaauccacaaagcugcgccuugcgaccgggcugagaaacgugcccucaauucagaguaggggauuguuuggcgccauagcaggcuucaucgaagggggauggacugguauggucgacggcugguacggguaucaucaccagaaugaacaaggaagcggcuacgcugccgaucucaaauccacacagaacgcuauugacgagaucaccaauaaggugaacucuguuauagagaaaaugaauacgcaguuuaccgccguggguaaggaguucaaccaccuggaaaagcggauugaaaauuuaaacaaaaaggucgaugacggguuccuggauaucuggacauacaaugcagagcuccuugugcuguuggaaaacgagcgcacucuagacuaucaugauagcaauguaaagaaccuguacgagaagguucgaucacagcucaaaaacaaugccaaggaaaucggcaacggauguuuugaguucuaucacaagugcgacaauaccuguauggaaagugugaaaaacggcacauacgauuauccuaaguacuccgaggaagcuaaacugaauagagaggagauugacggggucaaacuugaaagcacuaggaucuaucaaauucuggcgauauacucuaccguggcaucaaguuugguccucgugguuagccugggagccaucuccuuuuggaugugcucuaacgguucguuacagugccggauuuguaucuga

SEQ ID NO: 134567 - RNA, 1701 nt, Artificial Sequence; identical to SEQ ID NO: 134516
  derived and/or modified CDS sequence (opt3) from hemagglutinin__InfluenzaA__ADX97018

SEQ ID NO: 134568 - RNA, 1701 nt, Artificial Sequence
  derived and/or modified CDS sequence (opt3) from hemagglutinin__InfluenzaA__ADX97028
augaaggccauccuggugguccuccuuuacaccuucgcuacagcaaacgccgacacucugugcauuggcuaucacgcgaauaacagcacggauaccguugacacaguguuggagaaaaauguaacugugacccauuccgucaacauauuagaagauaagcacaaugggaaacuguguaagcuaagaggaguggcuccccuccaucuggguaaaugcaacaucgccggcuggauucuugggaauccugagugugaaucucugucaacagcaaguagcugguccuacaucguugagaccucuucgucagacaacggaacuugcuauccaggcgauuuuauugacuacgaagaguugagggagcagcucagcaguguguccucuuucgaacgguuugagaucuucccgaagacaagcuccuggcccaaucacgauucaaacaagggugucaccgccgcuuguccucaugcaggggccaaaaguuuuuauaagaaucugauauggcuggugaaacaaggaaacagcuacccaaagcucucuaaauccuauaucaaugacaagggcaaggaaguauuaguucuguggggcauucaccaccccucaacgacugcugaucagcagagccuuuaccagaacgccgacgcguacguguucgucgggaguucucgcuauuccaaaaaguuuaaaccugagaucgcaauucgaccaaaggugcgugaucaagagggaagaaugaauuacuauuggaccuugguggaacccggugacaaaaucacauucgaggccacuggcaaccuggucguuccuagguacgcuuuugccauggaacggaacgcagggagcggaauaauuaucucggauaccccagugcaugacugcaauacaaccugucagacgccgaagggcgcuauuaacacuucucuacccuuccagaauauccacccuaucacaauugguaaaugcccaaaguauguaaaguccaccaaacuccgccuggccacugggcuuagaaacgugcccucaauacagaguaggggacuguuuggcgcgaucgccggcuucauugaagggggauggacagguauggucgacggcugguacggguaucaucaccaaaaugaacagggaagcggcuacgcagcugauuugaaguccacccagaacgccaucgacgagauaacgaauaaagugaacucuguuauugagaagaugaauacccaguuuacagcuguggguaaagaguucaaccaccucgagaagcggaucgaaaaucugaacaagaaagucgaugacggguucuuagauaucuggacuuacaaugccgagcugcucgugcuucuggaaaacgagcgcaccuuggacuaucaugauagcaauguaaagaaccuauacgagaaaguucgaucacaacugaagaacaaugcaaaagaagugggcaacggauguuuugaguucuaucacaagugcgacaauacauguauggaaagugucaagaacggcacuuacgauuauccuaaauacuccgaggaagccaagcucaauagagaggagauugacggggugaaacuggaaagcaccaggaucuaucagauucuugcuauauacucuacagcggcaucaagucuggucuuggugguuagccucggagccaucuccuuuuggaugugcucuaacgguucgcugcagugccggauuuguaucuga

SEQ ID NO: 134569 - RNA, 1701 nt, Artificial Sequence; identical to SEQ ID NO: 133270
  derived and/or modified CDS sequence (opt3) from hemagglutinin__InfluenzaA__ADX98640

SEQ ID NO: 134570 - RNA, 1701 nt, Artificial Sequence; identical to SEQ ID NO: 132269
  derived and/or modified CDS sequence (opt3) from hemagglutinin__InfluenzaA__ADX98650

SEQ ID NO: 134571 - RNA, 1701 nt, Artificial Sequence
  derived and/or modified CDS sequence (opt3) from hemagglutinin__InfluenzaA__ADX98665
augaaggccauccuggugguccuccuuuacaccuucgcuacagcaaacgccgacacucugugcauuggcuaucacgcgaauaacagcacggauaccguugacacaguguuggagaaaaauguaacugugacccauuccgucaacuuacuggaagauaagcacaaugggaaacuauguaagcucagaggaguggcuccccugcaucuugguaaaugcaacauagccggcuggauccuggggaauccugagugugaaucuuugucaacagcaaguagcugguccuacauuguugagaccucuucgucaggaaacggcacuugcuauccaggugacuuuaucgauuacgaagaacucagggagcagcugagcaguguguccucuuucgaacgguuugagauuuucccgaagacaagcuccuggcccaaucacgacucaaacaagggggucaccgccgcuuguccucaugcaggagccaaaaguuuuuauaagaaucugaucuggcucgugaaaaagggcaacagcuacccaaaauuaucuaaguccuauauaaaugauaagggcaaagaaguacugguucuuugggggauccaccaccccucaacgagcgcugaccaacagaguuuguaccagaacgccgaugcguacguguucgucggaacuucucgcuauuccaagaaauuuaagccugagauugcaauccgaccaaaagugcgugaccaggaggguagaaugaauuacuauuggacccugguggaacccggcgauaagauuacauucgaggccacugggaaccuagucguuccuagguacgcuuuugccauggaacggaacgcaggaagcggcaucauaauuucggacaccccagugcaugauugcaauacaaccugucaaacgccgaaaggugcuaucaacacuucucuccccuuccagaauauucacccuaucacaaucgggaagugcccaaaguauguaaaauccaccaagcugcgccuugccacuggacugagaaacgugcccucaauucagaguaggggcuuguuuggcgcgauagccggguucaucgagggagguuggacaggcauggucgacgggugguacggauaucaucaccagaaugaacaaggcagcgguuacgcagcugaccucaaauccacccagaacgccauugaugagaucacgaauaaggugaacucuguuauagagaaaaugaauacccaguuuacagcuguggggaaggaguucaaccaccuggagaagcggauugaaaauuuaaacaaaaaggucgacgauggcuuccuggacaucuggacuuacaaugccgagcuccuugugcuguuggaaaacgagcgcacccuagauuaucaugacagcaauguaaagaaccuguacgagaagguucgaucacagcucaaaaacaaugcaaaggaaaucggaaacggcuguuuugaguucuaucacaagugcgauaauacauguauggaaagugugaaaaacgggacuuacgacuauccuaaguacuccgaggaagccaaacugaauagagaggagauugauggagucaaacuugaaagcaccaggaucuaucaaauucuggcuauauacucuacagcggcaucaaguuuggugcucgucgugagccugggugccaucuccuuuuggaugugcucuaacggcucguuacagugccggauuuguaucuga

SEQ ID NO: 134572 - RNA, 1701 nt, Artificial Sequence; identical to SEQ ID NO: 131881
  derived and/or modified CDS sequence (opt3) from hemagglutinin__InfluenzaA__ADX98675

SEQ ID NO: 134573 - RNA, 1701 nt, Artificial Sequence; identical to SEQ ID NO: 131881
  derived and/or modified CDS sequence (opt3) from hemagglutinin__InfluenzaA__ADX98695

SEQ ID NO: 134574 - RNA, 1701 nt, Artificial Sequence; identical to SEQ ID NO: 132269
  derived and/or modified CDS sequence (opt3) from hemagglutinin__InfluenzaA__ADX98729

SEQ ID NO: 134575 - RNA, 1701 nt, Artificial Sequence; identical to SEQ ID NO: 133600
  derived and/or modified CDS sequence (opt3) from hemagglutinin__InfluenzaA__ADX98739

SEQ ID NO: 134576 - RNA, 1701 nt, Artificial Sequence; identical to SEQ ID NO: 133349
  derived and/or modified CDS sequence (opt3) from hemagglutinin__InfluenzaA__ADX98748

SEQ ID NO: 134577 - RNA, 1701 nt, Artificial Sequence; identical to SEQ ID NO: 130717
  derived and/or modified CDS sequence (opt3) from hemagglutinin__InfluenzaA__ADX98758

SEQ ID NO: 134578 - RNA, 1701 nt, Artificial Sequence; identical to SEQ ID NO: 131070
  derived and/or modified CDS sequence (opt3) from hemagglutinin__InfluenzaA__ADX98767

SEQ ID NO: 134579 - RNA, 1701 nt, Artificial Sequence; identical to SEQ ID NO: 132314
  derived and/or modified CDS sequence (opt3) from hemagglutinin__InfluenzaA__ADX98777

SEQ ID NO: 134580 - RNA, 1701 nt, Artificial Sequence
  derived and/or modified CDS sequence (opt3) from hemagglutinin__InfluenzaA__ADX98785
augaaggccauccuggugguccuccuuuacacccuggcuacagcaaacgccgacacuuugugcauuggcuaucacgcgaauaacagcacggauaccguugacacaguguuagagaaaaauguaacugugacccauuccgucaaccugcuagaagauaagcacaaugggaaacucuguaagcugagaggaauagcuccccuucaucuggguaaaugcaacaucgccggcuggauuuuggggaauccugagugugaaucucucucaacagcaaguagcugguccuacaucguggagaccucuucgucagacaacggaacuugcuauccaggcgauuucauugacuacgaggagcugagggagcagcugagcaguguuuccucuuuugaacgguucgagaucuuuccgaagacaagcuccuggcccaaucacgauucaaacaagggugugaccgccgcuuguccucaugcaggggccaaaaguuucuauaagaaucucauaugguuagucaaaaagggaaacagcuacccaaaacugucuaaguccuauaucaaugacaagggcaaagaagugcuuguauuguggggcauucaccaccccucaacgagcgcugaucaacagagucuguaccagaacgccgacgcguacguuuuuguggggacuucucgcuauuccaagaaauucaagccugagaucgcaauucgaccaaaaguccgugaucaggagggaagaaugaauuacuauuggacccuaguggaacccggugacaagaucacauuugaggccacuggcaaccucguggucccuagguacgcuuucgccauggaacggaacgcagggagcggaauaauuaucucggauaccccaguucaugacugcaauacaaccugucaaacgccgaaaggcgcuauuaacacuucucugcccuuucagaauauccacccuaucacaauugguaagugcccaaaguaugugaaauccaccaaacuucgccuggccacuggguugagaaacguacccucaauacagaguaggggacucuucggcgcgaucgccggcuuuauugaagggggauggacagguaugguggacggcugguacggguaucaucaccagaaugaacaaggaagcggcuacgcagcugaucugaaguccacccagaacgccaucgacgagauaacgaauaaggucaacucugugauugagaaaaugaauacccaguucacagcuguugguaaggaauuuaaccacuuagagaagcggaucgaaaaucugaacaaaaagguggaugacggguuccucgauaucuggacuuacaaugccgagcuucuggucuugcuagaaaacgagcgcacccuggacuaucaugauagcaaugugaaaaaccucuacgagaagguacgaucacagcugaaaaacaaugcaaaggaaauuggcaacggauguuucgaguuuuaucacaagugcgacaauacauguauggaaaguguuaaaaacggcacuuacgauuauccuaaguacuccgaggaagccaaacuuaauagagaggagaucgggggagugaagcuggaaagcaccaggauuuaucaaauauuggcuaucuacucuacagucgcgucaagucucgugcuggucgugagcuuaggugcaauuuccuucuggaugugcucuaacggcucgcugcagugccggaucuguaucuga

SEQ ID NO: 134581 - RNA, 1701 nt, Artificial Sequence; identical to SEQ ID NO: 131818
  derived and/or modified CDS sequence (opt3) from hemagglutinin__InfluenzaA__ADX98792

SEQ ID NO: 134582 - RNA, 1701 nt, Artificial Sequence; identical to SEQ ID NO: 131818
  derived and/or modified CDS sequence (opt3) from hemagglutinin__InfluenzaA__ADX98806

SEQ ID NO: 134583 - RNA, 1701 nt, Artificial Sequence; identical to SEQ ID NO: 133758
  derived and/or modified CDS sequence (opt3) from hemagglutinin__InfluenzaA__ADX98818

SEQ ID NO: 134584 - RNA, 1701 nt, Artificial Sequence; identical to SEQ ID NO: 130717
  derived and/or modified CDS sequence (opt3) from hemagglutinin__InfluenzaA__ADX98828

SEQ ID NO: 134585 - RNA, 1701 nt, Artificial Sequence; identical to SEQ ID NO: 134108
  derived and/or modified CDS sequence (opt3) from hemagglutinin__InfluenzaA__ADX98843

SEQ ID NO: 134586 - RNA, 1701 nt, Artificial Sequence
  derived and/or modified CDS sequence (opt3) from hemagglutinin__InfluenzaA__ADX98853
augaaggccauccuggugguccuccuuuacaccuucgcuacagcaaacgccgacacucugugcauuggcuaucacgcgaauaacagcacggauaccguugacacaguguuggagaaaaauguaacugugacccauuccgucaacuuacuggaagauaagcacaaugggaaacuauguaagcucagaggaguggcuccccugcaucuugguaaaugcaacauagccggcuggauccuggggaauccugagugugaaucuuugucaauugcaaguagcugguccuacaucguugagacaucuucgucagacaacggaaccugcuauccaggcgauuuuauugacuacgaggagcucagggagcagcugagcaguguguccucuuucgaacgguuugagaucuucccgaagacuagcuccuggcccaaucacgauucaaacaagggugucacagccgcuuguccucaugcaggggccaaaaguuuuuauaagaaucugauauggcucgugaaaaagggaaacagcuacccaaaauuaucuaaguccuauaucaaugacaagggcaaagaaguacugguucuuuggggcauucaccaccccucaaccagcgcugaucaacagaguuuguaccagaacgccgacgcguacguguucgucgggacgucucgcuauuccaagaaauuuaagccugagaucgcaauucgaccaaaagugcgugaucaggagggaagaaugaauuaccauuggacucugguggaacccggugacaagaucaccuucgaggccacaggcaaccuagucguuccuagguaugcuuuugccauggaacggaacgcagggagcggaauaauuaucucggauacuccagugcacgacugcaauaccacaugucaaaccccgaaaggcgcuauuaacacgucucuccccuuccagaauauccauccuaucacuauugguaagugcccaaaguacguaaaauccacaaagcugcgccuugccaccgggcugagaaacgugcccucaauacagaguaggggauuguuuggcgcgaucgccggcuucauugaagggggauggacugguauggucgacggcugguauggguaccaccaccagaaugaacaaggaagcggcuaugcagcugaucucaaauccacacagaacgccaucgacaagauaaccaauaaagugaacucuguuauugagaagaugaauacgcaguuuaccgcuguggguaaggaguucaaccaucuggaaaaacggaucgagaauuuaaacaagaaagucgaugacggguuccuggauaucuggacauacaaugccgaacuccuugugcuguuggagaacgaacgcacucuagacuaccacgauagcaauguaaagaaccuguaugagaaaguucgaucacagcucaagaacaaugcaaaggagauuggcaacggauguuuugaguucuaccauaaaugcgacaauaccuguauggaaagugugaagaacggcacauaugauuacccuaaauauuccgaagaggccaagcugaauagagaagagaucgacggggucaaacuugagagcacuaggauuuaccaaauacuggcuaucuauucuaccguggcgucaaguuugguccucgugguuagccugggagcaauuuccuuuuggaugugcucuaacgguucguuacagugccggaucuguaucuga

SEQ ID NO: 134587 - RNA, 1701 nt, Artificial Sequence; identical to SEQ ID NO: 131881
  derived and/or modified CDS sequence (opt3) from hemagglutinin__InfluenzaA__ADX98860

SEQ ID NO: 134588 - RNA, 1701 nt, Artificial Sequence; identical to SEQ ID NO: 133269
  derived and/or modified CDS sequence (opt3) from hemagglutinin__InfluenzaA__ADX98870

SEQ ID NO: 134589 - RNA, 1701 nt, Artificial Sequence
  derived and/or modified CDS sequence (opt3) from hemagglutinin__InfluenzaA__ADX98880
augaaggccauccuggugguccuccuuuacaccuucgcuacagcaaacgccgacacucugugcauuggcuaucacgcgaauaacagcacggauaccguugacacaguguuggagaagaauguaacugugacccauuccgucaacuuacuggaagauaagcacaaugggaaacuauguaagcucagaggaguggcuccccugcaucuugguaaaugcaacauagccggcuggauccuggggaauccugagugugaaucuuugucaacagcaaguagcugguccuacauuguugagaccucuucgucagacaacggaacuugcuauccaggcgauuuuaucgacuacgaggagcucagggagcagcugagcaguguguccucuuucgaacgguuugagauuuucccgaagacaagcuccuggcccaaucacgauucaaacaagggugucaccgccgcuuguccucaugcaggggccaaaaguuuuuauaagaaucugaucuggcucgugaaaaagggaaacagcuacccaaaauuaucuaaguccuauauaaaugacaagggcaaagaaguacugguucuuuggggcauccaccaccccucaacgagcgcugaucaacagaguuuguaccagaacgccgacgcguacguguucgucgggacuucucgcuauuccaagaaauuuaagccugagauugcaauccgaccaaaagugcgugaucaggagggaagaaugaauuacuauuggacccugguggaacccggugacaagauuacauucgaggccacuggcaaccuagucguuccuagguacgcuuuugccauggaacggaacgcagggagcggaaucauaauuucggauaccccagugcaugacugcaauacaaccugucaaacgccgaaaggcgcuaucaacacuucucuccccuuccagaauauucacccuaucacaaucgguaagugcccaaaguauguaaaauccaccaagcugcgccuugccacugggcugagaaacgugcccucaauucagaguaggggauuguuuggcgcgauagccggcuucaucgaagggggauggacagguauggucgacggcugguacggguaucaucaccagaaugaacaaggaagcggcuacgcagcugaucucaaauccacccagaacgccauugacgagaucacgaauaaggugaacucuauaauugagaaaaugaauacccaguuuacagcuguugguaaggaguucaaccaccuggaaaagcggaucgaaaauuuaaacaaaaagguggaugacggguuccuggauaucuggacuuacaaugccgagcuccuuguccuguuggaaaacgagcgcacccuagacuaucaugauagcaaugugaaaaaccuguacgagaagguacgaucacagcucaaaaacaaugcaaaggaaauuggcaacggauguuuugaguucuaucacaagugcgacaauacauguauggaaaguguuaaaaacggcacuuacgauuauccuaaguacuccgaggaagccaaacugaauagagaggagaucgacggggugaaacuugaaagcaccaggauuuaucaaauacuggcuaucuacucuacagucgcgucaaguuuggugcucgucgugagccugggagcaauuuccuuuuggaugugcucuaacgguucguuacagugccggaucuguaucuga

SEQ ID NO: 134590 - RNA, 1701 nt, Artificial Sequence
  derived and/or modified CDS sequence (opt3) from hemagglutinin__InfluenzaA__ADX98890
augaaggccauccuggugguccuccuuuacaccuucgcuacagcaaacgccgacacucugugcauuggcuaucacgcgaauaacagcacggauaccguugacacaguguuggagaaaaauguaacugugacccauuccgucaacuuacuggaagauaagcacaaugggaaacuauguaagcucagaggaguggcuccccugcaucuugguaaaugcaacauagccggcuggauccuggggaauccugagugugaaucuuugucaacagcaaguagcugguccuacauuguugagaccucuucgucagacaacggaacuugcuauccaggcgauuuuaucgacuacgaagaacucagggagcagcugagcaguguguccucuuucgaacgguuugagauuuucccgaagacaagcuccuggcccaaucacgauucaaacaagggugucaccgccgcuuguccucaugcaggggccaaaaguuuuuauaagaaucugaucuggcucgugaaaaagggaaacagcuacccaaaauuaucuaaguccuauauaaaugacaagggcaaagaaguacugguucuuuggggcauccaccaccccucaacgagcgcugaucaacagaguuuguaccagaacgccgacgcguacguguucgucgggacuucucgcuauuccaagaaauuuaagccugagauugcaauccgaccaaaagugcgugaucaggagggaagaaugaauuacuauuggacccugguggaacccggugacaagauuacauucgaggccacuggcaaccuagucguuccuagguacgcuuuugccauggaacggaacgcagagagcgggaucauaauuucggauaccccagugcaugacugcaauacaaccugucaaacgccgaaaggagcuaucaacacuucucuccccuuccagaauauucacccuaucacaaucggcaagugcccaaaguauguaaaauccaccaagcugcgccuugccacuggucugagaaacgugcccucaauucagaguaggggguuguuuggagcgauagccggcuucaucgaaggcggguggacaggaauggucgacgguugguacggcuaucaucaccagaaugagcaagggagcggauacgcagcugaucucaaauccacccagaacgccauugacaagaucacgaauaaagugaacucuguuauagagaagaugaauacccaguuuacagcugugggcaaggaguucaaccaccuggagaaacggauugaaaauuuaaacaagaaagucgaugacgguuuccuggauaucuggacuuacaaugccgagcuccuugugcuguuggaaaacgagcgcacccuagacuaucaugauagcaauguaaagaaccuguacgagaaaguucgaucacagcucaagaacaaugcaaaggaaaucgggaacggcuguuuugaguucuaucacaaaugcgacaauacauguauggaaagugugaagaacggaacuuacgauuauccuaaauacuccgaggaagccaagcugaauagagaggagauugacggcgucaaacuugaaagcaccaggaucuaucaaauucuggcuauauacucuacaguggcgucaaguuugguccucgugguuagccugggggcaaucuccuuuuggaugugcucuaacggaucguuacagugccggauuuguaucuga

SEQ ID NO: 134591 - RNA, 1701 nt, Artificial Sequence; identical to SEQ ID NO: 132269
  derived and/or modified CDS sequence (opt3) from hemagglutinin__InfluenzaA__ADX98900

SEQ ID NO: 134592 - RNA, 1701 nt, Artificial Sequence
  derived and/or modified CDS sequence (opt3) from hemagglutinin__InfluenzaA__ADX98910
augaaggccauccuggugguccuccuuuacaccuucgcuacagcaaacgccgacacucugugcauuggcuaucacgcgaauaacagcacggauaccguugacacaguguuggagaaaaauguaacugugacccauuccgucaacuuacuggaagauaagcacaaugggaaacuauguaagcucagaggaguggcuccccugcaucuugguaaaugcaacauagccggcuggauccuggggaauccugagugugaaucuuugucaacagcaauuaguuggagcuacaucguugagaccuccucuucggacaacggaacuugcuauccaggcgauuuuauugacuacgaggagcucagggagcagcugucaagcgugaguuccuucgaacgguuugagaucuucccgaagacaucuagcuggcccaaucacgauuccaacaagggugucaccgccgcuuguccucaugcaggggccaaaucauuuuauaagaaucugauauggcucgugaaaaagggaaacaguuacccaaaauuaagcaagucuuauaucaaugacaagggcaaagaaguacugguucuuuggggcauucaccaccccuccacgucagcugaucaacagagcuuguaccagaacgccgacgcguacguguucgucgggaccagucgcuauucuaagaaauuuaagccugagaucgcaauucgaccaaaagugcgugaucaggagggaagaaugaauuacuauuggacucugguggaacccggugacaagaucacauucgaggccacuggcaaccuagucguuccuagguacgcuuuugccauggaacggaacgcaggguccggaauaauuaucagcgauaccccagugcaugacugcaauacaaccugucaaacgccgaaaggcgcuauuaacacuucgcuccccuuccagaauauccacccuaucacaauugguaagugcccaaaguauguaaaaucuaccaagcugcgccuugccacugggcugagaaacgugcccuccauacagucaaggggauuguuuggcgcgaucgccggcuucauugaagggggauggacagguauggucgacggcugguacggguaucaucaccagaaugaacaaggaaguggcuacgcagcugaucucaaaagcacccagaacgccaucgacaagauaacgaauaaagugaacuccguuauugagaagaugaauacccaguuuacagcuguggguaaggaguucaaccaccuggaaaaacggaucgagaauuuaaacaagaaagucgaugacggguuccuggauaucuggacuuacaaugccgaacuccuugugcuguuggagaacgaacgcacccuagacuaucaugauucuaauguaaagaaccuguacgagaaaguucgaagccagcucaagaacaaugcaaaggagauuggcaacggauguuuugaguucuaucacaaaugcgacaauacauguauggaaucagugaagaacggcacuuacgauuauccuaaauacagugaagaggccaagcugaauagagaagagaucgacggggucaaacuugaguccaccaggauuuaucaaauacuggcuaucuacagcacaguggcgucuucauugguccucgugguuagucugggagcaauuagcuuuuggaugugcuccaacgguucuuuacagugccggaucuguaucuga

SEQ ID NO: 134593 - RNA, 1701 nt, Artificial Sequence; identical to SEQ ID NO: 132269
  derived and/or modified CDS sequence (opt3) from hemagglutinin__InfluenzaA__ADX98920

SEQ ID NO: 134594 - RNA, 1701 nt, Artificial Sequence; identical to SEQ ID NO: 131881
  derived and/or modified CDS sequence (opt3) from hemagglutinin__InfluenzaA__ADX98930

SEQ ID NO: 134595 - RNA, 1701 nt, Artificial Sequence; identical to SEQ ID NO: 131508
  derived and/or modified CDS sequence (opt3) from hemagglutinin__InfluenzaA__ADX98940

SEQ ID NO: 134596 - RNA, 1701 nt, Artificial Sequence; identical to SEQ ID NO: 133337
  derived and/or modified CDS sequence (opt3) from hemagglutinin__InfluenzaA__ADX98950

SEQ ID NO: 134597 - RNA, 1701 nt, Artificial Sequence; identical to SEQ ID NO: 133318
  derived and/or modified CDS sequence (opt3) from hemagglutinin__InfluenzaA__ADX98960

SEQ ID NO: 134598 - RNA, 1701 nt, Artificial Sequence
  derived and/or modified CDS sequence (opt3) from hemagglutinin__InfluenzaA__ADX98970
augaaggccauccuggugguccuccuuuacaccuucgcuacagcaaacgccgacacucugugcauuggcuaucacgcgaauaacagcacggauaccguugacacaguguuggagaaaaauguaacugugacccauuccgucaacuuacuggaagauaagcacaaugggaaacuauguaagcucagaggaguggcuccccugcaucuugguaaaugcaacauagccggcuggauccuggggaauccugagugugaaucuuugucaacagcaaguagcugguccuacauuguugagaccucuucgucagacaacggaacuugcuauccaggcgauuuuaucgacuacgaagaacucagggagcagcugagcaguguguccucuuucgaacgguuugagauuuucccgaagacaagcuccuggcccaaucacgauucaaacaagggugucaccgccgcuuguccucaugcaggggccaaaaguuuuuauaagaaucugaucuggcucgugaaaaagggaaacagcuacccaaaauuaucuaaguccuauauaaaugacaagggcaaagaaguacugguucuuuggggcauccaccaccccucaacgagcgcugaucaacagggguuguaccagaacgccgacgcguacguguucgucggaaccagucgcuauucuaagaaauuuaagccugagauugcaauccgaccaaaagugcgugaucaggaggguagaaugaauuacuauuggacucugguggaacccggcgacaagauuacauucgaggccacugggaaccuagucguuccuagguacgcuuuugccauggaacggaacgcaggauccggcaucauaauuagcgauaccccagugcaugacugcaauacaaccugucaaacgccgaaaggugcuaucaacacuucgcuccccuuccagaauauucacccuaucacaaucgggaagugcccaaaguauguaaaaucuaccaagcugcgccuugccacuggacugagaaacauucccuccauacagucaaggggcuuguuuggcgcgaucgccggguucauugagggagguuggacaggcaugguggacgggugguacggauaucaucaccagaaugaacaaggcagugguuacgcagcugaucucaaaagcacccagaacgccaucgacaagauaacgaauaaagucaacuccgugauugagaagaugaauacccaguuuacagcuguugggaaggaguucaaccaccuggaaaaacggaucgagaauuuaaacaagaaaguggaugacggcuuccuggauaucuggacuuacaaugccgaacuccuuguccuguuggagaacgaacgcacccuagacuaucaugauucuaaugugaagaaccuguacgagaaaguacgaagccagcucaagaacaaugcaaaggagauuggaaacggcuguuuugaguucuaucacaaaugcgacaauacauguauggagucaguuaagaacgggacuuacgauuauccuaaauacagugaagaggccaagcugaauagagaagagaucgacggagugaaacuugaguccaccaggauuuaucaaauacuggcuaucuacagcacagucgcgucuucauuggugcucgucgugagucugggugcaauuagcuuuuggaugugcuccaacggcucuuuacagugccggaucuguaucuga

SEQ ID NO: 134599 - RNA, 1701 nt, Artificial Sequence; identical to SEQ ID NO: 131818
  derived and/or modified CDS sequence (opt3) from hemagglutinin__InfluenzaA__ADX98980

SEQ ID NO: 134600 - RNA, 1701 nt, Artificial Sequence; identical to SEQ ID NO: 130717
  derived and/or modified CDS sequence (opt3) from hemagglutinin__InfluenzaA__ADX98990

SEQ ID NO: 134601 - RNA, 1701 nt, Artificial Sequence; identical to SEQ ID NO: 131881
  derived and/or modified CDS sequence (opt3) from hemagglutinin__InfluenzaA__ADX99000

SEQ ID NO: 134602 - RNA, 1698 nt, Artificial Sequence
  derived and/or modified CDS sequence (opt3) from hemagglutinin__InfluenzaA__ADX99581
augaaggccaaccugcucgugcuucugagcgcuuuggcagccgcggacgcugauaccaucugcauuggcuaccacgccaauaacuccacagacacugucgauacgguuuuagagaaaaaugugaccguaacacauucugugaaccugcuagaagacucacacaaugggaagcucuguagacugaaaggaauagcaccccuucagcuggguaagugcaacaucgccggcugguugcucgggaauccugagugugauccacugcugccggucaggaguuggagcuauauuguggaaacucccaacuccgagaauggaaucugcuacccuggcgacuucauugauuaugaagaacuccgggagcaauuaucuucgguuaguagcuuugaacgcuucgagaucuuuccaaaagaaaguuccuggcccaaccauaauaccaacggugugacagcugcauguucucacgagggaaagagcuccuucuaccgaaaucugcuuugguugaccgagaaggaagggucauauccuaaacugaagaacaguuacgucaauaaaaagggcaaagaggugcuaguacucuggggcauacaucacccacccaacagcaaggaacagcagaaccuguaucagaaugagaacgccuacguuucuguggucacuuccaauuacaaccguagauuuacaccugaaaucgcugagaggccaaaggugcgggaccaagccgggcgcaugaauuauuacuggacccuucugaaaccgggagauacgauuaucuucgaggcgaacgguaauuugauugcacccauguaugccuuugcucucucaagaggcuucgggagcggaaucauaacuucaaacgccucuaugcacgaaugcaauaccaagugucagacaccucugggcgcaauuaacuccagcuuaccauaccagaauauccaucccgugacuauuggugagugcccuaaauaugucaggucggcuaagcugcggaugguuaccgggcuccgcaacacaccaucuauccagucccgaggacuuuuuggcgccaucgcgggcuucauugaagggggauggaccgguaugauagacggcugguacggguaucaccaucaaaaugagcagggaucaggcuacgccgcagaucagaaaaguacgcagaacgcuaucaaugguauuacuaacaaggugaacacaguaaucgagaaaaugaauauacaauuuaccgccguggggaaggaguucaacaagcuggagaaaagaauggaaaauuugaacaagaaagucgacgauggcuuucuagacauuuggacuuacaaugcugagcugcucgugcugcuugaaaacgagaggacacuggacuuccacgauagcaauguuaagaacuuguaugaaaaagugaagucccagcucaagaauaacgccaaagagaucggaaauggcuguuucgaguuuuaccacaagugcgacaacgaauguauggagucuguccggaaugggaccuaugauuaccccaaauauagcgaagagucaaagcugaaccgugagaaaguggacggaguaaaguuagaaaguauggguaucuaccagauucuggcaaucuauuccacgguugccagcucucuagugcuccuggucucacuuggcgcuauuaguuucuggaugugcagcaauggguccuugcaaugccgcauauguaucuga

SEQ ID NO: 134603 - RNA, 1698 nt, Artificial Sequence; identical to SEQ ID NO: 134602
  derived and/or modified CDS sequence (opt3) from hemagglutinin__InfluenzaA__ADX99592

SEQ ID NO: 134604 - RNA, 1698 nt, Artificial Sequence; identical to SEQ ID NO: 134602
  derived and/or modified CDS sequence (opt3) from hemagglutinin__InfluenzaA__ADX99603

SEQ ID NO: 134605 - RNA, 1698 nt, Artificial Sequence
  derived and/or modified CDS sequence (opt3) from hemagglutinin__InfluenzaA__ADX99614
augaaggccaaccugcucgugcuucugagcgcuuuggcagccgcggacgcugauaccaucugcauuggcuaccacgccaauaacuccacagacacugucgauacgguuuuagagaaaaaugugaccguaacacauucugugaaccugcuagaagacucacacaaugggaagcucuguagacugaaaggaauagcaccccuucagcuggguaagugcaacaucgccggcugguugcucgggaauccugagugugauccacugcugccggucaggaguuggagcuauauuguggaaacucccaacuccgagaauggaaucugcuacccuggcgacuucauugauuaugaggagcuccgggagcaauuaucuucgguuaguagcuuugaacgcuucgagaucuuuccaaaagaaaguuccuggcccaaccauaauaccaacggugugacagcugcauguucucacgagggaaagagcuccuucuaccgaaaucugcuuugguugaccgagaagaaagggucauauccuaagcugaaaaacaguuacgucaauaagaaaggcaaggaagugcuaguacucuggggcauacaucacccacccaacagcaaggagcagcagaaccuguaucagaaugaaaacgccuacguuucuguggucacuuccaauuacaaccguagauuuacaccugagaucgcugaaaggccaaaagugcgggaccaagccgggcgcaugaauuauuacuggacccuucugaagccgggagauacgauuaucuucgaggcgaacgguaauuugauugcacccauguaugccuuugcucucucaagaggcuucgggagcggaaucauaacuucaaacgccucuaugcacgagugcaauaccaaaugucagacaccucugggcgcaauuaacuccagcuuaccauaccagaauauccaucccgugacuauuggugaaugcccuaaguaugucaggucggcuaaacugcggaugguuaccgggcuccgcaacacaccaucuauccagucccgaggacuuuuuggcgccaucgcgggcuucauugaagggggauggaccgguaugauagacggcugguacggguaucaccaucaaaaugaacagggaucaggcuacgccgcagaucagaagaguacgcagaacgcuaucaaugguauuacuaacaaagugaacacaguaaucgagaagaugaauauacaauuuaccgccguggggaaggaguucaacaaacuggaaaagagaauggagaauuugaacaaaaaggucgacgauggcuuucuagacauuuggacuuacaaugcugaacugcucgugcugcuugagaacgaaaggacacuggacuuccacgauagcaauguuaaaaacuuguaugagaaggugaagucccagcucaaaaauaacgccaaggaaaucggaaauggcuguuucgaguuuuaccacaaaugcgacaacgaguguauggaaucuguccggaaugggaccuaugauuaccccaaguauagcgaggaaucaaaacugaaccgugagaagguggacggaguaaaguuagagaguauggguaucuaccagauucuggcaaucuauuccacgguugccagcucucuagugcuccuggucucacuuggcgcuauuaguuucuggaugugcagcaauggguccuugcaaugccgcauauguaucuga

SEQ ID NO: 134606 - RNA, 1698 nt, Artificial Sequence
  derived and/or modified CDS sequence (opt3) from hemagglutinin__InfluenzaA__ADX99625
augaaggccaaccugcucgugcuucugagcgcuuuggcagccgcggacgcugauaccaucugcauuggcuaccacgccaauaacuccacagacacugucgauacgguuuuagagaaaaaugugaccguaacacauucugugaaccugcuagaagacucacacaaugggaagcucuguagacugaaaggaauagcaccccuucagcuggguaagugcaacaucgccggcugguugcucgggaauccugagugugauccacugcugccggucaggaguuggagcuauauuguggaaacucccaacuccgagaauggaaucugcuacccuggcgacuucauugauuaugaagaacuccgggagcaauuaucuucgguuaguagcuuugaacgcuucgagaucuuuccaaaagaaaguuccuggcccaaccauaauaccaacggugugacagcugcauguucucacgagggaaagagcuccuucuaccgaaaucugcuuugguugaccgagaaggaagggucauauccuaaacugaagaacaguuacgucaauaaaaagggcaaagaggugcuaguacucuggggcauacaucacccacccaacagcaaggaacagcagaaccuguaucagaaugagaacgccuacguuucuguggucacuuccaauuacaaccguagauuuacaccugaaaucgcugagaggccaaaggugcgggaccaagccgggcgcaugaauuauuacuggacccuucugaaaccgggagauacgauuaucuucggugcgaacggcaauuugauugcacccauguaugccuuugcucucucaagaggguucggaagcggcaucauaacuucaaacgccucuaugcacgagugcaauaccaagugucagacaccucugggugcaauuaacuccagcuuaccauaccagaauauccaucccgugacuauuggggaaugcccuaaauaugucaggucggcuaagcugcggaugguuaccggacuccgcaacacaccaucuauccagucccgaggccuuuuuggcgccaucgcgggguucauugagggagguuggaccggcaugauagacgggugguacggauaucaccaucaaaaugaacagggcucagguuacgccgcagaucagaaaaguacgcagaacgcuaucaaugggauuacuaacaaggugaacacaguaaucgagaaaaugaauauacaauuuaccgccgugggcaaggaguucaacaagcuggagaaaagaauggagaauuugaacaagaaagucgacgauggauuucuagacauuuggacuuacaaugcugaacugcucgugcugcuugagaacgaaaggacacuggacuuccacgauagcaauguuaagaacuuguaugagaaagugaagucccagcucaagaauaacgccaaagaaaucggcaauggguguuucgaguuuuaccacaagugcgacaacgaguguauggaaucuguccggaauggaaccuaugauuaccccaaauauagcgaggaaucaaagcugaaccgugagaaaguggacgguguaaaguuagagaguaugggcaucuaccagauucuggcaaucuauuccacgguugccagcucucuagugcuccuggucucacuuggggcuauuaguuucuggaugugcagcaauggauccuugcaaugccgcauauguaucuga

SEQ ID NO: 134607 - RNA, 1698 nt, Artificial Sequence
  derived and/or modified CDS sequence (opt3) from hemagglutinin__InfluenzaA__ADX99636
augaaggccaaccugcucgugcuucugagcgcuuuggcagccgcggacgcugauaccaucugcauuggcuaccacgccaauaacuccacagacacugucgauacgguuuuagagaaaaaugugaccguaacacauucugugaaccugcuagaagacucacacaaugggaagcucuguagacugaaaggaauagcaccccuucagcuggguaagugcaacaucgccggcugguugcucgggaauccugagugugauccacugcugccggucaggaguuggagcuauauuguggaaacucccaacuccgagaauggaaucugcuacccuggcgacuucauugauuaugaggagcuccgggagcaauuaucuucgguuaguagcuuugaacgcuucgagaucuuuccaaaagaaaguuccuggcccaaccauaauaccaacggugugacagcugcauguucucacgagggaaagagcuccuucuaccgaaaucugcuuugguugaccaagaaagaggggucauauccuaagcugaaaaacaguuacgucaauaagaaaggcaaggaagugcuaguacucuggggcauacaucacccacccaacagcaaggagcagcagaaccuguaucagaaugaaaacgccuacguuucuguggucacuuccaauuacaaccguagauuuacaccugagaucgcugaaaggccaaaagugcgggaccaagccgggcgcaugaauuauuacuggacccuucugaagccgggagauacgauuaucuucgaggcgaacgguaauuugauugcacccauguaugccuuugcucucucaagaggcuucgggagcggaaucauaacuucaaacgccucuaugcacgagugcaauaccaaaugucagacaccucugggcgcaauuaacuccagcuuaccauaccagaauauccaucccgugacuauuggugaaugcccuaaguaugucaggucggcuaaacugcggaugguuaccgggcuccgcaacacaccaucuauccagucccgaggacuuuuuggcgccaucgcgggcuucauugaagggggauggaccgguaugauagacggcugguacggguaucaccaucaaaaugaacagggaucaggcuacgccgcagaucagaagaguacgcagaacgcuaucaaugguauuacuaacaaagugaacacaguaaucgagaagaugaauauacaauuuaccgccguggggaaggaguucaacaaacuggaaaagagaauggagaauuugaacaaaaaggucgacgauggcuuucuagacauuuggacuuacaaugcugaacugcucgugcugcuugagaacgaaaggacacuggacuuccacgauagcaauguuaaaaacuuguaugagaaggugaagucccagcucaaaaauaacgccaaggaaaucggaaauggcuguuucgaguuuuaccacaaaugcgacaacgaguguauggaaucuguccggaaugggaccuaugauuaccccaaguauagcgaggaaucaaaacugaaccgugagaagguggacggaguaaaguuagagaguauggguaucuaccagauucuggcaaucuauuccacgguugccagcucucuagugcuccuggucucacuuggcgcuauuaguuucuggaugugcagcaauggguccuugcaaugccgcauauguaucuga

SEQ ID NO: 134608 - RNA, 1698 nt, Artificial Sequence; identical to SEQ ID NO: 131326
  derived and/or modified CDS sequence (opt3) from hemagglutinin__InfluenzaA__ADX99647

SEQ ID NO: 134609 - RNA, 1698 nt, Artificial Sequence
  derived and/or modified CDS sequence (opt3) from hemagglutinin__InfluenzaA__ADX99680
augaaggccaaccugcucgugcuucugugcgcuuuggcagccgcggacgcugauaccaucuguauuggcuaccacgccaauaacagcacagacacugucgauacgguuuuagagaaaaaugugaccguaacacauuccgugaaccugcuagaagacucucacaaugggaagcucugcagacugaaaggaauagcaccccuucagcuggguaaguguaacaucgccggcugguugcucgggaauccugagugcgauccacugcugccggucaggucauggaguuauauuguggaaacucccaacagcgagaauggaaucuguuacccuggcgacuucauugauuaugaagaacuccgggagcaauuauccucuguuucgucauuugaacgcuucgagaucuuuccaaaagaaagcaguugguccaaccauaauaccaacggugugacagcugcaugcucucacgaggggaagaguuccuucuaccgaaaucugcuuugguugaccgagaaggaaggaucauaucccaaacugaagaacaguuacgucaauaaaaagggcaaagaggugcuaguacucuggggcauacaucacccuccaaacagcaaggaacagcagaaccuguaucagaaugagaacgccuacguuucuguggucacuuccaauuacaaccguagauuuacacccgaaaucgcugagaggccuaaggugcgggaccaagccgggcgcaugaauuauuacuggacccuucugaaaccaggagauacgauuaucuucgaggcgaacgguaauuugauugcaccgauguaugccuuugcucucucaagaggcuucgggagcggaaucauaacuagcaacgccucuaugcacgaauguaauaccaagugccagacaccccugggcgcaauuaacuccagcuuaccuuaccagaauauccauccagugacuauuggugagugucccaaauaugucaggucggcuaagcugcggaugguuaccgggcuccgcaacaucccuucuauccagucccgaggacuuuuuggcgccauugcgggcuucauagaagggggauggacagguaugaucgacggcugguacggguaucaccaucaaaaugagcagggaucaggcuacgccgcagaucagaaaaguacccagaacgcuauuaaugguaucacgaacaaggugaacacuguaauagagaaaaugaauauucaauuuacagccguggggaaggaguucaacaagcuggagaaaagaauggaaaauuugaacaagaaagucgacgauggcuuucuagacaucuggaccuacaaugcugagcugcucgugcugcuugaaaacgagaggacucuggacuuccacgauagcaauguuaagaacuuguaugaaaaagugaagucccagcucaagaauaacgccaaagagaucggaaauggcugcuucgaguuuuaccacaagugugacaacgaaugcauggagucuguccggaaugggacauaugauuacccaaaauauagcgaagagucaaagcugaaccgugagaaaguggacggaguaaaguuagaaaguauggguauuuaccagauccuggcaauuuauuccaccguugccagcucucuagugcuccuggucucacuuggcgcuauaaguuucuggaugugcagcaauggguccuugcaaugucgcaucugcauuuga

SEQ ID NO: 134610 - RNA, 1698 nt, Artificial Sequence
  derived and/or modified CDS sequence (opt3) from hemagglutinin__InfluenzaA__ADX99702
augaaggccaaccugcucgugcuucugugcgcuuuggcagccgcggacgcugauaccaucuguauuggcuaccacgccaauaacagcacagacacugucgauacgguuuuagagaaaaaugugaccguaacacauuccgugaaccugcuagaagacucucacaaugggaagcucugcagacugaaaggaauagcaccccuucagcuggguaaguguaacaucgccggcugguugcucgggaauccugagugcgauccacugcugccggucaggucauggaguuauauuguggaaacucccaacagcgagaauggaaucuguuacccuggcgacuucauugauuaugaggaacuccgggagcaauuauccucuguuucgucauuugaacgcuucgagaucuuuccaaaagaaagcaguuggcccaaccauaauaccaacggugugacagcugcaugcucccacgaggggaagucuagcuucuaccgaaaucugcuuugguugaccgagaaggaaggauccuauccuaaacugaagaaaucauacgucaacaagaaaggcaaggaggugcuaguacucuggggcauacaucacccacccaauaguaaggaacagcagaaccuguaucagaacgagaaugccuacguuagcguggucacuucuaacuacaaucguagauuuacaccugaaaucgcugagaggccaaaagugcgggaccaagccgggcgcaugaacuauuacuggacccuucugaagccgggagauacgauuaucuucgaggcgaaugguaacuugauugcacccauguaugccuuugcucucuccagaggcuucgggucaggaaucauaacuagcaaugccaguaugcacgaauguaacaccaaaugccagacaccucugggcgcaauuaauucuuccuuaccauaccagaacauccaucccgugacuauuggugaguguccuaaguaugucaggagcgcuaaacugcggaugguuaccgggcuccgcaauaucccaucgauccagucucgaggacuuuuuggcgccauugcgggcuucauagaagggggauggacagguaugaucgacggcugguacggguaucaccaucaaaacgagcagggauccggcuacgccgcagaucagaagucaacccagaaugcuauuaacgguaucacgaauaaagugaacacuguaauagaaaagaugaacauucaauuuacagccguggggaaggaguucaauaaacuggagaagagaauggaaaacuugaauaaaaaggucgacgauggcuuucuagacaucuggaccuacaacgcugagcugcucgugcugcuugaaaaugagaggacucuggacuuccacgauaguaacguuaaaaauuuguaugaaaaggucaagagccagcucaaaaacaaugccaaggagaucggaaacggcugcuucgaguuuuaccacaaaugugacaaugaaugcauggaguccgugcggaacgggacauaugauuaccccaaguauucugaagagagcaaacugaaucgugagaagguggacggaguaaaguuagaaucaauggguauuuaccagauccuggcaauuuauaguaccguugccuccagccuagugcuccuggucucucuuggcgcuauaucauucuggaugugcaguaacgggagcuugcaaugucgcaucugcauuuga

SEQ ID NO: 134611 - RNA, 1698 nt, Artificial Sequence; identical to SEQ ID NO: 134610
  derived and/or modified CDS sequence (opt3) from hemagglutinin__InfluenzaA__ADX99843

SEQ ID NO: 134612 - RNA, 1698 nt, Artificial Sequence
  derived and/or modified CDS sequence (opt3) from hemagglutinin__InfluenzaA__ADX99854
augaaggccaaccugcucgugcuucugugcgcuuuggcagccgcggacgcugauaccaucuguauuggcuaccacgccaauaacagcacagacacugucgauacgguuuuagagaaaaaugugaccguaacacauuccgugaaccugcuagaagacucucacaaugggaagcucugcagacugaaaggaauagcaccccuucagcuggguaaguguaacaucgccggcugguugcucgggaauccugagugcgauccacugcugccggucaggucauggaguuauauuguggaaacucccaacagcgagaauggaaucuguuacccuggcgacuucauugauuaugaagaacuccgggagcaauuauccucuguuucgucauuugaacgcuucgagaucuuuccaaaagaaagcaguuggcccaaccauaauaccaacggugugacagcugcaugcucccacgaggggaagucuagcuucuaccgaaaucugcuuugguugaccgagaaggaaggauccuaucugaaacuaaagaacucauacgucaauaaaaagggcaaagaggugcucguacuguggggcauacaucacccuccaaacaguaaggaacagcagaaccuuuaucagaaugagaacgccuacguuagcguggucacuucuaauuacaaccguagauuuacacccgaaaucgcugagaggccuaaggugcgggaccaagccgggcgcaugaauuauuacuggacccuguugaaaccaggagauacgauuaucuucgaggcgaacgguaaucucauugcaccgauguaugccuuugcucuguccagaggcuucgggucaggaaucauaacuagcaacgccaguaugcacgaauguaauaccaagugccagacacccuuaggcgcaauuaacucuucccugccuuaccagaauauccauccagugacuauuggugagugucccaaauaugucaggagcgcuaagcuccggaugguuaccgggcuucgcaacaucccuucgauccagucucgaggacuguuuggcgccauugcgggcuucauagaagggggauggacagguaugaucgacggcugguacggguaucaccaucaaaaugagcagggauccggcuacgccgcagaucagaaaucaacccagaacgcuauuaaugguaucacgaacaaggugaacacuguaauagagaaaaugaauauucaauuuacagccguggggaaggaguucaacaaguuggagaaaagaauggaaaaucuaaacaagaaagucgacgauggcuuucuggacaucuggaccuacaaugcugagcuccuggugcuucuggaaaacgagaggacuuuggacuuccacgauaguaauguuaagaaccucuaugaaaaagucaagagccagcugaagaauaacgccaaagagaucggaaauggcugcuucgaguuuuaccacaagugugacaacgaaugcauggaguccgugcggaaugggacauaugauuacccaaaauauucugaagagagcaaguuaaaccgugagaaaguggacggaguaaagcuggaaucaauggguauuuaccagauccuagcaauuuauaguaccguugccuccagccucgugcugcuugucucuuugggcgcuauaucauucuggaugugcaguaaugggagccugcaaugucgcaucugcauuuga

SEQ ID NO: 134613 - RNA, 1698 nt, Artificial Sequence
  derived and/or modified CDS sequence (opt3) from hemagglutinin__InfluenzaA__ADX99865
augaaggccaaccugcucgugcuucugugcgcuuuggcagccgcggacgcugauaccaucuguauuggcuaccacgccaauaacagcacagacacugucgauacgguuuuagagaaaaaugugaccguaacacauuccgugaaccugcuagaagacucucacaaugggaagcucugcagacugaaaggaauagcaccccuucagcuggguaaguguaacaucgccggcugguugcucgggaauccugagugcgauccacugcugccggucaggucauggaguuauauuguggaaacucccaacagcgagaauggaaucuguuacccuggcgacuucauugauuaugaggaacuccgggagcaauuauccucuguuucgucauuugaacgcuucgagaucuuuccaaaagaaagcaguuggcccaaccauaauaccaacggugugacagcugcaugcucccacgaggggaagucuagcuucuaccgaaaucugcuuugguugaccgagaaggaaggauccuauccuaaacagaagaacucauacgucaauaaaaagggcaaagaggugcugguacuauggggcauacaucacccacccaacaguaaggaacagcagaaccucuaucaaaaugagaacgccuacguuagcguggucacuucuaauuacaaccguagauuuacaccugaaaucgcugagaggccaaaggugcgggaccaggccgggcgcaugaauuauuacuggacccugcuuaaaccgggagauacgauuaucuucgaggcgaacgguaaucugauugcacccauguaugccuuugcuuuguccagaggcuucgggucaggaaucauaacuagcaacgccaguaugcacgaauguaauaccaagugccagacaccucucggcgcaauuaacucuucccugccauaccagaauauccaucccgugacuauuggugaguguccuaaauaugucaggagcgcuaaguuacggaugguuaccgggcugcgcaacaucccaucgauccaaucucgaggacucuuuggcgccauugcgggcuucauagaagggggauggacagguaugaucgacggcugguacggguaucaccaucagaaugagcagggauccggcuacgccgcagaucagaaaucaacccaaaacgcuauuaaugguaucacgaacaaggugaacacuguaauagaaaagaugaauauucaguuuacagccguggggaaggaguucaacaaacuugagaaaagaauggaaaaucugaacaagaaagucgacgauggcuuuuuggacaucuggaccuacaaugcugagcuacuggugcuccuggaaaacgagaggacucuugacuuccacgauaguaauguuaagaaccuguaugaaaaagucaagagccaguugaagaauaacgccaaagagaucggaaauggcugcuucgaguuuuaccacaagugugacaacgaaugcauggaguccgugcggaaugggacauaugauuaccccaaauauucugaagagagcaagcucaaccgugagaaaguggacggaguaaagcuggaaucaauggguauuuaccaaaucuuagcaauuuauaguaccguugccuccagccuggugcuacucgucucucugggcgcuauaucauucuggaugugcaguaaugggagccuucagugucgcaucugcauuuga

SEQ ID NO: 134614 - RNA, 1698 nt, Artificial Sequence
  derived and/or modified CDS sequence (opt3) from hemagglutinin__InfluenzaA__ADX99887
augaaggccaaccugcucgugcuucugugcgcuuuggcagccgcggacgcugauaccaucuguauuggcuaccacgccaauaacagcacagacacugucgauacgguuuuagagaaaaaugugaccguaacacauuccgugaaccugcuagaagacucucacaaugggaagcucugcagacugaaaggaauagcaccccuucagcuggguaaguguaacaucgccggcugguugcucgggaauccugagugcgauccacugcugccggucaggucauggaguuauauuguggaaacucccaacagcgagaauggaaucuguuacccuggcgacuucauugauuaugaggagcuccgggagcaauuauccucuguuucgucauuugaacgcuucgagaucuuuccaaaagaaagcaguuggcccaaccauaauaccaacggugugacagcugcaugcucccacgaggggaagucuagcuucuaccgaaaucugcuuugguugaccgagaaggaaggauccuauccuaaacuggagaacucauacgucaauaagaaaggcaaggaagugcuaguacucuggggcauacaucacccacccaacaguaaagagcagcagaaccuguaucagaaugaaaacgccuacguuagcguggucacuucuaauuacaaccguagauuuacaccugagaucgcugagagguccaaggugcgggaccaagccgggcgcaugaauuauuacuggacccuucugaagccaggagauacgauuaucuucgaagcgaacgguaauuugauugcaccgauguaugccuuugcucucucaagaggcuucgggagcggaaucauaaccaguaacgccucuaugcacgaguguaauacuaaaugccagacaccccugggcgcaauuaacuccagcuuaccuuaccagaauauccauccagugacuauuggugaaugucccaaguaugucaggucggcuaaacugcggaugguuaccgggcuccgcaacaucccuucuauccagucccgaggacuuuuuggcgccauugcgggcuucauagaagggggauggacagguaugaucgacggcugguacggguaucaccaucaaaaugaacagggaucaggcuacgccgcagaucagaagaguacccagaacgcuauuaaugguaucacgaacaaagugaacacuguaauagagaagaugaauauucaauuuacagccguggggaaagaguucaacaagcuggaaaagagaauggagaauuugaacaaaaaggucgacgauggcuuucuagacaucuggaccuacaaugcugaacugcucgugcugcuugagaacgaaaggacucuggacuuccacgauagcaauguuaaaaacuuguaugagaaggugaaaucccagcucaagaauaacgccaaggagaucggaaauggcugcuucgaauuuuaccacaaaugugacaacgagugcauggaaucuguccggaaugggacauaugauuacccaaaguauagcgaggagucaaaacugaaccgugaaaagguggacggaguaaaauuagagaguauggguauuuaccagauccuggcaauuuauuccaccguugccagcucucuagugcuccuggucucacuuggcgcuauaaguuucuggaugugcagcaauggguccuugcaaugucgcaucugcauuuga

SEQ ID NO: 134615 - RNA, 1698 nt, Artificial Sequence
  derived and/or modified CDS sequence (opt3) from hemagglutinin__InfluenzaA__ADX99898
augaaggccaaccugcucgugcuucugugcgcuuuggcagccgcggacgcugauaccaucuguauuggcuaccacgccaauaacagcacagacacugucgauacgguuuuagagaaaaaugugaccguaacacauuccgugaaccugcuagaagacucucacaaugggaagcucugcagacugaaaggaauagcaccccuucagcuggguaaguguaacaucgccggcugguugcucgggaauccugagugcgauccacugcugccggucaggucauggaguuauauuguggaaacucccaacagcgagaauggaaucuguuacccuggcgacuucauugauuaugaagaacuccgggagcaauuauccucuguuucgucauuugaacgcuucgagaucuuuccaaaagaaagcaguuggcccaaccauaauaccaacggugugacagcugcaugcucccacgaggggaagucuagcuucuaccgaaaucugcuuugguugaccgagaaggaaggauccuauccuaaacugaagaacuacuaugucaauaaaaagggcaaagaggugcuaguacucuggggcauacaucacccacccaacucaaaggaacagcagaaccuguaccagaaugagaacgccuacguuaguguggucacuagcaauuauaaccguagauuuacaccugaaaucgcugagaggccaaaggugcgggaccaagccgggcgcaugaauuacuauuggacccuucugaaaccgggagauacgauuaucuucgaggcgaacgguaauuugauugcacccauguacgccuuugcucucucuagaggcuucggguccggaaucauaacuucaaacgccagcaugcacgaauguaauaccaagugccagacaccucugggcgcaauuaacaguucuuuaccauaucagaauauccaucccgugacuauuggugaguguccuaaauacgucagguccgcuaagcugcggaugguuaccgggcuccgcaacaucccaagcauccagucgcgaggacuuuuuggcgccauugcgggcuucauagaagggggauggacagguaugaucgacggcugguauggguaccaccaucaaaaugagcagggaucuggcuacgccgcagaucagaaauccacccagaacgcuauuaaugguaucacgaacaaggugaacacuguaauagagaaaaugaauauucaauuuacagccguggggaaggaguucaacaagcuggagaaaagaauggaaaauuugaacaagaaagucgacgauggcuuucuagacaucuggaccuauaaugcugagcugcucgugcugcuugaaaacgagaggacucuggacuuccacgauucaaauguuaagaacuuguacgaaaaagugaagagucagcucaagaauaacgccaaagagaucggaaauggcugcuucgaguuuuaucacaagugugacaacgaaugcauggagagcguccggaaugggacauacgauuaucccaaauacuccgaagagucuaagcugaaccgugagaaaguggacggaguaaaguuagaaagcauggguauuuaucagauccuggcaauuuacucaaccguugccaguucccuagugcuccuggucagccuuggcgcuauaucuuucuggaugugcucaaaugggaguuugcaaugucgcaucugcauuuga

SEQ ID NO: 134616 - RNA, 1698 nt, Artificial Sequence
  derived and/or modified CDS sequence (opt3) from hemagglutinin__InfluenzaA__ADX99909
augaaggccaaccugcucgugcuucugugcgcuuuggcagccgcggacgcugauaccaucuguauuggcuaccacgccaauaacagcacagacacugucgauacgguuuuagagaaaaaugugaccguaacacauuccgugaaccugcuagaagacucucacaaugggaagcucugcagacugaaaggaauagcaccccuucagcuggguaaguguaacaucgccggcugguugcucgggaauccugagugcgauccacugcugccggucaggucauggaguuauauuguggaaacucccaacagcgagaauggaaucuguuacccuggcgacuucauugauuaugaagaacuccgggagcaauuauccucuguuucgucauuugaacgcuucgagaucuuuccaaaagaaagcaguuggcccaaccauaauaccaacggugugacagcugcaugcucccacgaggggaagucuagcuucuaccgaaaucugcuuugguugaccgagaaggaaggauccuauccuaaacugaagaacuuuuacgucaauaaaaagggcaaagaggugcuaguacucuggggcauacaucacccacccaacucaaaggaacagcagaaccuguaucagaaugagaacgccuacguuaguguggucacuagcaauuacaaccguagauucacaccugaaaucgcugagaggccaaaggugcgggaccaagccgggcgcaugaauuauuacuggacccuucugaaaccgggagauacgauuaucuuugaggcgaacgguaauuugauugcacccauguaugccuucgcucucucuagaggcuuuggguccggaaucauaacuucaaacgccagcaugcacgaauguaauaccaagugccagacaccucugggcgcaauuaacaguucuuuaccauaccagaauauccaucccgugacuauuggugaguguccuaaauaugucagguccgcuaagcugcggaugguuaccgggcuccgcaacaucccaagcauccagucgcgaggacuuuucggcgccauugcgggcuuuauagaagggggauggacagguaugaucgacggcugguacggguaucaccaucaaaaugagcagggaucuggcuacgccgcagaucagaaauccacccagaacgcuauuaaugguaucacgaacaaggugaacacuguaauagagaaaaugaauauucaauucacagccguggggaaggaguuuaacaagcuggagaaaagaauggaaaauuugaacaagaaagucgacgauggcuuccuagacaucuggaccuacaaugcugagcugcucgugcugcuugaaaacgagaggacucuggacuuccacgauucaaauguuaagaacuuguaugaaaaagugaagagucagcucaagaauaacgccaaagagaucggaaauggcugcuuugaguucuaccacaagugugacaacgaaugcauggagagcguccggaaugggacauaugauuaccccaaauauuccgaagagucuaagcugaaccgugagaaaguggacggaguaaaguuagaaagcauggguauuuaccagauccuggcaauuuauucaaccguugccaguucccuagugcuccuggucagccuuggcgcuauaucuuuuuggaugugcucaaaugggaguuugcaaugucgcaucugcauuuga

SEQ ID NO: 134617 - RNA, 1698 nt, Artificial Sequence; identical to SEQ ID NO: 134616
  derived and/or modified CDS sequence (opt3) from hemagglutinin__InfluenzaA__ADX99920

SEQ ID NO: 134618 - RNA, 1698 nt, Artificial Sequence
  derived and/or modified CDS sequence (opt3) from hemagglutinin__InfluenzaA__ADX99931
augaaggccaaccugcucgugcuucugugcgcuuuggcagccgcggacgcugauaccaucuguauuggcuaccacgccaauaacagcacagacacugucgauacgguuuuagagaaaaaugugaccguaacacauuccgugaaccugcuagaagacucucacaaugggaagcucugcagacugaaaggaauagcaccccuucagcuggguaaguguaacaucgccggcugguugcucgggaauccugagugcgauccacugcugccggucaggucauggaguuauauuguggaaacucccaacagcgagaauggaaucuguuacccuggcgacuucauugauuaugaggaacuccgggagcaauuauccucuguuucgucauuugaacgcuucgagaucuuuccaaaagaaagcaguuggcccaaccauaauaccaacggugugacagcugcaugcucccacgaggggaagucuagcuucuaccgaaaucugcuuugguugaccgagaaggaaggauccuauccuaaacuggagaacucauacgucaauaagaaaggcaaggaagugcuaguacucuggggcauacaucacccacccaacaguaaagagcagcagaaccuguaucagaaugaaaacgccuacguuagcguggucacuucuaauuacaaccguagauuuacaccugagaucgcugggaggccaaaggugcgggaccaagccggacgcaugaauuauuacuggacccuucugaagccgggugauacgauuaucuucgaggcgaacggcaauuugauugcacccauguaugccuuugcucucuccagaggguucggaucaggcaucauaacuagcaacgccaguaugcacgaauguaauaccaaaugccagacaccucugggugcaauuaacucuuccuuaccauaccagaauauccaucccgugacuauuggggaguguccuaaguaugucaggagcgcuaaacugcggaugguuaccggacuccgcaacaucccaucgauccagucucgaggccuuuuuggcgccauugcgggguucauagaaggagguuggacaggcaugaucgacgggugguacggauaucaccaucaaaaugagcagggcuccgguuacgccgcagaucagaagucaacccagaacgcuauuaaugggaucacgaacaaagugaacacuguaauagaaaagaugaauauucaauuuacagccgugggcaaagaguucaacaagcuggagaagagaauggaaaauuugaacaaaaaggucgacgauggauuucuagacaucuggaccuacaaugcugagcugcucgugcugcuugaaaacgagaggacucuggacuuccacgauaguaauguuaaaaacuuguaugaaaaggugaaaagccagcucaagaauaacgccaaggagaucggcaaucggugcuucgaguuuuaccacaaaugugacaacgaaugcauggaguccguccguaaugggacauaugauuaccccaaguauucugaagagagcaaacugaaccgcgagaagguggacggaguaaaauuagaaucaauggguauuuaccagauccuggcaauuuauaguaccguugccuccagccuagugcuccuggucucucuuggcgcuauaucauucuggaugugcaguaaugggagcuugcaauguagaaucugcauuuga

SEQ ID NO: 134619 - RNA, 1698 nt, Artificial Sequence
  derived and/or modified CDS sequence (opt3) from hemagglutinin__InfluenzaA__ADX99964
augaaggccaaccugcucgugcuucugugcgcuuuggcagccgcggacgcugauaccaucuguauuggcuaccacgccaauaacagcacagacacugucgauacgguuuuagagaaaaaugugaccguaacacauuccgugaaccugcuagaagacucucacaaugggaagcucugcagacugaaaggaauagcaccccuucagcuggguaaguguaacaucgccggcugguugcucgggaauccugagugcgauccacugcugccggucaggucauggaguuauauuguggaaacucccaacagcgagaauggaaucuguuacccuggcgacuucauugauuaugaggaacuccgggagcaauuauccucuguuucgucauuugaacgcuucgagaucuuuccaaaagaaagcaguuggcccaagcauaacaccaauggugugacagcugcaugcucccacgaggggaagucuagcuucuaccgaaaccugcuuugguugaccgagaaagaaggauccuauccuaagcugaaaaauucauacgucaacaagaaaggcaaggaggugcuaguacucuggggcauacaucacccacccaauaguaaggaacagcagaaccuguaucagaacgagaaugccuacguuagcguggucacuucuaacuacaaucguagauuuacaccugaaaucgcugagaggccaaaagugcgggaccaagccgggcgcaugaacuauuacuggacccuucugaagccgggagauacgauuaucuucgaggcgaaugguaacuugauugcacccauguaugccuuugcucucuccagaggcuucgggucaggaaucauaacuagcaaugccaguaugcacgaauguaacaccaaaugccagacaccucugggcgcaauuaauucuuccuuaccauaccagaacauccaucccgugacuauuggugaguguccuaaguaugucaggagcgcuaaacugcggaugguuaccgggcuccgcaauaucccaucgauccagucucgaggacuuuuuggcgccauugcgggcuucauagaagggggauggacagguaugaucgacggcugguacggguaucaccaucaaaacgagcagggauccggcuacgccgcagaucagaagucaacccagaaugcuauuaacgguaucacgaauaaagugaacacuguaauagaaaagaugaacauucaauuuacagccguggggaaggaguucaauaaacuggagaagagaauggaaaacuugaauaaaaaggucgacgauggcuuucuagacaucuggaccuacaacgcugagcugcucgugcugcuugaaaaugagaggacucuggacuuccacgauaguaacguuaaaaauuuguaugaaaaggucaagagccagcucaaaaacaaugccaaggagaucggaaacggcugcuucgaguuuuaccacaaaugugacaaugaaugcauggaguccgugcggaacgggacauaugauuaccccaaguauucugaagagagcaaacugaaucgugagaagguggacggaguaaaguuagaaucaauggguauuuaccagauccuggcaauuuauaguaccguugccuccagccuagugcuccuggucucucuuggcgcuauaucauucuggaugugcaguaacgggagcuugcaaugucgcaucugcauuuga

SEQ ID NO: 134620 - RNA, 1698 nt, Artificial Sequence
  derived and/or modified CDS sequence (opt3) from hemagglutinin__InfluenzaA__ADX99975
augaaggccaaccugcucgugcuucugugcgcuuuggcagccgcggacgcugauaccaucuguauuggcuaccacgccaauaacagcacagacacugucgauacgguuuuagagaaaaaugugaccguaacacauuccgugaaccugcuagaagacucucacaaugggaagcucugcagacugaaaggaauagcaccccuucagcuggguaaguguaacaucgccggcugguugcucgggaauccugagugcgauccacugcugccggucaggucauggaguuauauuguggaaacucccaacagcgagaauggaaucuguuacccuggcgacuucauugauuaugaggagcuccgggagcaauuauccucuguuucgucauuugaacgcuucgagaucuuuccaaaagaaagcaguuggcccaaccauaauaccaacggugugacagcuaccugcucccacgaggggaagucuagcuucuaccgaaaucugcuuugguugacugagaaggaaggauccuauccugagcugaaaaacucauacgucaauaagaaaggcaaggaagugcuaguacucuggggcauacaucacccacccaacaguaaagagcagcagaaccuguaucagaaugaaaacgcauacguuagcguggucacaucuaauuacaaccguagauuuaccccugagaucgccgagaggccaaaggugcgggaccaagcugggcgcaugaauuauuacuggacgcuucugaagccgggagauacuauuaucuucgaagccaacgguaauuugauugcgcccauguaugcauuugcccucuccagaggcuucgggucaggaaucauaaccagcaacgcuaguaugcacgaguguaauacaaaaugccagacuccucugggcgccauuaacucuuccuuaccauaccagaauauccaucccgugaccauuggugaauguccuaaguaugucaggagcgcaaaacugcggaugguuacagggcuccgcaacaucccaucgauccagucucgaggacuuuuuggcgcuauugccggcuucauagaagggggauggaccgguaugaucgacggcugguacggguaucaccaucaaaaugaacagggauccggcuacgcggccgaucagaagucaacgcagaacgcaauuaaugguaucacuaacaaagugaacacaguaauagagaagaugaauauucaauuuaccgcuguggggaaagaguucaacaagcuggaaaagagaauggagaauuugaacaaaaaggucgacgauggcuuucuagacaucuggacuuacaaugccgaacugcucgugcugcuugagaacgaaaggacacuggacuuccacgauaguaauguuaaaaacuuguaugagaaggugaaaagccagcucaagaauaacgcuaaggagaucggaaauggcugcuucgaauuuuaccacaaaugugacaacgagugcauggaauccguccggaaugggaccuaugauuaccccaaguauucugaggagagcaaacugaaccgugaaaagguggacggaguaaaauuagagucaauggguauuuaccagauccuggccauuuauaguacgguugcauccagccuagugcuccuggucucucuuggcgccauaucauucuggaugugcaguaaugggagcuugcaaugucgcaucugcauuuga

SEQ ID NO: 134621 - RNA, 1698 nt, Artificial Sequence
  derived and/or modified CDS sequence (opt3) from hemagglutinin__InfluenzaA__ADX99986
augaaggccaaccugcucgugcuucugugcgcuuuggcagccgcggacgcugauaccaucuguauuggcuaccacgccaauaacagcacagacacugucgauacgguuuuagagaaaaaugugaccguaacacauuccgugaaccugcuagaagacucucacaaugggaagcucugcagacugaaaggaauagcaccccuucagcuggguaaguguaacaucgccggcugguugcucgggaauccuaaaugcgauccacugcugccggucaggucauggaguuauauuguggagacucccaacagcgaaaauggaaucuguuacccuggcgacuucauugauuaugaggaacuccgggagcaauuauccucuguuucgucauuugagcgcuucgaaaucuuuccaaaggagagcaguuggcccaaccauaauaccaacggugugacagcugcaugcucccacgaagggaagucuagcuucuaccgaaaucugcuuugguugaccgagaaagagggauccuauccuaagcuggaaaacucauacgucaauaaaaagggcaaagaggugcuaguacucuggggcauacaucacccacccaacaguaaggaacagcagaaccuguaucagaaugagaacgccuacguuagcguggucacuucuaauuacaaccguagauuuacaccugaaaucgcugagaggccaaaggugcgggaccaagccgggcgcaugaauuauuacuggacccuucugaaaccgggagauacgauuaucuucgaggcgaacgguaauuugauugcacccauguaugccuuugcucucuccagaggcuucgggucaggaaucauaacuagcaacgccaguaugcacgaauguaauaccaagugccagacaccucugggcgcaauuaacucuuccuuaccauaccagaauauccaucccgugacuauuggugaguguccuaaauaugucaggagcgcuaagcugcggaugguuaccgggcuccgcaacaucccaucgauccagucucgaggacuuuuuggcgccauugcgggcuucauagaagggggauggacagguaugaucgacggcugguacggguaucaccaucaaaaugagcagggauccggcuacgccgcagaucagaaaucaacccagaacgcuauuaaugguaucacgaacaaggugaacacuguaauagaaaagaugaauauucaauuuacagccguggggaaggaguucaacaagcuggagaaaagaauggaaaauuugaacaagaaagucgacgauggcuuucuagacaucuggaccuacaaugcugagcugcucgugcugcuugaaaacgagaggacucuggacuuccacgauaguaauguuaagaacuuguaugaaaaagugaaaagccagcucaagaauaacgccaaagagaucggaaauggcugcuucgaguuuuaccacaagugugacaacgaaugcauggaguccguccggaaugggacauaugauuaccccaaauauucugaagagagcaagcugaaccgugagaaaguggacggaguaaaguuagaaucaauggguauuuaccagauccuggcaauuuauaguaccguugccuccagccuagugcuccuggucucucuuggcgcuauaucauucuggaugugcaguaaugggagcuugcaaugucgcaucugcauuuga

SEQ ID NO: 134622 - RNA, 1698 nt, Artificial Sequence
  derived and/or modified CDS sequence (opt3) from hemagglutinin__InfluenzaA__ADX99997
augaaggccaaccugcucgugcuucugugcgcuuuggcagccgcggacgcugauaccaucuguauuggcuaccacgccaauaacagcacagacacugucgauacgguuuuagagaaaaaugugaccguaacacauuccgugaaccugcuagaagacucucacaaugggaagcucugcagacugaaaggaauagcaccccuucagcuggguaaguguaacaucgccggcugguugcucgggaauccugagugcgauccacugcugccggucaggucauggaguuauauuguggaaacucccaacagcgagaauggaaucuguuacccuggcgacuucauugauuaugaggagcuccgggagcaauuauccucuguuucgucauuugaacgcuucgagaucuuuccaaaagaaagcaguuggcccaaccauaauaccaacggugugacagcugcaugcucccacgaggggaagucuagcuucuaccgaaaucugcuuugguugaccgagaaggaaggauccuauccuaaacuggagaacucauacgucaauaagaaaggcaaggaagugcuaguacucuggggcauacaucacccacccaacaguaaagagcagcagaaccuguaucagaaugaaaacgccuacguuagcguggucacuucuaauuacaaccguagauuuacaccugagaucgcugagaggccaaaggugcgggaccaagccgggcgcaugaaguauuacuggacccuucugaaaccgggagauacgauuaucuucgaagcgaaugguaacuugauugcacccauguaugccuuugcucucuccagaggcuucgggucaggaaucauaacuagcaaugccaguaugcacgaguguaacaccaagugccagacaccucugggcgcaauuaauucuuccuuaccauaccagaacauccaucccgugacuauuggugaauguccuaaauaugucaggagcgcuaagcugcggaugguuaccgggcuccgcaauaucccaucgauccagucucgaggacuuuuuggcgccauugcgggcuucauagaagggggauggacagguaugaucgacggcugguacggguaucaccaucaaaacgaacagggauccggcuacgccgcagaucagaaaucaacccagaaugcuauuaacgguaucacgaauaaggugaacacuguaauagagaaaaugaacauucaauuuacagccguggggaaggaguucaauaagcuggaaaagagaauggagaacuugaauaagaaagucgacgauggcuuucuagacaucuggaccuacaacgcugaacugcucgugcugcuugagaaugaaaggacucuggacuuccacgauaguaacguuaagaauuuguaugagaaagugaaaagccagcucaagaacaaugccaaagagaucggaaacggcugcuucgaauuuuaccacaagugugacaaugagugcauggaauccguccggaacgggacauaugauuaccccaaauauucugaggagagcaagcugaaucgugaaaaaguggacggaguaaaguuagagucaauggguauuuaccagauccuggcaauuuauaguaccguugccuccagccuagugcuccuggucucucuuggcgcuauaucauucuggaugugcaguaacgggagcuugcaaugucgcaucugcauuuga

SEQ ID NO: 134623 - RNA, 1698 nt, Artificial Sequence
  derived and/or modified CDS sequence (opt3) from hemagglutinin__InfluenzaA__ADY00009
augaaggccaaccugcucgugcuucugugcgcuuuggcagccgcggacgcugauaccaucuguauuggcuaccacgccaauaacagcacagacacugucgauacgguuuuagagaaaaaugugaccguaacacauuccgugaaccugcuagaagacucucacaaugggaagcucugcagacugaaaggaauagcaccccuucagcuggguaaguguaacaucgccggcugguugcucgggaauccugagugcgauccacugcugccggucaggucauggaguuauauuguggaaacucccaacagcgagaauggaaucuguuacccuggcgacuucauugauuaugaagaacuccgggagcaauuauccucuguuucgucauuugaacgcuucgagaucuuuccaaaagaaagcaguuggcccaaccauaauaccaacggugugacagcugcaugcucccacgaggggaagucuagcuucuaccgaaaucugcuuugguugaccgagaagaaaggauccuauccuaagcuggaaaacucauacgucaauaaaaagggcaaagaggugcuaguacucuggggcauacaucacccacccaacaguaaggaacagcagaaccuguaucagaaugagaacgccuacguuagcguggucacuucuaauuacaaccguagauuuacaccugaaaucgcugagaggccaaaggugcgggaccaagccgggcgcaugaauuauuacuggacccuucugaaaccgggagauacgauuaucuucgaggcgaacgguaauuugauugcacccauguaugccuuugcucucuccagaggcuucgggucaggaaucauaacuagcaacgccaguaugcacgaauguaauaccaagugccagacaccucugggcgcaauuaacucuuccuuaccauaccagaauauccaucccgugacuauuggugaguguccuaaauaugucaggagcgcuaagcugcggaugguuaccgggcuccgcaacaucccaucgauccagucucgaggacuuuuuggcgccauugcgggcuucauagaagggggauggacagguaugaucgacggcugguacggguaucaccaucaaaaugagcagggauccggcuacgccgcagaucagaaaucaacccagaacgcuauuaaugguaucacgaacaaggugaacacuguaauagagaaaaugaauauucaauuuacagccguggggaaggaguucaacaagcuggagaaaagaauggaaaauuugaacaagaaagucgacgauggcuuucuagacaucuggaccuacaaugcugagcugcucgugcugcuugaaaacgagaggacucuggacuuccacgauaguaauguuaagaacuuguaugaaaaagucaagagccagcucaagaauaacgccaaagagaucggaaauggcugcuucgaguuuuaccacaagugugacaacgaaugcauggaguccgugcggaaugggacauaugauuaccccaaauauucugaagagagcaagcugaaccgugagaaaguggacggaguaaaguuagaaucaauggguauuuaccagauccuggcaauuuauaguaccguugccuccagccuagugcuccuggucucucuuggcgcuauaucauucuggaugugcaguaaugggagcuugcaaugucgcaucugcauuuga

SEQ ID NO: 134624 - RNA, 1698 nt, Artificial Sequence; identical to SEQ ID NO: 131326
  derived and/or modified CDS sequence (opt3) from hemagglutinin__InfluenzaA__ADY00020

SEQ ID NO: 134625 - RNA, 1698 nt, Artificial Sequence
  derived and/or modified CDS sequence (opt3) from hemagglutinin__InfluenzaA__ADY04727
augaaggccaaacugcucgugcuucugugcaccuucacagcuacuuacgcagacacgaucuguauuggcuaucacgccaacaauagcaccgauacagucgacacuguuuuggagaagaacgugaccguaacacauuccgugaauuuacuggaagauucucacaacgggaaacuaugccuccugaagggaauagcgccccuucagcuggguaauuguucagucgcuggcuggaucuuggggaacccugagugcgaacuccugauuaguaaagagagcugguccuacaucguggaaaccccaaauccggagaacggaacuuguuaucccggcuacuuugccgacuaugaggaacugagagagcaacucucuucgguuucaucuuucgaaagguuugagauuuucccuaaggguaguuccuggccaaaucauacagugaccggggucucugcaagcugcucccacaacggaaagucaaguuuuuaccggaauuuacuguggcuuacgggcaaaaacggcuuguaucccaaucugagcaugucuuacgugaacaauaaggagaaagaaguacuuguucucuggggagugcaucacccuccaaacaucgggaaccagcgcgcccuguaccacacugagaaugcuuaugucuccguggugucaagccauuacagucgacguuucacccccgaaauagcaaagagaccuaaagucagggaucaggagggucggaucaacuauuacuggacacuucuggaaccaggcgacacuauuaucuuugaggccaaugggaacuugauugcuccgugguaugccuucgcgcucucucgcggauuuggcuccgguaucauaaccagcaaugcacccaugggggagugugaugccaagugccagacaccucaaggagcuauuaacucgucucugccauuccagaauguucaccccgugaccaucggcgaauguccuaaguacguaagauccgccaaauuaaggauggugacgggccugcggaacauuccaucaauccagagucgcgggcucuuuggagcaaucgcugguuucauugagggcggguggacuggaauggucgacggcugguaugguuaccaucaccagaaugaacaagggagcggcuacgccgcggaucagaaguccacacagaacgccauaaauggaaucaccaacaaagugaauagcguuauugagaagaugaacacucaguuuacagcagugggcaaagaguucaauaagcuagaacgaagaauggagaaccugaacaaaaaggucgacgauggguucuuggacaucuggaccuauaaugcugaacuacuggugcuccuggagaacgaaaggacgcuugauuuucacgacagcaaucugaagaacuuguacgagaaaguaaagucacaacucaaaaauaacgccaaggaaauaggaaaugguugcuucgaguuuuaucauaaauguaacaaugagugcauggaaaguguuaagaacggcaccuacgacuaucccaaguacuccgaggaaagcaaacugaaucgggagaagauugauggggugaaauuagagucuaugggagucuaucagauccuggcuaucuacucaacaguggccaguagccuaguccuccuggugucccuuggcgcaauuucuuucuggaugugcucgaacgguagcuugcagugucguaucugcauuuga

SEQ ID NO: 134626 - RNA, 1701 nt, Artificial Sequence; identical to SEQ ID NO: 131661
  derived and/or modified CDS sequence (opt3) from hemagglutinin__InfluenzaA__ADY11836

SEQ ID NO: 134627 - RNA, 1701 nt, Artificial Sequence; identical to SEQ ID NO: 131636
  derived and/or modified CDS sequence (opt3) from hemagglutinin__InfluenzaA__ADY17654

SEQ ID NO: 134628 - RNA, 1701 nt, Artificial Sequence
  derived and/or modified CDS sequence (opt3) from hemagglutinin__InfluenzaA__ADY17665
augaagaccaucauugcccugagcuacauacucugccuuaucuucgcucagaaacugcccggcaacgacaauuccacagcaacuuuguguuuagggcaccaugccgugccuaacggaacgauugucaagaccaucacaaaugaucaaauugagguuacuaacgcgaccgaacuggugcagucuucaaguacaggugagaucugcgacagcccacaccagauacuagauggcaaaaauuguacccucaucgacgcucugcuuggggauccgcagugcgacggauuucaaaacaagaaaugggaucuguucguagaaagauccaaggccuauucuaauuguuaccccuaugacgugccugauuacgcaucguugaggucacucgucgccagcaguggcacucuggaguuuaacaaugaauccuucaacuggacaggugugacccaggacgggacgucuagcgcuugcauucggcgcuccaaaaauucauuuuucagucgacugaacuggcucacucauuuaaauuuuaaauauccagcacugaacguuaccaugcccaauaacgagcaguucgauaagcuguacaucuggggagugcaccauccuggcacagacaaagaucagauuuuucuuuaugcccaagcuagcggccguaucacugucucuaccaagagaucccagcagacagccauaccaaacauugggucaaggccccgggugcgcaauaucccuagcagaauuaguaucuacuggaccaucguaaaaccaggagacauucugcuaauaaacucuacggguaaucucaucgcgccgaggggcuacuucaagauucgguccggaaagagcucgaucaugcgcucugacgcacccauagggaaauguaacuccgagugcauuacuccuaauggcucaaucccaaacgauaagcccuuucagaauguuaaccgaaucacauauggugccuguccuagauacgugaaacaaaauacccugaaguuggcuacugggaugaggaacgucccagaaaaacagacacggggaauuuucggcgccaucgcaggcuuuauugagaaugggugggaaggaaugguggacgguugguauggcuuccgucaccagaacagugaggggcgcggacaagcugccgaucuuaagagcacccaggcggccauagaccagaucaauggcaaauugaacagacucauugguaagacgaaugagaaguuccaccagaucgaaaaagaguuuuccgaaguggaggggaggauccaagaucuggaaaaguacgucgaggacaccaaaauugauuuauggucuuauaacgcagagcugcucguugcucuugaaaaccagcauacaauagaccugacugauagcgagaugaauaaguuguucgaaaagaccaagaagcagcuacgggagaacgccgaagacaugggcaauggaugcuuuaaaaucuaccacaagugugauaacgcuugcauuggcucaauccgaaaugggacauaugaccaugacguguaccgcgaugaggcccugaacaauagauuccagauuaaaggaguagagcucaagagugguuacaaagacuggauccuguggauauccuuugcaaucagcugcuuccuucuguguguggccuugcucggcuuuauuaugugggcuugccaaaaggggaacaucagguguaauauuugcaucuga

SEQ ID NO: 134629 - RNA, 1701 nt, Artificial Sequence; identical to SEQ ID NO: 131661
  derived and/or modified CDS sequence (opt3) from hemagglutinin__InfluenzaA__ADY17676

SEQ ID NO: 134630 - RNA, 1701 nt, Artificial Sequence
  derived and/or modified CDS sequence (opt3) from hemagglutinin__InfluenzaA__ADY17687
augaagaccaucauugcccugagcuacauacucugccuuguguucgcucagaaacugcccggcaacgacaauuccacagcaacuuuguguuuagggcaccaugccgucccuaacggaacgaucguuaagaccauuacaaaugaucaaaucgaggugacuaacgcgaccgaacugguacagucuucaaguacaggugagauuugcgacagcccacaccagauccuagauggcaaaaauuguacccucauagacgcucugcuuggggauccgcagugcgacggauuucaaaacaagaaaugggaucuguucguggaaagauccaaggccuauucuaauuguuaccccuaugacgucccugauuacgcaucguugaggucacucguggccagcaguggcacucuggaguuuaacaaugaauccuucaacuggacagguguuacccaggacgggacgucuagcgcuugcauccggcgcuccaagaauagcuuuuucagucgacugaacuggcucacucauuuaaauuuuaaauauccagcacugaacgugaccaugcccaauaacgagcaguucgauaagcuguacauuuggggaguccaccauccuggcacagacaaagaucagaucuuuuuguaugcccaagcuagcggccguauuacugugucuaccaagagaucccagcagacagccaucccaaacauagggucaaggccccggguacgcaauauuccuagcagaaucaguauuuacuggaccaucguuaaaccaggagacauccugcuaauuaacucuacggguaaucucauagcgccgaggggcuacuucaagauccgguccgggaagucaucgauuaugcgcucugacgcacccaucggaaaauguaacuccgagugcauaacuccuaauggcucaauuccaaacgauaagcccuuucagaaugugaaccgaaucacauauggugccuguccuagauacgucaaacaaaauacccugaaacuugcuacugggaugaggaacgugccagaaaaacagacacggggaaucuucggcgccauugcaggcuuuaucgagaaugggugggaaggaaugguggacgguugguauggcuuccgucaccagaacagugaggggcgcggacaagcugccgaucuuaagagcacccaggcggccauugaccagauaaauggcaaauugaacagacucaucgguaagacgaaugagaaguuccaccagauugaaaaagaguuuuccgaagucgaggggaggauccaagaucuggaaaaguacguugaggacaccaaaaucgauuuauggucuuauaacgcagagcugcucguggcucuugaaaaccagcauacaauugaccugacugauagcgagaugaauaaguuguucgaaaagaccaagaagcagcuacgggagaacgccgaagacaugggcaauggaugcuuuaaaauauaccacaagugugauaacgcuugcaucggcucaauucgaaaugggacauaugaccaugacguauaccgcgaugaggcccugaacaauagauuccagaucaaaggaguggagcucaagagugguuacaaagacuggauucuguggaucuccuuugcaauaagcugcuuccuucugugugccgcuuugcucggcuuuaucaugugggcgugccaaaaggggaacauuagguguaauaucugcauuuga

SEQ ID NO: 134631 - RNA, 1701 nt, Artificial Sequence; identical to SEQ ID NO: 131636
  derived and/or modified CDS sequence (opt3) from hemagglutinin__InfluenzaA__ADY17698

SEQ ID NO: 134632 - RNA, 1701 nt, Artificial Sequence
  derived and/or modified CDS sequence (opt3) from hemagglutinin__InfluenzaA__ADY38719
augaagaccaucauugcccugagcuacauacucugccuuguguucacacagaaacugcccggcaacgacaauuccacugcuacguuguguuuagggcaccaugcagucccuaacggaaccaucguuaagacaauuacuaaugaucaaaucgaggugaccaacgccacagaacugguacagucuucaaguaccggugagauuugcgacagcccacaccagauccuagauggcaaaaauuguacucucauagacgcgcugcuuggggauccgcagugcgacggauuucaaaacaagaaaugggaucuguucguggaaagauccaaggcuuauucuaauuguuaccccuaugacgucccugauuacgccucguugaggucacucguggcaagcaguggcacacuggaguuuaacaaugaauccuucaacuggaccgguguuacgcagaaugggacuucuagcgccugcauccggcgcuccaagaacucauuuuucagucgacugaauuggcucacccauuuaaacuuuaaauauccagcucugaaugugacaaugcccaacaacgagcaguucgacaagcuguacauuuggggaguccaccauccuggcacugauaaagaccagaucuuuuuguaugcacaagccagcggccguauuaccgugucuacaaagagaucccagcagaccgcuaucccaaauauagggucaaggccccggguacgcaacauuccuagcagaaucaguauuuacuggacgaucguuaaaccaggagauauccugcuaauuaauucuacugguaaccucauagccccgaggggcuacuucaagauccgguccggaaagagcucgauuaugcgcucugacgcgcccaucgggaaauguaauuccgagugcauaacaccuaacggcucaauuccaaaugacaagcccuuucagaacgugaaucgaaucaccuauggugcauguccuagauacgucaaacaaaacacucugaaacuugccacagggaugaggaaugugccagaaaaacagacccggggaaucuucggcgcuauugccggcuuuaucgagaacgggugggaaggaaugguggaugguugguauggcuuccgucaccagaauagugaggggcgcggacaagcagcugaccuuaagagcacgcaggccgcgauugaucagauaaacggcaaauugaauagacucaucgguaagaccaacgagaaguuccaccagauugaaaaagaguuuuccgaagucgaggggaggauccaagaccuggaaaaguacguugaggauacaaaaaucgacuuauggucuuauaacgccgagcugcucguggcacuugaaaaucagcauacuauugaucugaccgacagcgagaugaacaaguuguucgaaaagacaaagaagcagcuacgggagaaugcugaagauaugggcaacggaugcuuuaaaauauaccacaagugugacaaugccugcaucggcucaauucgaaacgggacuuaugaucaugacguauaccgcgacgaggcucugaauaacagauuccagaucaaaggaguggagcucaagagugguuacaaagauuggauucuguggaucuccuuugccauaagcugcuuccuucugugugucgcauugcucggcuuuaucaugugggccugccaaaaggggaauauuagguguaacaucugcauuuga

SEQ ID NO: 134633 - RNA, 1701 nt, Artificial Sequence; identical to SEQ ID NO: 130717
  derived and/or modified CDS sequence (opt3) from hemagglutinin__InfluenzaA__ADY38750

SEQ ID NO: 134634 - RNA, 1701 nt, Artificial Sequence; identical to SEQ ID NO: 131881
  derived and/or modified CDS sequence (opt3) from hemagglutinin__InfluenzaA__ADY38760

SEQ ID NO: 134635 - RNA, 1701 nt, Artificial Sequence
  derived and/or modified CDS sequence (opt3) from hemagglutinin__InfluenzaA__ADZ04607
augaaggccauccuggugguccuccuuuacaccuucgcuacagcaaacgccgacacucugugcauuggcuaucacgcgaauaacagcacggauaccguugacacaguguuggagaaaaauguaacugugacccauuccgucaacuuacuggaagauaagcacaaugggaaacuauguaagcucagaggaguggcuccccugcaucuugguaaaugcaacauagccggcuggauccuggggaauccugagugugaaucuuugucaacagcaaguagcugguccuacauuguugagaccucuucgucagacaacggaacuugcuauccaggcgauuuuaucgacuacgaggagcucagggagcagcugagcaguguguccucuuucgaacgguuugagauuuucccgaagacaagcuccuggcccaaucacgauucaaacaagggugucaccgccgcuuguccucaugcaggggccaaaaguuuuuauaagaaucugaucuggcucgugaaaaagggaaacagcuacccaaaauuaucuaaguccuauauaaaugacaagggcaaagaaguacugguucuuuggggcauccaccaccccucaacgagcgcugaucaacagaguuuguaccagaacgccgacgcguacguguucgucgggacuucucgcuauuccaagaaauuuaagccugagauugcaauccgaccaaaagugcgugaucaggagggaagaaugaauuacuauuggacccugguggaacccggugacaagauuacauucgaggccacuggcaaccuagucguuccuagguacgcuuuugccauggaacggaacgcagggagcggaaucauaauuucggauaccccagugcaugacugcaauacaaccugucaaacgccgaaaggcgcuaucaacacuucucuccccuuccagaauauucacccuaucacaaucgguaagugcccaaaguauguaaaauccaccaagcugcgccuugccacugggcugagaaacgugcccucaauucagaguaggggauuguuuggcgcgauagccggcuucaucgaagggggauggacagguauggucgacggcugguacggguaucaucaccagaaugaacaaggaagcggcuacgcagcugaucucaaauccacccagaacgccauugacgagaucacgaauaaggugaacucuguuauagagaaaaugaauacccaguuuacagcuguggguaaggaguucaaccaccuggaaaagcggauugaaaauuuaaacaaaaaggucgaugacggguuccuggauaucuggacuuacaaugccgagcuccuugugcuguuggaaaacgagcgcacccuagacuaucaugauagcaauguaaagaaccuguacgagaagguucgaucacagcucaaaaacaaugcaaaggaaaucggcaacggauguuuugaguucuaucacaagugcgacaauacauguauggaaagugugaaaaacggcacuuacgauuauccuaaguacuccgaggaagccaaacugaauagagaggagauugacggggucaaacuugaaagcaccaggguguaucaaauccuggcuauuuacucuacagucgcgucaaguuuggugcucguugugagccugggagcaauauccuuuuggaugugcucuaacgguucguuacagugccggaucuguauuuga

SEQ ID NO: 134636 - RNA, 1698 nt, Artificial Sequence; identical to SEQ ID NO: 134011
  derived and/or modified CDS sequence (opt3) from hemagglutinin__InfluenzaA__ADZ05834

SEQ ID NO: 134637 - RNA, 1698 nt, Artificial Sequence
  derived and/or modified CDS sequence (opt3) from hemagglutinin__InfluenzaA__ADZ05845
augaaggugaaacugcucguccuucugugcaccuucacagccacuuacgcugacacgaucuguauuggcuaucacgcaaacaauagcaccgauacaguugacacuguguuggagaagaacguaaccgugacacauuccgucaauuuacuggaagauucucacaacgggaaacuaugccuccugaagggaauagcgccccuucagcuggguaauuguucaguggccggcuggaucuuggggaacccugagugcgaacuccugauuaguaaagagagcugguccuacaucguugaaaagccaaauccggagaacggaaccuguuaucccggccauuuugcugacuacgaggaacugagagagcaacucucuucggugagcucauucgaaagguuugagauuuucccuaaggagaguuccuggccaaaucacacugucacaggugugucugccagcugcucccauaacggggaaaauucauuuuaucggaacuuacuguggcuuaccggaaagaauggcuuguaccccaaccugaguaagagcuaugcaaauaacaaagagaaggaaguucuaguacucuggggcgugcaccacccuccaaacauggccgaucagaaaacgcuguaccauacugagaaugcuuacgucucugugguguccucacacuauagccgcaaguucacccccgaaaucgcaaagcgaccuaaaguccgugaccaggaggggagaauaaacuacuauuggacacuucuggagccaggagauacuaucauuuuugaagccaaugguaacuugaucgcuccgagguacgccuucgcgcucagucggggcuuugggucuggaauuaucaauuccaacgcacccauggacaagugugaugccaaaugccagaccccucaaggcgcuauaaauagcucgcugccauuccagaacguucaucccgugacaauuggugaguguccuaaguauguacgcucugccaaauuaagaauggugaccgggcugaggaauaucccauccauucagucacggggacucuuuggcgcaaucgcuggcuucaucgaagggggauggacggguauggucgacggcugguacggguaucaccaccagaacgagcaaggaaguggcuacgccgcggaucagaaaagcacucagaaugccauuaacgguauaacaaauaaagugaacuccguuaucgaaaagaugaauacccaguuuacugcaguggggaaggaguucaacaaacuugagcgccgaauggaaaaccugaauaagaaagucgacgauggcuucauugacaucuggacauacaacgcugaguugcuagugcugcucgaaaaugagagaacccuggacuuucaugauucuaacguaaagaaucuuuaugaaaaaguuaagagccaacugaagaacaaugccaaagagauaggaaacggcugcuucgaguuuuaccacaaguguaaugacgaaugcauggagucagugaaaaacgggacguaugauuaccccaaguauagugaagaguccaaauugaauagggagaagauugacggagucaagcucgaaagcauggguguguaccagauccuggcuaucuauucuaccgucgccucaaguuuagugcugcuaguuagccucggcgcaauuuccuucuggaugugcucuaacgggucgcugcagugucggaucugcauuuga

SEQ ID NO: 134638 - RNA, 1701 nt, Artificial Sequence; identical to SEQ ID NO: 130482
  derived and/or modified CDS sequence (opt3) from hemagglutinin__InfluenzaA__ADZ05855

SEQ ID NO: 134639 - RNA, 1701 nt, Artificial Sequence
  derived and/or modified CDS sequence (opt3) from hemagglutinin__InfluenzaA__ADZ47838
augaaggccauccuggugguccuccuuuacacccuggcuacagcaaacgccgacacuuugugcauuggcuaucacgcgaauaacagcacggauaccguugacacaguguuagagaaaaauguaacugugacccauuccgucaaccugcuagaagauaagcacaaugggaaacucuguaagcugagaggaguggcuccccuucaucuggguaaaugcaacauagccggcuggaucuuggggaauccugagugugaaucucucucaacagcaaguagcugguccuacauuguugagaccucuucgucagacaacggaacuugcuauccaggcgauuucaucgacuacgaagaacugagggagcagcugagcaguguguccucuuuugaacgguucgagauuuuuccgaagacaagcuccuggcccaaucacgauucaaacaagggugucaccgccgcuuguccucaugcaggggccaaaaguuucuauaagaaucucaucugguuagugaaaaagggaaacagcuacccaaaacugucuaaguccuauauaaaugacaagggcaaagaaguacuuguuuuguggggcauccaccaccccucaacgagcgcugaucaacagagucuguaccagaacgccgacgcguacguguuugucgggacuucucgcuauuccaagaaauucaagccugagauugcaauccgaccaaaagugcgugagcaggaaggaagaaugaauuacuauuggacccuaguggagcccggugauaagauuacauuugaagccacuggcaaccucgucguuccuagguacgcuuucgccauggagcggaacgcagggagcggaaucauaauuucggacaccccagugcaugauugcaauacaaccugucaaacgccgaaaggcgcuaucaacacuucucugcccuuucagaauauucacuccaucacaaucgguaagugcccuaaguauguaaaaucaaccaaacuucgccuggccacuggguugagaaacgugccaaguauucagagcaggggacucuucggcgcgauagccggcuuuaucgaagggggauggacagguauggucgacggcugguacggguaucaucaccagaaugagcaaggauccggcuacgcagcugaccugaaaucuacccagaacgccauugaugagaucacgaauaaggugaacagcguuauagagaaaaugaauacccaguucacagcuguggguaaggaguuuaaccacuuagaaaagcggauugagaaucugaacaaaaaggucgacgauggguuccucgacaucuggacuuacaaugccgaacuucugguguugcuagagaacgagcgcacccuggauuaucaugacucaaauguaaagaaccucuacgaaaagguucgaagucagcugaaaaacaaugcaaaggagaucggcaacggauguuucgaauuuuaucacaagugcgauaauacauguauggaguccgugaaaaacggcacuuacgacuaucccaaguacagcgaagaggccaaacuuaauagagaggaaauugauggggucaagcuggagucuaccaggaucuaucaaauuuuggcuauauacucaacaguggcgaguagcuucguccucaucgugucccugggagcaauuucuuuuuggaugugcucgaacgguagcuuacagugccggaucuguaucuga

SEQ ID NO: 134640 - RNA, 1701 nt, Artificial Sequence; identical to SEQ ID NO: 131889
  derived and/or modified CDS sequence (opt3) from hemagglutinin__InfluenzaA__ADZ47858

SEQ ID NO: 134641 - RNA, 1698 nt, Artificial Sequence
  derived and/or modified CDS sequence (opt3) from hemagglutinin__InfluenzaA__ADZ53100
augaaggugaaacugcucguccuucugugcaccuucacagccacuuacgcugacacgaucuguauuggcuaucacgcaaacaauagcaccgauacaguugacacuguguuggagaagaacguaaccgugacacauuccgucaauuuacuggaaaacucucacaaugggaaacuaugccuccugaagggaauagcgccccuucagcuggguaacuguucaguggccggcuggaucuuggggaauccugagugcgaacuccugauuaguaaagagaccuggagcuacaucguugaaaagccaaacccggagaauggaacuuguuaucccggccauuuugcugauuacgaggaacugagagagcaacucuccucugugucgucauucgaaagguuugagauuuucccuaaggagagcaguuggccaaaccacacagucaccgguguguccgccucuugcagccauaauggggaauccucauuuuaucggaacuuacuguggcuuacgggcaaaaauggauuguaccccaaccugaguaagagcuaugcaaauaacaaagagaaggaaguucuaguacucuggggcgugcaccacccuccaucuaucaacgaccagaaaacucuguaccauaccgagaaugccuacgucuccguggugucaagccacuauagucgcaaguucacacccgaaauagcuaagcgaccuaaaguccgugaucaggaggggagaaucaacuacuauuggacucuucuggagccaagggacaccauuaucuuugaagcaaauggaaacuugauugccccgcgguacgcuuucgcccucucucgcgguuuuggcuccgggaucauaaauagcaacgcgcccauggauaagugugacgcaaaaugccagacaccucaaggagccauuaauucgucucugccauuccagaacguucaucccgugaccaucggcgaguguccuaaguauguaagauccgcuaaauuaaggauggugacgggucugcggaauauuccaucaauccagagucgcgggcucuuuggagccaucgcaggcuucauugaaggcggguggacuggaauggucgaugguugguacggcuaucaccaccagaacgagcaagggagcggauacgcugccgaccagaaguccacacagaaugcgauaaacggcaucaccaauaaagugaacucuguuauugaaaagaugaauacucaguuuacagccguggguaaggaguucaacaaacuugagcgaagaauggaaaaccugaauaagaaagucgaugacggguucaucgauauauggaccuacaacgcagaguugcuagugcugcucgaaaaugagaggacgcuggacuuucaugacagcaacguaaagaaucuuuaugaaaaaguuaagucacaacugaagaacaaugcuaaagagauuggcaacggaugcuucgaguuuuaccacaaguguaaugaugaaugcauggagagugugaaaaacggcaccuaugacuaccccaaguauuccgaagagagcaaauugaaucgggagaagaucgauggggucaagcucgaaucuaugggaguguaccagauccuggccauuuauucaacagucgcuaguagcuuagugcugcuaguuucccucggugccaucucuuucuggaugugcucgaacggcagccugcagugucguauuugcauauga

SEQ ID NO: 134642 - RNA, 1701 nt, Artificial Sequence; identical to SEQ ID NO: 131164
  derived and/or modified CDS sequence (opt3) from hemagglutinin__InfluenzaA__ADZ53123

SEQ ID NO: 134643 - RNA, 1701 nt, Artificial Sequence; identical to SEQ ID NO: 130959
  derived and/or modified CDS sequence (opt3) from hemagglutinin__InfluenzaA__ADZ53125

SEQ ID NO: 134644 - RNA, 1701 nt, Artificial Sequence; identical to SEQ ID NO: 131341
  derived and/or modified CDS sequence (opt3) from hemagglutinin__InfluenzaA__ADZ53127

SEQ ID NO: 134645 - RNA, 1701 nt, Artificial Sequence; identical to SEQ ID NO: 130704
  derived and/or modified CDS sequence (opt3) from hemagglutinin__InfluenzaA__ADZ53131

SEQ ID NO: 134646 - RNA, 1701 nt, Artificial Sequence; identical to SEQ ID NO: 130717
  derived and/or modified CDS sequence (opt3) from hemagglutinin__InfluenzaA__ADZ53133

SEQ ID NO: 134647 - RNA, 1701 nt, Artificial Sequence; identical to SEQ ID NO: 130959
  derived and/or modified CDS sequence (opt3) from hemagglutinin__InfluenzaA__ADZ53135

SEQ ID NO: 134648 - RNA, 1701 nt, Artificial Sequence; identical to SEQ ID NO: 131881
  derived and/or modified CDS sequence (opt3) from hemagglutinin__InfluenzaA__ADZ53138

SEQ ID NO: 134649 - RNA, 1701 nt, Artificial Sequence; identical to SEQ ID NO: 130717
  derived and/or modified CDS sequence (opt3) from hemagglutinin__InfluenzaA__ADZ53140

SEQ ID NO: 134650 - RNA, 1701 nt, Artificial Sequence; identical to SEQ ID NO: 131164
  derived and/or modified CDS sequence (opt3) from hemagglutinin__InfluenzaA__ADZ93496

SEQ ID NO: 134651 - RNA, 1689 nt, Artificial Sequence; identical to SEQ ID NO: 130398
  derived and/or modified CDS sequence (opt3) from hemagglutinin__InfluenzaA__AEA04365

SEQ ID NO: 134652 - RNA, 1689 nt, Artificial Sequence
  derived and/or modified CDS sequence (opt3) from hemagglutinin__InfluenzaA__AEA04376
auggccaucauuuaccugauacuccuuuucaccgcugugagaggcgaccagaucugcauuggguaucacgcaaacaauagcacagagaaggucgauacuauccuggaaaggaacguuacggugacccaugccaaagacauuuuggagaagacacacaauggaaaauuauguaagcugaacgguauacccccucuagaacucggcgauugcuccaucgcgggguggcugcuuggaaauccagagugugaccggcuguugucuguaccggaauggucauacaucauggagaaagagaacccccgcgauggccucugcuauccugguaguuuuaaugacuacgaggaacugaagcaucugcucagcuccgugaagcacuucgaaaaagucaagauuuuaccaaaagaucgauggacucaacauaccacaaccgggggaucucgugcuugugccgugucgggcaaccccucauuuuucagaaauaugguuuggcugacugagaagggcagcaacuauccuguggcaaaagggaguuacaauaacacauccggagagcagaugcuuaucauuugggguguccaccacccaaaugacgaaaccgagcagaggacguuguaucagaacgugggcacuuacguaucuguugggaccagcacacugaauaagcgguccacucccgaaaucgccacccgcccuaaggugaacggacaaggcgguagaauggaguuuucauggacacuacucgauaugugggacaccauaaacuucgaaaguacggggaaucugauugcuccagaguacggauuuaaaaucagcaagagggggucuuccggcauuaugaaaacugagggcacacuugaaaacugcgagaccaagugucagacuccgcugggagcaaucaauacaaccuugcccuuccauaacguccacccucucacgaucggugaaugcccaaaauaugugaagucagagaaacugguguuagccaccggccugcggaaugucccccagauugaaagccgcgggcucuuuggagcuauagccggcuucaucgaggguggguggcagggcaugguugauggaugguacggcuaucaucacaguaacgaccaagggucuggauacgcggcagauaaggaguccacacagaaggccuuugacgguauuacuaauaaagugaacagcguaaucgaaaagaugaauacccaguucgaggcugugggcaaagaauuuucgaaccuugagcgaagacuggaaaauuugaacaagaaagucgaggacggguuccuagauguguggacauauaaugccgagcugcucguucugauggaaaacgagaggacucuugacuuccacgauucuaaugugaagaaccuguacgacaagguccggaugcaguugcgugauaacgugaaagaacucggaaauggcuguuuugaguucuaucauaagugcgacgaugaguguaugaacuccguuaaaaaugguaccuacgacuacccuaaguaugaagaggaaucaaaacugaaccgcaaugagauaaaggggguaaaguuaaguagcaugggcguguaccaaauucuggcaaucuaugcuacagucgccggaucccuaucucucgcgaucaugauggccggcauuagcuuuuggaugugcucaaacgggagucugcagugcagaaucuguauuuga

SEQ ID NO: 134653 - RNA, 1698 nt, Artificial Sequence
  derived and/or modified CDS sequence (opt3) from hemagglutinin__InfluenzaA__AEA10292
augaaggugaaacugcucguccuucugugcaccuucacagccacuuacgcugacacgaucuguauuggcuaucacgcaaacaauagcaccgauacaguugacacuguguuggagaagaacguaaccgugacacauuccgucaauuuacuggaaaacucucacaaugggaaacuaugcucacucaagggaauagcgccccugcagcuugguaacuguaguguggccggcuggauccuggggaauccugagugcgaauugcucauuagcaaagaguccuggucuuacaucguugaaaagccaaacccggagaauggaaccuguuaucccggccauuuugcugauuacgaggaacugagagagcaacugucgucagugagcaguuucgaaagguuugagauuuucccuaaggaguccucuuggccaaaccacacugucacaggugugagcgccuccugcucacauaauggggaaaguagcuuuuaucggaaccucuuauggcugaccguuaaaaauggacuuuaccccaacuugucuaaguccuaugcaaauaacaaagagaaggaaguacuggugcuauggggcguccaccacccuccaaacaucguggaccagaaaacgcucuaccgcacugagaaugccuacgugucagucguuagcagucauuauucucgaaaguucacccccgaaauagcuaagcguccuaaagugagagaucaggagggcaggaucaacuacuauuggacacugcuugagccaggggacacuauuaucuuugaagcaaauggaaaccugauugccccgcgguacgcuuucgccuugucccgcgguuuuggcagcgggaucauaaauucgaacgcgcccauggauaagugugacgcaaaaugccagaccccuagaggagccauuaauucuucccucccauuccaaaacguacaccccgugacaaucggcgaguguccuaaguaugucaggucagcuaaacugcggauggugaccgguuuacgcaauauuccaaguauccagagccgagggcuguuuggagccaucgcaggcuucauugaaggcggguggacgggaaugguugaugguugguacggcuaucaucaccagaacgagcagggguccggauacgcugccgaccaaaagucuacucagaaugcgauaaacggcaucacaaauaaagugaacagcgucauugaaaagaugaauacccaguuuacugccguggguaaggaguucaacaaacucgagagaaggauggaaaaccuuaauaagaaaguagaugacggguucaucgauauauggacauacaacgcagagcuguugguucuacuggaaaaugagcggacccucgacuuucacgacucaaacgugaagaaucuguaugaaaaagucaagagucagcuuaagaacaaugcuaaagagauuggcaacggaugcuucgaguuuuaccauaaguguaaugaugaaugcauggaguccgugaaaaacggcacguaugacuaccccaaguauagcgaagagucuaaacugaaucgugagaagaucgauggggucaaguuggaaucaaugggaguguaccaaauccucgccauuuauaguaccguugcuagcucccugguguuacugguaucucuaggugccaucucguucuggaugugcagcaacggcucccuccagugucgcauuugcauauga

SEQ ID NO: 134654 - RNA, 1701 nt, Artificial Sequence; identical to SEQ ID NO: 133316
  derived and/or modified CDS sequence (opt3) from hemagglutinin__InfluenzaA__AEA10303

SEQ ID NO: 134655 - RNA, 1701 nt, Artificial Sequence; identical to SEQ ID NO: 134170
  derived and/or modified CDS sequence (opt3) from hemagglutinin__InfluenzaA__AEA10313

SEQ ID NO: 134656 - RNA, 1701 nt, Artificial Sequence; identical to SEQ ID NO: 131881
  derived and/or modified CDS sequence (opt3) from hemagglutinin__InfluenzaA__AEA10323

SEQ ID NO: 134657 - RNA, 1701 nt, Artificial Sequence; identical to SEQ ID NO: 132269
  derived and/or modified CDS sequence (opt3) from hemagglutinin__InfluenzaA__AEA10339

SEQ ID NO: 134658 - RNA, 1701 nt, Artificial Sequence
  derived and/or modified CDS sequence (opt3) from hemagglutinin__InfluenzaA__AEA10349
augaaggccauccugauugugcuccuuuacaccuucgcuacagcaaacgccgacacucugugcauaggcuaucacgcgaauaacagcacggauaccgucgacacaguuuuggagaaaaaugugacuguaacccauuccgugaacuuacuggaagauaagcacaaugggaaacuauguaagcucagaggagucgcuccccugcaucuugguaaaugcaacaucgccggcuggauucuggggaauccugagugugaaucuuugucaacagcaaguagcugguccuacaucguggagaccucuucgucagacaacggaacuugcuauccaggcgauuuuauugacuacgaggagcucagggagcagcugagcaguguuuccucuuucgaacgguuugagaucuucccgaagacaagcuccuggcccaaucacgauucaaacaagggugugaccgccgcuuguccucaugcaggggccaaaaguuuuuauaagaaucugauauggcucgucaaaaagggaaacagcuacccaaaauuaucuaaguccuauaucaaugacaagggcaaagaagugcugguacuuuggggcauucaccaccccucaacgagcgcugaucaacagaguuuguaccagaacgccgacgcguacguuuucguggggacuucucgcuauuccaagaaauuuaagccugagaucgcaauucgaccaaaaguccgugaucaggagggaagaaugaauuacuauuggacccugguggaacccggugacaagaucacauucgaggccacuggcaaccuaguggucccuagguacgcuuuugccauggaacggaacgcagggagcggaauaauuaucucggauaccccaguucaugacugcaauacaaccugucaaacgccgaaaggcgcuauuaacacuucucuccccuuccagaauauccacccuaucacaauugguaagugcccaaaguaugugaaauccaccaagcugcgccuugccacugggcugagaaacguacccucaauacagaguaggggauuguuuggcgcgaucgccggcuucauugaagggggauggacagguaugguggacggcugguacggguaucaucaccagaaugaacaaggaagcggcuacgcagcugaucucaaauccacccagaacgccaucgacaagauaacgaauaaagucaacucugugauugagaagaugaauacccaguuuacagcuguugguaaggaguucaaccaccuggaaaaacggaucgagaauuuaaacaagaaaguggaugacggguuccuggauaucuggacuuacaaugccgaacuccuuguccuguuggagaacgaacgcacccuagacuaucaugauagcaaugugaagaaccuguacgagaaaguacgaucacagcucaagaacaaugcaaaggagauuggcaacggauguuuugaguucuaucacaaaugcgacaauacauguauggaaaguguuaagaacggcacuuacgauuauccuaaauacuccgaagaggccaagcugaauagagaagagaucgacggggugaaacuugagagcaccaggauuuaucaaauacuggcuaucuacucuacagucgcgucaaguuuggugcucgucgugagccugggagcaauuuccuuuuggaugugcucuaacgguucguuacagugccggaucuguaucuga

SEQ ID NO: 134659 - RNA, 1701 nt, Artificial Sequence; identical to SEQ ID NO: 132314
  derived and/or modified CDS sequence (opt3) from hemagglutinin__InfluenzaA__AEA30293

SEQ ID NO: 134660 - RNA, 1701 nt, Artificial Sequence
  derived and/or modified CDS sequence (opt3) from hemagglutinin__InfluenzaA__AEA48989
augaaggccauccuggugguccuccuuuacaccuucgcuacagcaaacgccgacacucugugcauuggcuaucacgcgaauaacagcacggauaccguugacacaguguuggagaaaaauguaacugugacccauuccgucaacuuacuggaagauaagcacaaugggaaacuauguaagcucagaggaguggcuccccugcaucuugguaaaugcaacauagccggcuggauccuggggaauccugagugugaaucuuugucaacagcaaguagcugguccuacauuguugagaccucuucgucagacaacggaacuugcuauccaggcgauuuuaucgacuacgaagaacucagggagcagcugagcaguguguccucuuucgaacgguuugagauuuucccgaagacaagcuccuggcccaaucacgaaucaaacaagggugucaccgccgcuuguccucaugcaggggcccgcaguuuuuauaaaaaucugaucuggcucgugaagaaaggaaacagcuacccaaaguuaucuaaauccuauauaaaugauaagggcaaggagguacugguucuuuggggcauccaccaccccucaacgagcgcugaccaacagaguuuguaccagaacgccgaugcguacguguucgucgggacuucucgauauuccaaaaaguuuaaaccugagauugcaauccguccaaaggugagagaccaggaaggaaggaugaauuacuauuggacccugguggagcccggugauaaaauuacauucgaagccacuggcaaccuagucguuccucgguacgcuuuugccauggagcgcaacgcagggagcggaaucauaauuucggacaccccagugcaugauugcaauacaaccugucaaacgccgaagggcgcuaucaacacuucucuccccuuccagaauauucacccuaucacaaucgguaaaugcccaaaguauguaaaguccaccaaacugagacuugccacugggcugaggaacgugcccucaauucagagucggggauuguuuggcgcgauagccggcuucaucgaagggggauggacagguauggucgacggcugguacggguaucaucaccagaaugagcaaggaagcggcuacgcagcugaccucaaguccacccagaacgccauugaugagaucacgaauaaagugaacucuguuauagaaaagaugaauacccaguuuacagcuguggguaaagaguucaaccaccuggaaaagcgcauugagaauuuaaacaagaaagucgacgauggguuccuggacaucuggacuuacaaugccgaacuccuugugcuguuggagaacgagcgaacccuagauuaucaugacagcaauguaaagaaccuguacgaaaaaguuagaucacagcucaagaacaaugcaaaagagaucggcaacggauguuuugaguucuaucacaagugcgauaauacauguauggagagugugaagaacggcacuuacgacuauccuaaauacuccgaagaggccaagcugaauagggaggaaauugauggggucaaacuugagagcacccggaucuaucaaauucuggcuauauacucuacaguggcgucaaguuugguccucgugguuagccugggagcaaucuccuuuuggaugugcucuaacgguucguuacagugccguauuuguaucuga

SEQ ID NO: 134661 - RNA, 1707 nt, Artificial Sequence
  derived and/or modified CDS sequence (opt3) from hemagglutinin__InfluenzaA__AEA50985
auggagaagaucgugcugcuccuugccauuauaaaccuggucaaaagcgaccagaucugcauuggcuaccacgcuaauaacuccaccgaacaaguugauacaaucauggagaagaaugugacuguaacgcaugcacaggacauuuuggaaaagacccacaacgggaaauuaugugaucuggacggagugaaaccccuaauccucagagauugcucugucgccgguuggcugcuuggcaauccuaugugugacgaguuccugaacgugccagaauggucauauauaguugagaagaucaauccggcgaacgauuugugcuaccccgggaauuuuaacgacuaugaggaacucaagcaucugcugaguaggauuaaucacuucgagaaaauccagauuaucccuaagagcuccuggucugaucaugaggcuucgucaggagugagcagugccuguccauaccagggccgguccuccuuuuuccgcaacgucguguggcucauuaaaaagaaugacgcauaucccacaauaaaaaucagcuacaacaauacuaaccaagaagauuuacugguacuuugggguauucaccacccuaacgacgccgcugagcagaccaaguuguaucagaauccaacaaccuacaucuccguugggacuucaacacugaaccuacgacucgugcccaagaucgcaacccguaguaaagucaauggacagagcggcagaauggaauuuuucuggacgauucugaagccuaacgaugccauaaauuuugagucuaacggcaauuucaucgcuccagaaaacgccuacaaaauugugaagaaaggggacuccacuaucaugaagucagagcuugaauauggaaauugcaacaccaaaugucaaacaccggugggugcgauaaauagcaguaugcccuuucauaacauucacccucugacuaucggcgagugcccaaaguacgucaagucuaauagguugguucucgcaaccgggcugcggaacucuccccagggagagcgcagaaggaaaaagcggggcuuauucggugccaucgcuggguuuauugaaggaggcuggcagggcaugguggacgggugguauggauaccaucacagcaaugagcaggguucgggcuaugccgcagauaaagaaucuacacaaaaggcuaucaacgggguaaccaacaaagucaauuccauuauagacaagaugaacacgcaguucgaggccgugggacgcgaauuuaauaaccuggagcgaagaaucgagaaucucaacaagaaaauggaagauggcuuccuugacguguggacuuacaaugcggagcuguugguucuaauggaaaacgagaggacacuggauuuccacgacucaaaugugaagaaccucuaugauaaaguccggcugcagcuucgugacaaugccaaggaacuggguaacggguguuuugaguucuaccaucgcugcgauaaugaguguauggaaagugugagaaacggcaccuacgacuauccucaauacagcgaggaauccagguugaaacgggaggagauuucuggaguaaagcucgaaagcaucggcaucuaucagauucugucaauauacaguacugcagcuuccagcuuagcccuggcuaucaugguugccgggcuaucucucuggaugugcucaaauggaagucugcagugccgaauuuguaucuga

SEQ ID NO: 134662 - RNA, 1701 nt, Artificial Sequence; identical to SEQ ID NO: 133581
  derived and/or modified CDS sequence (opt3) from hemagglutinin__InfluenzaA__AEA72704

SEQ ID NO: 134663 - RNA, 1701 nt, Artificial Sequence; identical to SEQ ID NO: 133581
  derived and/or modified CDS sequence (opt3) from hemagglutinin__InfluenzaA__AEA72715

SEQ ID NO: 134664 - RNA, 1701 nt, Artificial Sequence; identical to SEQ ID NO: 133581
  derived and/or modified CDS sequence (opt3) from hemagglutinin__InfluenzaA__AEA72726

SEQ ID NO: 134665 - RNA, 1701 nt, Artificial Sequence
  derived and/or modified CDS sequence (opt3) from hemagglutinin__InfluenzaA__AEA72740
augaaggccauccuggugguccuccuuuacaccuucgcuacagcaaacgccgacacucugugcauuggcuaucacgcgaauaacagcacggauaccguugacacaguguuggagaaaaauguaacugugacccauuccgucaacuuacuggaagauaagcacaaugggaaacuauguaagcucagaggaguggcuccccugcaucuugguaaaugcaacauagccggcuggauccuggggaauccugagugugaaucuuugucaacagcaaguagcugguccuacauuguugagaccucuucgucagacaacggaacuugcuauccaggcgauuuuaucgacuacgaggagcucagggagcagcugagcaguguguccucuuucgaacgguuugagauuuucccgaagacaagcuccuggcccaaucacgauucaaacaagggugucaccgccgcuuguccucaugcaggggccaaaaguuuuuauaagaaucugaucuggcucgugaaaaagggaaacagcuacccaaaauuaucuaaguccuauauaaaugacaagggcaaagaaguacugguucuuuggggcauccaccaccccucaacgagcgcugaucaacagaguuuguaccagaacgccgacgcguacguguucgucgggacuucucgcuauuccaagaaauuuaagccugagauugcaacccgaccaaaagugcgugaucaggagggaagaaugaauuacuauuggacacugguggaacccggugacaagaucacuuucgaggccaccggcaaccuagucguuccuagguacgcuuuugccauggaacggaacgcagggagcggaauuaucauaucggauacaccagugcaugacugcaauaccacgugucaaacuccgaaaggcgcuauuaacacaucucuccccuuccagaauauccacccuauuaccaucgguaagugcccaaaguauguaaaauccacuaagcugcgccuugccacagggcugagaaacgugcccucaauccagaguaggggauuguuuggcgcgauugccggcuucauagaagggggauggaccgguauggucgacggcugguacggguaucaucaccagaaugaacaaggaagcggcuacgcagcugaucucaaauccacgcagaacgccaucgacgagauuaccaauaaggugaacucuguuaucgagaaaaugaauacacaguuuacugcuguggguaaggaguucaaccaccuggaaaagcggauagaaaauuuaaacaaaaaggucgaugacggguuccuggauauuuggaccuacaaugccgagcuccuugugcuguuggaaaacgagcgcacacuagacuaucaugauagcaauguaaagaaccuguacgagaagguucgaaaccagcucaaaaauaacgcaaaggaaaucggcaauggauguuuugaguucuaucacaagugcgacaacacuuguauggaaucagugaaaaauggcaccuacgauuauccuaaguacagugaggaagccaaacugaacagagaggagaucgacggggucaaacuugaauccacaaggauuuaucaaauccuggcuauuuacagcaccguggcgucuucauugguccucgugguuagucugggagcaaucagcuuuuggaugugcuccaaugguucuuuacagugccggauauguauuuga

SEQ ID NO: 134666 - RNA, 1701 nt, Artificial Sequence
  derived and/or modified CDS sequence (opt3) from hemagglutinin__InfluenzaA__AEA72750
augaaggccauccuggugguccuccuuuacaccuucgcuacagcaaacgccgacacucugugcauuggcuaucacgcgaauaacagcacggauaccguugacacaguguuggagaaaaauguaacugugacccauuccgucaacuuacuggaagauaagcacaaugggaaacuauguaagcucagaggaguggcuccccugcaucuugguaaaugcaacauagccggcuggauccuggggaauccugagugugaaucuuugucaacagcaaguagcugguccuacauuguugagaccucuucgucagacaacggaacuugcuauccaggcguguuuaucgauuacgaggagcucagggagcagcugagcagugucuccucuuucgaacgguuugagauuuucccgaagacaagcuccuggcccaaucacgacucaaacaagggugugaccgccgcuuguccucaugcaggggccaaaaguuuuuauaagaaucugaucuggcucguuaaaaagggaaacagcuacccaaaauuaucuaaguccuauauaaaugauaagggcaaagaaguacuggugcuuuggggcauccaccaccccucaacgacugcugaccaacagagcuuguaccagaacgccgauaccuacgucuucguggggacaagucgcuauucuaagaaauuuaagccugagauugcgauccgaccaaaagugcgugaccaggagggaagaaugaauuacuauuggacucuggucgaacccggugauaagauuaccuucgaggcaacaggcaaccuaguugugccuagguacgccuuugcuauggaacggaacgccggguccggaaucauaauuagcgacaccccaguacaugauugcaauacgacuugucaaacaccgaaaggcgcaaucaacaccucgcuccccuuccagaauauucacccuaucacuaucgguaagugcccaaaguaugugaaaucuacaaagcugcgccuugcuaccgggcugagaaacguccccuccauucagucaaggggauuguuuggcgccauagcgggcuucaucgaagggggauggacggguaugguggacggcugguacggguaucaucaccagaaugaacaaggaaguggcuacgccgcagaccucaaaagcacccagaacgcuauugauaagaucacaaauaaaguuaacuccgugauagagaagaugaauacucaguuuaccgccgucgguaaggaguucaaccaccuggaaaaacggauugagaauuuaaacaagaaaguggacgauggguuccuggacaucuggacauacaaugcugaacuccuuguacuguuggagaacgaacgcacucuagauuaucaugacucuaauguuaagaaccuguacgagaaagugcgaaaccagcucaagaauaacgccaaggagaucggcaauggauguuuugaguucuaucacaaaugcgauaacaccuguauggaaagcgucaagaauggcacauacgacuauccuaaauacucagaagaggcaaagcugaacagagaagagauugauggggugaaacuugagaguaccaggaucuaucaaauucuggccauauacuccacugucgcuagcucuuuggugcucguugugucacugggagcgaucaguuuuuggaugugcagcaaugguuccuuacagugccggauuuguaucuga

SEQ ID NO: 134667 - RNA, 1701 nt, Artificial Sequence; identical to SEQ ID NO: 134483
  derived and/or modified CDS sequence (opt3) from hemagglutinin__InfluenzaA__AEA72759

SEQ ID NO: 134668 - RNA, 1701 nt, Artificial Sequence
  derived and/or modified CDS sequence (opt3) from hemagglutinin__InfluenzaA__AEA72777
augaaggccauccuggugguccuccuuuacacccuggcuacagcaaacgccgacacuuugugcauuggcuaucacgcgaauaacagcacggauaccguugacacaguguuagagaaaaauguaacugugacccauuccgucaaccugcuagaagauaagcacgacgggaaacucuguaagcugagaggaguggcuccccuucaucuggguaaaugcaauauagccggcuggaucuuggggaacccugagugugaaucucucucaacagcaaguagcugguccuacauuguugagaccucuucgucagauaauggaacuugcuauccaggcgacuucaucgauuacgaggagcugagggagcagcugagcaguguguccucuuuugaacgguucgagauuuuuccgaagacaagcuccuggcccaaccacgacucaaauaagggugucaccgccgcuuguccucaugcaggggccaaaaguuucuauaagaaccucaucugguuagugaaaaagggaaauagcuacccaaaacugucuaaguccuauauaaacgauaagggcaaagaaauccuuguauuguggggcauucaccaccccucaacgagcgcugaccaacagagucuguaccagaaugccgaugcguacguuuuuguggggacuucucgcuauuccaagaaauucaagccugagaucgcaauucgaccaaaaguccgugaccaggagggaagaaugaacuacuauuggacccuaguggaacccggugauaagaucacauuugaggccacuggcaaucucguggucccuagguacgcuuucgccauggaacggaacgcagggagcggaauaauuaucucggacaccccaguucaugacugcaacgcuacaugucaaaccccgaaaggcgccauuaauacgucucugcccuuucagaacauccacccuaucacuauugguaagugcccaaaguaugugaaauccacaaaacuucgccuggcgaccggguugagaaauguacccucaauacagaguaggggacucuucggcgccaucgcaggcuuuauugaagggggauggacugguaugguggauggcugguacggguaucaucaccagaacgaacaaggaagcggcuacgcugccgaccugaaguccacacagaaugcuaucgauaagauaaccaacaaagucaauucugugauugagaagaugaacacgcaguucaccgccguugguaaggaguuuaaucacuuagaaaaacggaucgagaaccugaauaagaaaguggacgauggguuccucgacaucuggacauacaacgcagaacuucuggucuugcuagagaaugaacgcacucuggauuaucaugacagcaacgugaagaaucucuacgagaaaguacgaucacagcugaagaacaacgccaaggagauuggcaauggauguuucgaauuuuaucacaaaugcgauaacaccuguauggagaguguuaagaauggcacauacgacuauccuaaauacuccgaagaggcuaaacuuaacagagaagagaucgauggggugaagcuggagagcacuaggauuuaucaaauauuggcgaucuacucuaccgucgcaucaagucucgugcuggucgugagcuuaggagccauuuccuucuggaugugcucuaaugguucgcugcagugccggaucuguaucuga

SEQ ID NO: 134669 - RNA, 1701 nt, Artificial Sequence; identical to SEQ ID NO: 134483
  derived and/or modified CDS sequence (opt3) from hemagglutinin__InfluenzaA__AEA72787

SEQ ID NO: 134670 - RNA, 1701 nt, Artificial Sequence; identical to SEQ ID NO: 133581
  derived and/or modified CDS sequence (opt3) from hemagglutinin__InfluenzaA__AEA73288

SEQ ID NO: 134671 - RNA, 1701 nt, Artificial Sequence; identical to SEQ ID NO: 133581
  derived and/or modified CDS sequence (opt3) from hemagglutinin__InfluenzaA__AEA73299

SEQ ID NO: 134672 - RNA, 1701 nt, Artificial Sequence; identical to SEQ ID NO: 133581
  derived and/or modified CDS sequence (opt3) from hemagglutinin__InfluenzaA__AEA73310

SEQ ID NO: 134673 - RNA, 1701 nt, Artificial Sequence
  derived and/or modified CDS sequence (opt3) from hemagglutinin__InfluenzaA__AEA73321
augaagaccaucauugcccugagcuacauacucugccuuguguucgcucagaaacugcccggcaacgacaauuccacagcaacuuuguguuuagggcaccaugccgucccuaacggaacgaucguuaagaccauuacaaaugaucaaaucgaggugacuaacgcgaccgaacugguacagucuucaaguacaggugagauuugcgacagcccacaccagauccuagauggcgaaaauuguacccucauagacgcucugcuuggggauccgcagugcgacggauuucaaaacaaaaagugggaucuguucguggagagauccaaagccuauucuaauuguuaccccuaugacgucccugauuacgcaucguugaggucacucguggccagcaguggcacucuggaauuuaacaaugaguccuucaacuggacagguguuacccagaaugggacgucuagcgcuugcauccggcgcuccaacaauucauuuuucagucgacugaacuggcucacucauuuaaauuuuaaguauccagcacugaacgugaccaugcccaacaaugagcaguucgacaaacuuuacauuuggggaguccaccauccuggcacagauaaggaccagaucuuuuuguaugcccaagcuagcggccguauuacugugucuaccaagagaucccagcaggccguaaucccaaacauagggucaaggccccggguucgcaauauuccuagcagaaucaguauuuacuggacaaucgugaaaccaggagauauccugcuaauuaacucuaccgguaaucucauagcgccgaggggcuacuucaagauccgguccgggaaaagcucgauuaugcgcucugacgcacccaucggaaaguguaacuccgaaugcauaacgccuaauggcucaauuccaaacgacaagcccuuucagaaugucaaccgaaucacuuauggugccuguccuagauacgugaaacaaaguacacugaaacuugcuaccgggaugaggaaugugccagagaagcagacucggggaaucuucggcgccauugcaggcuuuaucgaaaacgggugggagggaauggucgaugguugguauggcuuccgucaccagaauagcgaggggcgcggacaagcugccgaccugaaguccacacaggcggccauugaucagauaaacggcaaauugaauagacucaucgguaagaccaacgaaaaauuccaccagauugagaaggaauuuucugagguugaagggaggauccaagaccuggagaaguacguggaggauacgaaaaucgacuuauggagcuauaacgcagaacugcucguaacccuugagaaucagcauacaauugaucugacugacucagaaaugaacaaguuguucgagaaaaccaagaaacagcuacgggaaaaugcugaggauaugggcaacggaugcuuuacaauauaccacaagugugacaaugccugcaucggcaguauucgaaacgggacuuaugaucauaauguguaccgcgacgaggcucugaacaauagauuccagaucaagggagucgaacucaaauccgguuacaaggacuggauucuguggaucagcuuugccauaucuugcuuccuucuguguguggcauugcucggcuuuaucaugugggccugccaaaaagggaacauuagguguaauaucugcauuuga

SEQ ID NO: 134674 - RNA, 1701 nt, Artificial Sequence; identical to SEQ ID NO: 133581
  derived and/or modified CDS sequence (opt3) from hemagglutinin__InfluenzaA__AEA73332

SEQ ID NO: 134675 - RNA, 1701 nt, Artificial Sequence; identical to SEQ ID NO: 133581
  derived and/or modified CDS sequence (opt3) from hemagglutinin__InfluenzaA__AEA73343

SEQ ID NO: 134676 - RNA, 1701 nt, Artificial Sequence; identical to SEQ ID NO: 133581
  derived and/or modified CDS sequence (opt3) from hemagglutinin__InfluenzaA__AEA73354

SEQ ID NO: 134677 - RNA, 1701 nt, Artificial Sequence
  derived and/or modified CDS sequence (opt3) from hemagglutinin__InfluenzaA__AEA73365
augaagaccaucauugcccugagcuacacacucugccuuguguucgcucagaaacugcccggcaacgacaauuccacugcaacguuguguuuagggcaccaugccgucccuaacggaaccauaguuaagacaaucacuaaugaucaaauugaggugaccaacgcgacagaacugguacagucuucaaguaccggugagaucugcgacagcccacaccagauucuagauggcgaaaauuguacucucaucgacgcucugcuuggggauccgcagugcgacggauuucaaaacaaaaagugggaucuguucguggagagauccaaagccuauucuaauuguuaccccuaugacgucccugauuacgcaucguugaggucacucguggccagcaguggcacacuggaauuuaacaaugaguccuucaacuggaccgguguuacgcagaaugggacuucuagcgcuugcauacggcgcuccaacaauucauuuuucagucgacugaacuggcucacccauuuaaauuuuaaguauccagcacugaacgugacaaugcccaacaaugagcaguucgacaaguuguacaucuggggaguccaccauccuggcacugauaaagaccagauuuuucuuuaugcccaagcuagcggccguaucaccgugucuacaaagagaucccagcaggccguaauuccaaacaucgggucaaggccccggguucgcaauauaccuagcagaauuaguaucuacuggaccauugugaaaccaggagauauccugcuaaucaacucuacggguaaucucauugcgccgaggggcuacuucaagauacgguccgggaaaagcucgaucaugcgcucugacgcacccauuggaaaguguaacuccgaaugcaucacuccuaauggcucaauaccaaacgacaagcccuuucagaaugucaaccgaauuacauauggugccuguccuagauacgugaaacaaaguacccugaaacuugcuacugggaugaggaaugugccagagaagcagacacggggaaucuucggcgccaucgcaggcuuuauugaaaacgggugggagggaauggucgaugguugguauggcuuccgucaccagaauagcgaggggcgcggacaagcugccgaccugaaguccacccaggcggccaucgaucagauuaacggcaaauugaauagacucauagguaagacgaacgaaaaauuccaccagaucgagaaggaauuuucugagguugaagggaggauucaagaccuggagaaguacguggaggauaccaaaaucgacuuauggagcuauaacgcagaacugcucguagcucuugagaaucagcauacaaucgaucugacugacucagaaaugaacaaguuguucgagaaaaccaagaaacagcuacgggaaaaugccgaggauaugggcaacggaugcuuuacaauuuaccacaagugugacaaugcuugcauaggcaguauccgaaacgggacuuaugaucauaauguguaccgcgacgaggcccugaacaauagauuccagauuaagggagucgaacucaaauccgguuacaaggacuggauccuguggauuagcuuugcaaucucuugcuuccuucuguguguggccuugcucggcuuuauaaugugggcuugccaaaaagggaacaucagguguaauauuugcaucuga

SEQ ID NO: 134678 - RNA, 1701 nt, Artificial Sequence; identical to SEQ ID NO: 133581
  derived and/or modified CDS sequence (opt3) from hemagglutinin__InfluenzaA__AEA73376

SEQ ID NO: 134679 - RNA, 1701 nt, Artificial Sequence; identical to SEQ ID NO: 133581
  derived and/or modified CDS sequence (opt3) from hemagglutinin__InfluenzaA__AEA73387

SEQ ID NO: 134680 - RNA, 1701 nt, Artificial Sequence; identical to SEQ ID NO: 133581
  derived and/or modified CDS sequence (opt3) from hemagglutinin__InfluenzaA__AEA73398

SEQ ID NO: 134681 - RNA, 1701 nt, Artificial Sequence; identical to SEQ ID NO: 133581
  derived and/or modified CDS sequence (opt3) from hemagglutinin__InfluenzaA__AEA73409

SEQ ID NO: 134682 - RNA, 1701 nt, Artificial Sequence; identical to SEQ ID NO: 133581
  derived and/or modified CDS sequence (opt3) from hemagglutinin__InfluenzaA__AEA73420

SEQ ID NO: 134683 - RNA, 1701 nt, Artificial Sequence; identical to SEQ ID NO: 133581
  derived and/or modified CDS sequence (opt3) from hemagglutinin__InfluenzaA__AEA73452

SEQ ID NO: 134684 - RNA, 1701 nt, Artificial Sequence; identical to SEQ ID NO: 133581
  derived and/or modified CDS sequence (opt3) from hemagglutinin__InfluenzaA__AEA73463

SEQ ID NO: 134685 - RNA, 1701 nt, Artificial Sequence; identical to SEQ ID NO: 133581
  derived and/or modified CDS sequence (opt3) from hemagglutinin__InfluenzaA__AEA73474

SEQ ID NO: 134686 - RNA, 1701 nt, Artificial Sequence
  derived and/or modified CDS sequence (opt3) from hemagglutinin__InfluenzaA__AEA73485
augaagaccaucauugcccugagcuacauacucugccuuguguucgcucagaaacugcccggcaacgacaauuccacagcaacuuuguguuuagggcaccaugccgucccuaacggaacgaucguuaagaccauuacaaaugaucaaaucgaggugacuaacgcgaccgaacugguacagucuucaaguacaggugagauuugcgacagcccacaccagauccuagauggcgaaaauuguacccucauagacgcucugcuuggggauccgcagugcgacggauuucaaaacaaaaagugggaucuguucguggagagauccaaagcccauucuaauuguuaucccuacgacgucccugauuaugcaucguugaggucacucguggccagcaguggcacucuggaauuuaacaaugaguccuucaacuggacagguguuacccagaaugggacgucuagcgcuugcauccggcgcuccaacaauucauuuuucagucgacugaacuggcucacucacuuaaauuuuaaguacccagcacugaacgugaccaugcccaacaaugagcaguucgacaaacuuuauauuuggggaguccaucacccuggcacagauaaggaccagaucuuuuuguacgcccaagcuagcggccguauuacugugucuaccaagagaucccagcaggccguaaucccaaacauagggucaaggccccggguucgcaauauuccuagcagaaucaguauuuauuggacaaucgugaaaccaggagauauccugcuaauuaacucuaccgguaaucucauagcgccgaggggcuacuucaagauccgguccgggaaaagcucgauuaugcgcucugacgcacccaucggaaaguguaacuccgaaugcauaacgccuaauggcucaauuccaaacgacaagcccuuucagaaugucaaccgaaucacuuacggugccuguccuagauaugugaaacaaaguacacugaaacuugcuaccgggaugaggaaugugccagagaagcagacucggggaaucuucggcgccauugcaggcuuuaucgaaaacgggugggagggaauggucgaugguugguacggcuuccgucaccagaauagcgaggggcgcggacaagcugccgaccugaaguccacacaggcggccauugaucagauaaacggcaaauugaauagacucaucgguaagaccaacgaaaaauuccaucagauugagaaggaauuuucugagguugaagggaggauccaagaccuggagaaguauguggaggauacgaaaaucgacuuauggagcuacaacgcagaacugcucguagcucuugagaaucagcacaccauugaucugacagacucagaaaugaacaaguuguucgagaaaacuaagaaacagcuacgggaaaaugccgaggauaugggcaacggaugcuuuaccauauaucauaagugugacaaugcuugcaucggcaguauucgaaacgggacauacgaucacaauguguaucgcgacgaggcccugaacaauagauuccagaucaagggagucgaacucaaauccgguuacaaggacuggauucuguggaucagcuuugcaauaucuugcuuccuucuguguguggccuugcucggcuuuaucaugugggcuugccaaaaagggaacauuagguguaauaucugcauuuga

SEQ ID NO: 134687 - RNA, 1701 nt, Artificial Sequence; identical to SEQ ID NO: 133581
  derived and/or modified CDS sequence (opt3) from hemagglutinin__InfluenzaA__AEA73496

SEQ ID NO: 134688 - RNA, 1701 nt, Artificial Sequence; identical to SEQ ID NO: 133581
  derived and/or modified CDS sequence (opt3) from hemagglutinin__InfluenzaA__AEA73507

SEQ ID NO: 134689 - RNA, 1701 nt, Artificial Sequence; identical to SEQ ID NO: 133581
  derived and/or modified CDS sequence (opt3) from hemagglutinin__InfluenzaA__AEA73518

SEQ ID NO: 134690 - RNA, 1701 nt, Artificial Sequence; identical to SEQ ID NO: 133581
  derived and/or modified CDS sequence (opt3) from hemagglutinin__InfluenzaA__AEA73529

SEQ ID NO: 134691 - RNA, 1701 nt, Artificial Sequence; identical to SEQ ID NO: 133581
  derived and/or modified CDS sequence (opt3) from hemagglutinin__InfluenzaA__AEA73540

SEQ ID NO: 134692 - RNA, 1701 nt, Artificial Sequence; identical to SEQ ID NO: 133581
  derived and/or modified CDS sequence (opt3) from hemagglutinin__InfluenzaA__AEA73551

SEQ ID NO: 134693 - RNA, 1701 nt, Artificial Sequence; identical to SEQ ID NO: 133581
  derived and/or modified CDS sequence (opt3) from hemagglutinin__InfluenzaA__AEA73562

SEQ ID NO: 134694 - RNA, 1698 nt, Artificial Sequence
  derived and/or modified CDS sequence (opt3) from hemagglutinin__InfluenzaA__AEA73573
augaaggugaaacugcucguccuucugugcaccuucacagccacuuacgcugacacgaucuguauuggcuaucacgcaaacaauagcaccgauacaguugacacuguguuggagaagaacguaaccgugacacauuccgucaauuuacuggaaaacucucacaaugggaaacuaugccuccugaagggaauagcgccccuucagcuggguaacuguucaguggccggcuggaucuuggggaauccugagugcgaacuccugauuaguaaagagagcugguccuacaucguugaaaagccaaacccggagaauggaaccuguuaucccggccauuuugcugauuacgaggaacugagagagcaacucucuucggugagcucauucgaaagguuugagauuuucccuaaggagaguuccuggccaaaccacacugucacaggugugucugccagcugcucccauaauggggaaucaaguuuuuaucggaacuuacuguggcuuaccgagaaaaauggauuguaccccaaccugagcaagucuuaugcaaauaacaaagaaaaggagguucuaguacucuggggcgugcaccacccuccaaacaucggcgaccagaaaacgcuguaccauacugaaaaugccuacgucuccguggugucaagccacuauagucgcaaguucacccccgagauagcuaagcgaccuaaaguccgugaucaggaggggagaaucaacuacuauuggacacuucuggaaccaggagacacuauuaucuuugaggcaaaugguaacuugauugccccgagguacgcuuucgcccucucucggggcuuuggguccggaaucauaaauagcaacgcgcccauggauaagugugacgcaaaaugccagaccccucaaggcgccauuaauucgucucugccauuccagaacguucaucccgugacaaucggugaauguccuaaguauguacgcuccgcuaaauuaagaauggugaccgggcugaggaauauuccaucaauccagagucggggacucuuuggcgccaucgcaggcuucauugaagggggauggacggguauggucgauggcugguacggguaucaccaccagaacgagcaaggaagcggcuacgcugccgaccagaaguccacucagaaugcgauaaacgguaucacaaauaaagugaacucuguuauugagaagaugaauacccaguuuacugccguggggaaggaguucaacaaacuugaacgccgaauggagaaccugaauaagaaagucgaugacggcuucaucgauauauggacauacaacgcagaauugcuagugcugcucgagaaugaaagaacccuggacuuucaugacagcaacguaaagaaucuuuaugagaaaguuaagucacaacugaagaacaaugcuaaagagauuggaaacggcugcuucgaauuuuaccacaaguguaaugaugagugcauggaaagugugaaaaacgggacguaugacuaccccaaguauuccgaggagagcaaauugaauagggaaaagaucgauggagucaagcucgagucuauggguguguaccagauccuggccauuuauucaaccgucgcuaguagcuuagugcugcuaguuucccucggcgccaucucuuucuggaugugcucgaacgggagccugcagugucggauuugcauauga

SEQ ID NO: 134695 - RNA, 1698 nt, Artificial Sequence
  derived and/or modified CDS sequence (opt3) from hemagglutinin__InfluenzaA__AEA73584
augaaggugaaacugcucguccuucugugcaccuucacagccacuuacgcugacacgaucuguauuggcuaucacgcaaacaauagcaccgauacaguugacacuguguuggagaagaacguaaccgugacacauuccgucaauuuacuggaaaacucucacaaugggaaacuaugccuccugaagggaauagcgccccuucagcuggguaacuguucaguggccggcuggaucuuggggaauccugagugcgaacuccugauuaguaaagagagcugguccuacaucguugaaaagccaaacccggagaauggaaccuguuaucccggccauuuugcugauuacgaggaacugagagagcaacucucuucggugagcucauucgaaagguuugagauuuucccuaaggagaguuccuggccaaaccacacugucacaggugugucugccagcugcucccauaauggggaaucaaguuuuuaucggaacuuacuguggcuuaccggcaaaaauggauuguaccccaaccugagcaagucuuaugcaaauaacaaagagaaggaaguucuaguacucuggggcgugcaccacccuccaaacaucgucgaccagaaaacgcuguaccgcacugagaaugccuacguguccguggucucaagccauuauagucgaaaguucacccccgaaauagcuaagcguccuaaaguuagaaaccaggaggggaggaucaauuacuauuggacacuucuggagccaggagauacuauuaucuuugaagcaaacgguaauuugauugccccgcgguacgcuuucgcccucucucgcggcuuuggguccggaaucauaaacagcaaugcgcccauggacaagugugaugcaaaaugccagaccccucaaggcgccauuaacucgucucugccauuccagaaugugcaccccguaacaaucggugaguguccuaaguaugugagauccgcuaaauuaaggauggucaccgggcugcggaacauuccaucaauccagagucgcggacucuuuggcgccaucgcaggcuucauugaagggggauggacggguaugguggacggcugguacggguaucaucaccagaaugagcaaggaagcggcuacgcugccgaucagaaguccacucagaacgcgauaaaugguaucacaaacaaaguuaauucugugauugaaaagaugaacacccaguuuacugccgucgggaaggaguucaacaaacuugagcgaagaauggaaaaucugaacaagaaaguggacgauggcuucaucgacauauggacauacaaugcagaguugcuaguacugcucgaaaacgagaggacccuggauuuucacgacagcaauguuaagaaccuuuaugaaaaagugaagucacaacugaagaauaacgcuaaagagauuggaaauggcugcuucgaguuuuaccauaaguguaacgacgaaugcauggagagugucaaaaaugggacguaugauuaccccaaguauuccgaagagagcaaauugaaccgggagaagaucgacggagugaagcucgaaucuaugggugucuaccagauccuggccauuuauucaaccguggcuaguagcuuaguucugcuagugucccucggcgccaucucuuucuggaugugcucgaaugggagccugcagugucguauuugcauauga

SEQ ID NO: 134696 - RNA, 1698 nt, Artificial Sequence
  derived and/or modified CDS sequence (opt3) from hemagglutinin__InfluenzaA__AEA73595
augaaggugaaacugcucguccuucugugcaccuucacagccacuuacgcugacacgaucuguauuggcuaucacgcaaacaauagcaccgauacaguugacacuguguuggagaagaacguaaccgugacacauuccgucaauuuacuggaaaacucucacaaugggaaacuaugccuccugaagggaauagcgccccuucagcuggguaacuguucaguggccggcuggaucuuggggaauccugagugcgaacuccugauuaguaaagagagcugguccuacaucguugaaaagccaaacccggagaauggaaccuguuaucccggccauuuugcugauuacgaggaacugagagagcaacucucuucggugagcucauucgaaagguuugagauuuucccuaaggagaguuccuggccaaaccacacugucacaggugugucugccagcugcucccauaauggggaaucaaguuuuuaucggaacuuacuguggcuuaccguaaagaauggauuguaccccaaccugagcaaaucuuaugcaaauaacaaagagaaggaaguucuagugcucuggggcguccaccacccuccaaacaucguggaccagaaaacgcuguaccauacugagaaugccuacguguccgucguuucaagccacuauagucgcaaguucacccccgaaauagcuaagcgaccuaaagugcgugaucaggagggcagaaucaacuacuauuggacacuucuggagccaggggacacuauuaucuuugaagcaaauggaaacuugauugccccgagguacgcuuucgcccucucucgggguuuuggcuccgggaucauaaauagcaacgcgcccauggauaagugugacgcaaaaugccagaccccucgcggagccauuaauucgucucugccauuccaaaacguacaucccgugacaaucggcgaguguccuaaguaugucagauccgcuaaauuaaggauggugaccggucugcggaauauuccaucaauccagagucgcgggcucuuuggagccaucgcaggcuucauugaaggcggguggacgggaaugguugaugguugguacggcuaucaccaccagaacgagcaggggagcggauacgcugccgaccaaaaguccacucagaaugcgauaaacggcaucacaaauaaagugaacucugucauugaaaagaugaauacccaguuuacugccguggguaaggaguucaacaaacuugagcgaagaauggaaaaccugaauaagaaaguagaugacggguucaucgauauauggacauacaacgcagaguugcuaguucugcucgaaaaugagaggacccuggacuuucaugacagcaacgugaagaaucuuuaugaaaaagucaagucacagcugaagaacaaugcuaaagagauuggcaacggaugcuucgaguuuuaccacaaguguaaugaugaaugcauggagagugugaaaaacggcacguaugacuaccccaaguauuccgaagagagcaaauugaaucgggagaagaucgauggggucaagcucgaaucuaugggaguguaccaaauccuggccauuuauucaaccguugcuaguagcuuagugcugcuaguaucccucggugccaucucuuucuggaugugcucgaacggcagccugcagugucguauuugcauauga

SEQ ID NO: 134697 - RNA, 1698 nt, Artificial Sequence; identical to SEQ ID NO: 134001
  derived and/or modified CDS sequence (opt3) from hemagglutinin__InfluenzaA__AEA73606

SEQ ID NO: 134698 - RNA, 1698 nt, Artificial Sequence; identical to SEQ ID NO: 131179
  derived and/or modified CDS sequence (opt3) from hemagglutinin__InfluenzaA__AEA73617

SEQ ID NO: 134699 - RNA, 1698 nt, Artificial Sequence; identical to SEQ ID NO: 131664
  derived and/or modified CDS sequence (opt3) from hemagglutinin__InfluenzaA__AEA73628

SEQ ID NO: 134700 - RNA, 1698 nt, Artificial Sequence; identical to SEQ ID NO: 134020
  derived and/or modified CDS sequence (opt3) from hemagglutinin__InfluenzaA__AEA73639

SEQ ID NO: 134701 - RNA, 1698 nt, Artificial Sequence; identical to SEQ ID NO: 131179
  derived and/or modified CDS sequence (opt3) from hemagglutinin__InfluenzaA__AEA73650

SEQ ID NO: 134702 - RNA, 1698 nt, Artificial Sequence; identical to SEQ ID NO: 131664
  derived and/or modified CDS sequence (opt3) from hemagglutinin__InfluenzaA__AEA73661

SEQ ID NO: 134703 - RNA, 1698 nt, Artificial Sequence
  derived and/or modified CDS sequence (opt3) from hemagglutinin__InfluenzaA__AEA73672
augaaggugaaacugcucguccuucugugcaccuucacagccacuuuugcugacacgaucuguauuggcuaccacgcaaacaauagcaccgauacaguugacacuguguuggagaagaacguaaccgugacacauuccgucaauuuacuggaaaacucucacaaugggaaacuaugccuccugaagggaauagcgccccuucagcuggguaacuguucaguggccggcuggaucuuggggaauccugagugcgaacuccugauuaguaaagagagcugguccuauaucguugaaaagccaaacccggagaauggaaccuguuaccccggccauuucgcugauuaugaggaacugagagagcaacucucuucggugagcucauuugaaagguucgagauuuuuccuaaggagaguuccuggccaaaccacacugucacaggugugucugccagcugcucccauaauggggaaucaaguuucuaccggaacuuacuguggcuuaccguaaagaauggauuguaucccaaccugagcaaaucuuacgcaaauaacaaagagaaggaaguucuagugcucuggggcguccaccacccuccaaacaucguggaccagaaaacgcuguaucgcacugagaaugccuacguguccgucguuucaagccauuacagucgaaaguuuacccccgaaauagcuaagcguccuaaagugagagaucaggagggcaggaucaacuauuacuggacacuucuggagccaggggacacuauuaucuucgaagcaaauggaaacuugauugccccgcgguaugcuuuugcccucucucgcgguuucggcuccgggaucauaaauagcaacgcgcccauggauaagugugacgcaaaaugccagaccccuagaggagccauuaauucgucucugccauuucaaaacguacaccccgugacaaucggcgaguguccuaaguacgucagguccgcuaaauuacggauggugaccggucugcgcaauauuccaucaauccagagucgaggacucuucggggccaucgcaggcuuuauugaaggcggguggacgggaaugguugaugguugguauggcuaccaucaccagaacgagcaggggagcggauaugcugccgaccaaaaguccacucagaaugcgauaaacggcaucacaaauaaagugaacucugucauugaaaagaugaauacccaguucacugccguggguaaggaguucaacaaacuugagagaaggauggaaaaccugaauaagaaaguagaugacggguuuaucgauauauggacauacaacgcagaguugcuaguucugcucgaaaaugagcggacccuggacuuccacgacagcaacgugaagaaucuuuacgaaaaagucaagucacagcugaagaacaaugcuaaagagauuggcaacggaugcuuugaguucuaucauaaguguaaugaugaaugcauggagagugugaaaaacggcacguacgacuaucccaaguacuccgaagagagcaaauugaaucgugagaagaucgauggggucaagcucgaaucuaugggaguguaucaaauccuggccauuuacucaaccguugcuaguagcuuagugcugcuaguaucccucggugccaucucuuuuuggaugugcucgaacggcagccugcagugucgcauuugcauauga

SEQ ID NO: 134704 - RNA, 1698 nt, Artificial Sequence; identical to SEQ ID NO: 131664
  derived and/or modified CDS sequence (opt3) from hemagglutinin__InfluenzaA__AEA73683

SEQ ID NO: 134705 - RNA, 1698 nt, Artificial Sequence
  derived and/or modified CDS sequence (opt3) from hemagglutinin__InfluenzaA__AEA73694
augaaggugaaacugcucguccuucugugcaccuucacagccacuuacgcugacacgaucuguauuggcuaucacgcaaacaauagcaccgauacaguugacacuguguuggagaagaacguaaccgugacacauuccgucaauuuacuggaaaacucucacaaugggaaacuaugccuccugaagggaauagcgccccuucagcuggguaacuguucaguggccggcuggaucuuggggaauccugagugcgaacuccugauuaguaaagagagcugguccuacaucguugaaaagccaaacccggagaauggaaccuguuaucccggccauuuugcugauuacgaggaacugagagagcaacucucuucggugagcucauucgaaagguuugagauuuucccuaaggagaguuccuggccaaaccacacugucacaggugugucugccagcugcucccauaauggggaaucaaguuuuuaucggaacuuacuguggcuuaccguaaagaauggauuguaccccaaccugagcaaaucuuaugcaaauaacaaagagaaggaaguucuagugcucuggggcguccaccacccuccaaacaucguggaccagaaaacgcuguaccgcacugagaaugccuacguguccgucguuucaagccauuauagucgaaaguucacccccgaaauagcuaagcguccuaaagugagagaucaggagggcaggaucaacuacuauuggacacuucuggagccaggggacacuauuaucuuugaagcaaauggaaacuugauugccccgcgguacgcuuucgcccucucucgcgguuuuggcuccgggaucauaaauagcaacgcgcccauggauaagugugacgcaaaaugccagaccccuagaggagccauuaauucgucucugccauuccaaaacguacaccccgugacaaucggcgaguguccuaaguaugucagguccgcuaaauuacggauggugaccggucugcgcaauauuccaucaauccagagucgagggcucuuuggagccaucgcaggcuucauugaaggcggguggacgggaaugguugaugguugguacggcuaucaucaccagaacgagcaggggagcggauacgcugccgaccaaaaguccacucagaaugcgauaaacggcaucacaaauaaagugaacucugucauugaaaagaugaauacccaguuuacugccguggguaaggaguucaacaaacuugagagaaggauggaaaaccugaauaagaaaguagaugacggguucaucgauauauggacauacaacgcagaguugcuaguucugcucgaaaaugagcggacccuggacuuucacgacagcaacgugaagaaucuuuaugaaaaagucaagucacagcugaagaacaaugcuaaagagauuggcaacggaugcuucgaguuuuaccauaaguguaaugaugaaugcauggagagugugaaaaacggcacguaugacuaccccaaguauuccgaagagagcaaauugaaucgugagaagaucgauggggucgaacucgagucuaugggaguguaccaaauccuggccauuuauucaaccguugcuaguagcuuagugcugcuaguaucccucggugccaucucuuucuggaugugcucgaacggcagccugcagugucgcauuugcauauga

SEQ ID NO: 134706 - RNA, 1698 nt, Artificial Sequence; identical to SEQ ID NO: 131664
  derived and/or modified CDS sequence (opt3) from hemagglutinin__InfluenzaA__AEA73705

SEQ ID NO: 134707 - RNA, 1698 nt, Artificial Sequence; identical to SEQ ID NO: 131179
  derived and/or modified CDS sequence (opt3) from hemagglutinin__InfluenzaA__AEA73716

SEQ ID NO: 134708 - RNA, 1698 nt, Artificial Sequence; identical to SEQ ID NO: 131179
  derived and/or modified CDS sequence (opt3) from hemagglutinin__InfluenzaA__AEA73727

SEQ ID NO: 134709 - RNA, 1698 nt, Artificial Sequence; identical to SEQ ID NO: 131179
  derived and/or modified CDS sequence (opt3) from hemagglutinin__InfluenzaA__AEA73738

SEQ ID NO: 134710 - RNA, 1698 nt, Artificial Sequence; identical to SEQ ID NO: 131179
  derived and/or modified CDS sequence (opt3) from hemagglutinin__InfluenzaA__AEA73749

SEQ ID NO: 134711 - RNA, 1698 nt, Artificial Sequence
  derived and/or modified CDS sequence (opt3) from hemagglutinin__InfluenzaA__AEA73760
augaaggugaaacugcucguccuucugugcaccuucacagccacuuacgcugacacgaucuguauuggcuaucacgcaaacaauagcaccgauacaguugacacuguguuggagaagaacguaaccgugacacauuccgucaauuuacuggaaaacucucacaaugggaaacuaugccuccugaagggaauagcgccccuucagcuggguaacuguucaguggccggcuggaucuuggggaauccugagugcgaacuccugauuaguaaagagagcugguccuacaucguugaaaagccaaacccggagaauggaaccuguuaucccggccauuuugcugauuacgaggaacugagagagcaacucucuucggugagcucauucgaaagguuugagauuuucccuaaggagaguuccuggccaaaccacacugucacaggugugucugccagcugcucccauaauggggaaucaaguuuuuaucggaacuuacuguggcuuaccguaaagaauggauuguaccccaaccugagcaaaucuuaugcaaauaacaaagagaaggaaguucuagugcucuggggcguccaccacccuccaaacaucguggaccagaaaacgcuguaccgcacugagaaugccuacguguccgucguuucaagccauuauagucgaaaguucacccccgaaauagcuaagcguccuaaaaucagagaucaggagggcaggauuaacuacuauuggacacuucuggagccaggggacacuaucauuuuugaagcaaauggaaacuugaucgccccgcgguacgcuuucgcccucucucgcgguuuuggcuccgggauaauuaauagcaacgcgcccauggauaagugugacgcaaaaugccagaccccuagaggagccaucaauucgucucugccauuccaaaacgugcaccccguaacaauuggcgaguguccuaaguaugugagguccgcuaaauuacggauggucaccggucugcgcaauaucccaucaauccagagucgagggcucuuuggagccauugcaggcuucauagaaggcggguggacgggaaugguggaugguugguacggcuaucaucaccagaacgagcaggggagcggauacgcugccgaccaaaaguccacucagaaugcgaucaacggcauuacaaauaaaguuaacucugugaucgaaaagaugaauacccaguuuacugccgucgguaaggaguucaacaaacuugagagaaggauggaaaaccugaauaagaaaguggaugacggguucauagauauuuggacauacaacgcagaguugcuaguacugcucgaaaaugagcggacccuggacuuucacgacagcaacguuaagaaucuuuaugaaaaagugaagucacagcugaagaacaaugcuaaagagaucggcaacggaugcuucgaguuuuaccauaaguguaaugaugaaugcauggagagugucaaaaacggcacguaugacuaccccaaguauuccgaagagagcaaauugaaucgugagaagaucgauggggugaagcucgaaucuaugggagucuaccaaauucuggccaucuauucaaccguggcuaguagcuuaguucugcuagugucccucggugccauuucuuucuggaugugcucgaacggcagccugcagugucgcauaugcaucuga

SEQ ID NO: 134712 - RNA, 1701 nt, Artificial Sequence; identical to SEQ ID NO: 130717
  derived and/or modified CDS sequence (opt3) from hemagglutinin__InfluenzaA__AEA73771

SEQ ID NO: 134713 - RNA, 1701 nt, Artificial Sequence; identical to SEQ ID NO: 132347
  derived and/or modified CDS sequence (opt3) from hemagglutinin__InfluenzaA__AEA73781

SEQ ID NO: 134714 - RNA, 1701 nt, Artificial Sequence; identical to SEQ ID NO: 132269
  derived and/or modified CDS sequence (opt3) from hemagglutinin__InfluenzaA__AEA73791

SEQ ID NO: 134715 - RNA, 1701 nt, Artificial Sequence; identical to SEQ ID NO: 130897
  derived and/or modified CDS sequence (opt3) from hemagglutinin__InfluenzaA__AEA73801

SEQ ID NO: 134716 - RNA, 1701 nt, Artificial Sequence; identical to SEQ ID NO: 131881
  derived and/or modified CDS sequence (opt3) from hemagglutinin__InfluenzaA__AEA73811

SEQ ID NO: 134717 - RNA, 1701 nt, Artificial Sequence; identical to SEQ ID NO: 132439
  derived and/or modified CDS sequence (opt3) from hemagglutinin__InfluenzaA__AEA73821

SEQ ID NO: 134718 - RNA, 1701 nt, Artificial Sequence
  derived and/or modified CDS sequence (opt3) from hemagglutinin__InfluenzaA__AEA73831
augaaggccauccuggugguccuccuuuacaccuucgcuacagcaaacgccgacacucugugcauuggcuaucacgcgaauaacagcacggauaccguugacacaguguuggagaaaaauguaacugugacccauuccgucaacuuacuggaagauaagcacaaugggaaacuauguaagcucagaggagugacaccccugcaucuugguaaaugcaacauagcuggcuggauccuggggaauccugagugugaaucuuugucaaccgccaguagcugguccuacauuguugagacuucuucgucagacaacggaacaugcuauccaggcgauuuuaucgacuacgaggagcucagggagcagcugagcaguguguccucuuucgaacgguuugagauuuucccgaagaccagcuccuggcccaaucacgauucaaacaagggugucacggcagccuguccucaugcuggggcaaaaaguuuuuauaagaaucugaucuggcucgugaaaaagggaaacagcuacccaaaauuaucuaaguccuauauaaaugacaagggcaaagaaguacugguucuuuggggcauccaccaccccucaacuagcaccgaucaacagaguuuguaccagaacgccgacgcuuacguguucgucgggacaucucgcuauuccaagaaauuuaagccugagauugccauccgaccaaaagugcgugaucaggagggaagaaugaauuacuauuggacucugguggaacccggugacaagauuaccuucgaggcgacaggcaaccuagucguuccuagguacgcauuugccauggaacggaacgcugggagcggaaucauaauuucggauaccccagugcaugacugcaauacgacuugucaaacaccgaaaggcgccaucaacaccucucuccccuuccagaauauucacccuaucacuaucgguaagugcccaaaguauguaaaauccacaaagcugcgccuugcaaccgggcugagaaacgugcccucaauucagaguaggggauuguuuggcgcuauagccggcuucaucgaagggggauggacggguauggucgacggcugguacggguaucaucaccagaaugaacaaggaagcggcuacgcggccgaucucaaauccacccagaacgcaauugacaagaucacaaauaaagugaacucuguuauagagaagaugaauacucaguuuaccgcuguggguaaggaguucaaccaccuggaaaaacggauugagaauuuaaacaagaaagucgaugacggguuccuggauaucuggacauacaaugccgaacuccuugugcuguuggagaacgaacgcacucuagacuaucaugauagcaauguaaagaaccuguacgagaaaguucgaucacagcucaagaacaaugcuaaggagaucggcaacggauguuuugaguucuaucacaaaugcgacaauaccuguauggaaagugugaagaacggcacauacgauuauccuaaauacuccgaagaggccaagcugaauagagaagagauugacggggucaaacuugagagcaccaggaucuaucaaauucuggcaauauacucuacuguggccucaaguuugguccucgugguuagccugggagcuaucuccuuuuggaugugcucuaacgguucguuacagugccggauuuguaucuga

SEQ ID NO: 134719 - RNA, 1701 nt, Artificial Sequence
  derived and/or modified CDS sequence (opt3) from hemagglutinin__InfluenzaA__AEA73841
augaaggccauccuggugguccuccuuuacaccuucgcuacagcaaacgccgacacucugugcauuggcuaucacgcgaauaacagcacggauaccguugacacaguguuggagaaaaauguaacugugacccauuccgucaacuuacuggaagauaagcacaaugggaaacuauguaagcucagaggaguggcuccccugcaucuugguaaaugcaacauagccggcuggauccuggggaauccugagugugaaucuuugucaacagcaaguagcugguccuacauuguugagaccucuucgucagacaacggaacuugcuauccaggcgauuuuaucaauuacgaagaacucagggagcagcugagcaguguguccucuuucgaacgguuugagauuuucccgaagacaagcuccuggcccaaccacgacucaaauaagggugucaccgccgcuuguccucaugcaggggccaaaaguuuuuauaagaaccugaucuggcucgugaaaaagggaaauagcuacccaaaauuaucuaaguccuauauaaacgauaagggcaaagaaguacugguucuuuggggcauccaccaccccucaacgagcgcugaccaacagaguuuguaccagaaugccgaugcguacguguucgucgggacuucucgcuauuccaagaaauuuaagccugagauugcaauccgaccaaaagugcgugaccaggagggaagaaugaacuacuauuggacccugguggaacccggugauaagauuacauucgaggccacuggcaaccuagucguuccuagguacgcuuuugccauggaacggaaugcagagagcgggaucauaauuucggacaccccagugcaugauugcaacacaaccugucaaacgccgaaaggagcuaucaauacuucucuccccuuccagaacauucacccuaucacaaucggcaagugcccaaaguauguaaaauccaccaagcugcgccuugccacuggucugagaaaugugcccucaauucagaguaggggguuguuuggagcgauagccggcuucaucgaaggcggguggacaggaauggucgacgguugguacggcuaucaucaccagaacgagcaagggagcggauacgcagcugaccucaaauccacccagaaugccauugauaagaucacgaacaaaguuaauucugugguggagaagaugaacacccaguuuacagcugucggcaaggaguucaaucaccuggagaaacggauagaaaacuuaaauaagaaaguggacgaugguuuccuggacauuuggacuuacaacgccgagcuccuuguacuguuggaaaaugagcgcacccuagauuaucaugacagcaacguuaagaaccuguacgagaaagugcgaucacagcucaagaauaacgcaaaggaaaucgggaauggcuguuuugaguucuaucacaaaugcgauaacacauguauggaaagugucaagaauggaacuuacgacuauccuaaauacuccgaggaagccaagcugaacagagaggagaucgauggcgugaaacuugaaagcaccaggauuuaucaaauccuggcuauuuacucuacagucgcgucaaguuuggugcucguugugagccugggggcaauauccuuuuggaugugcucuaauggaucguuacagugccggaucuguauuuga

SEQ ID NO: 134720 - RNA, 1701 nt, Artificial Sequence; identical to SEQ ID NO: 132347
  derived and/or modified CDS sequence (opt3) from hemagglutinin__InfluenzaA__AEA73851

SEQ ID NO: 134721 - RNA, 1701 nt, Artificial Sequence
  derived and/or modified CDS sequence (opt3) from hemagglutinin__InfluenzaA__AEA73861
augaaggccauccuggugguccuccuuuacaccuucgcuacagcaaacgccgacacucugugcauuggcuaucacgcgaauaacagcacggauaccguugacacaguguuggagaaaaauguaacugugacccauuccgucaacuuacuggaagauaagcacaaugggaaacuauguaagcucagaggaguggcuccccugcaucuuggugagugcaacauagccggcuggauccuggggaauccugaaugugagucuuugucaacagcaaguagcugguccuacauuguugaaaccucuucgucagacaacggaacuugcuauccaggcgauuuuaucgacuacgaggagcucagggaacagcugagcaguguguccucuuucgagcgguuugaaauuuucccgaaaacaagcuccuggcccaaucacgauucaaacaagggugucaccgccgcuuguccucaugcaggggccaagaguuuuuauaaaaaucugaucuggcucgugaagaaaggaaacagcuacccaaaguuaucuaaauccuauauaaaugacaagggcaaggagguacugguucuuuggggcauccaccaccccucaacgagcgcugaucaacagaguuuguaccagaacgccgacgcguacguguucgucgggacuucucgcuauuccaaaaaguuuaaaccugagauugcaauccgaccaaaggugcgugaucaggaaggaagaaugaauuacuauuggacccugguggagcccggugacaaaauuacauucgaagccacuggcaaccuagucguuccuagguacgcuuuugccauggagcggaacgcagggagcggaaucauaauuucggauaccccagugcaugacugcaauacaaccugucaaacgccgaagggcgcuaucaacacuucucuccccuuccagaauguacacccuauuacaaucgguaaaugcccaaaguaugugaaguccaccaaacugcgccuugccacugggcugagaaacguccccucaauccagaguaggggauuguuuggcgcgauugccggcuucauagaagggggauggacagguaugguggacggcugguacggguaucaucaccagaaugagcaaggaagcggcuacgcagcugaucucaaguccacccagaacgccaucgacgagauuacgaauaaaguuaacucugugaucgaaaagaugaauacccaguuuacagcugucgguaaagaguucaaccaccuggaaaagcggauagagaauuuaaacaagaaaauugaugacggguuccuggauaucuggacuuacaaugccgaacuccuugugcuguuggagaacgagcgcacccuagacuaucaugauagcaauguaaagaaccuguacgaaaaaguucgaucacagcucaagaacaaugcaaaagagaucggcaacggauguuuugaguucuaucacaagugcgacaauacauguauggaaagugugaagaacggcacuuacgauuauccuaaauacuccgaagaggccaagcugaauagagaggaaauugacggggucaaacuugagagcaccaggaucuaucaaauucuggcuauauacucuacaguggcgucaaguuugguccucgugguuagccugggagcaaucuccuuuuggaugugcucuaacgguucguuacagugccggauuuguaucuga

SEQ ID NO: 134722 - RNA, 1701 nt, Artificial Sequence; identical to SEQ ID NO: 132589
  derived and/or modified CDS sequence (opt3) from hemagglutinin__InfluenzaA__AEA73871

SEQ ID NO: 134723 - RNA, 1701 nt, Artificial Sequence; identical to SEQ ID NO: 132589
  derived and/or modified CDS sequence (opt3) from hemagglutinin__InfluenzaA__AEA73881

SEQ ID NO: 134724 - RNA, 1701 nt, Artificial Sequence; identical to SEQ ID NO: 132269
  derived and/or modified CDS sequence (opt3) from hemagglutinin__InfluenzaA__AEA73891

SEQ ID NO: 134725 - RNA, 1701 nt, Artificial Sequence
  derived and/or modified CDS sequence (opt3) from hemagglutinin__InfluenzaA__AEA73901
augaacgccauccuggugguccuccuuuacaccuucgcuacagcaaaugccgacacucugugcauuggcuaucacgcgaacaauagcacggauaccguugacacauuguuagagaagaacgugacuguaacccauuccgugaaucugcuagaagauaaacacaacgggaagcucuguaaacugagaggagucgcuccccuucaucuggguaagugcaauauagccggcuggaucuuggggaacccugagugugaaucucucucaacagcaaguagcugguccuacauuguggagaccucuucgucagacaauggaacuugcuauccaggcgauuuuaucgacuacgaggagcugagggagcagcugagcaguguuuccucuuucgaacgguuugagauuuucccgaaaacaagcuccuggcccaaccacgauucaaauaagggugugaccgccgcuuguccucaugcaggggccaagaguuuuuauaaaaaccucaucugguuagucaagaaaggaaauagcuacccaaagcugucuaaauccuauauaaacgacaagggcaaggaagugcuuguauuguggggcauccaccaccccucaacgagcgcugaucaacagagucuguaccagaaugccgacgcguacguuuucguggggacuucucgcuauuccaaaaaguuuaaaccugagauugcaauccgaccaaagguccgugaucaggagggaagaaugaacuacuauuggacccuaguggaacccggugacaaaauuacauucgaggccacuggcaaccucguggucccuagguacgcuuuugccauggaacggaaugcagggagcggaaucauaauuucggauaccccaguucaugacugcaacacaaccugucaaacgccgaagggcgcuaucaauacuucucugcccuuccagaacauucacccuaucacaaucgguaaaugcccaaaguaugugaaguccaccaaacuucgccuggccacuggguugagaaauguacccucaauucagaguaggggacucuuuggcgcgauagccggcuucaucgaagggggauggacagguaugguggacggcugguacggguaucaucaccagaacgaacaaggaagcggcuacgcagcugaucugaaguccacccagaaugccauugacgagaucacgaacaaaauaaauucugucauugagaagaugaacacccaguuuacagcuguggguaaagaguucaaucacuuagaaaagcggaucgaaaaccugaauaagaaaguugaugacggguuccucgauaucuggacuuacaacgccgagcuucugguguugcuagaaaaugagcgcacccuggacuaucaugauagcaacgucaagaaccucuacgagaaagugcgaucacagcugaagaauaacgcaaaagaaauuggcaauggauguuuugaguucuaucacaagugcgacaacacauguauggaaaguguaaagaauggcacuuacgauuauccuaaauacuccgaggaagccaaacuuaacagagaggagaucgacgggguuaagcuggaaagcaccaggauuuaucaaauauuggcuaucuacucuacaguggcgucaagucucguccugguggucagcuuaggagcaauuuccuuuuggaugugcucuaaugguucgcugcagugccggaucuguaucuga

SEQ ID NO: 134726 - RNA, 1701 nt, Artificial Sequence; identical to SEQ ID NO: 131881
  derived and/or modified CDS sequence (opt3) from hemagglutinin__InfluenzaA__AEA73911

SEQ ID NO: 134727 - RNA, 1701 nt, Artificial Sequence; identical to SEQ ID NO: 132589
  derived and/or modified CDS sequence (opt3) from hemagglutinin__InfluenzaA__AEA73921

SEQ ID NO: 134728 - RNA, 1701 nt, Artificial Sequence; identical to SEQ ID NO: 132347
  derived and/or modified CDS sequence (opt3) from hemagglutinin__InfluenzaA__AEA73931

SEQ ID NO: 134729 - RNA, 1701 nt, Artificial Sequence; identical to SEQ ID NO: 132347
  derived and/or modified CDS sequence (opt3) from hemagglutinin__InfluenzaA__AEA73961

SEQ ID NO: 134730 - RNA, 1701 nt, Artificial Sequence
  derived and/or modified CDS sequence (opt3) from hemagglutinin__InfluenzaA__AEA73971
augaaggccauccuggugguccuccuuuacaccuucgcuacagcaaacgccgacacucugugcauuggcuaucacgcgaauaacagcacggauaccguugacacaguguuggagaaaaauguaacugugacccauuccgucaacuuacuggaagauaagcacaaugggaaacuauguaagcucagaggaguggcuccccugcaucuugguaaaugcaacauagccggcuggauccuggggaauccugagugugaaucuuugucaacagcaaguagcugguccuacauuguugagaccucuucgucagacaacggaacuugcuauccaggcgauuuuaucgacuacgaagaacucagggagcagcugagcaguguguccucuuucgaacgguuugagauuuucccgaagacaagcuccuggcccaaucacgauucaaacaagggugucaccgccgcuuguccucaugcaggggccaaaaguuuuuauaagaaucugaucuggcucgugaaaaagggaaacagcuacccaaaauuaucuaaguccuauauaaaugacaagggcaaagaaguacugguucuuuggggcauccaccaccccucaacgagcgcugaucaacagaguuuguaccagaacgccgacgcguacguguucgucgggacuucucgcuauuccaagaaauuuaagccugagauugcaauccgaccaaaagugcgugagcaggaaggaagaaugaauuacuauuggacccugguggagcccggugauaagauuacauucgaagccacuggcaaccuagucguuccuagguacgcuuuugccauggagcggaacgcagggagcggaaucauaauuucggacaccccagugcaugauugcaauacaaccugucaaacgccgaaaggcgcuaucaacacuucucuccccuuccagaauauucacuccaucacaaucgguaagugcccuaaguauguaaaaucaaccaagcugcgccuugccacugggcugagaaacgugccaaguauucagagcaggggauuguuuggcgcgauagccggcuucaucgaagggggauggacagguauggucgacggcugguacggguaucaucaccagaaugagcaaggauccggcuacgcagcugaccagaaaucuacccagaacgccauugaugagaucacgaauaaggugaacagcguuauagagaaaaugaauacccaguuuacagcuguggguaaggaguucaaccaccucgaaaagcggauugagaaucugaacaaaaaggucgacgauggguucuuagacaucuggacuuacaaugccgaacugcucgugcuucuggagaacgagcgcaccuuggauuaucaugacucaaauguuaaaaaccuauacgaaaagguacgaagucaacugaaaaacaaugcaaaggagaucggcaacggauguuuugaguucuaucacaagugcaauaacacauguauggaauccgugaaaaauggcacuuacgauuaucccaaguacagcgaagaggccaaacucaacagagaggaaauugacggggucaagcuggagucuaccaggaucuaucagauucuugcuauauacucaacaguggcgaguagccuggucuuggugguuucccucggagcaaucucuuuuuggaugugcucgaaugguagccugcagugccggauuuguaucuga

SEQ ID NO: 134731 - RNA, 1701 nt, Artificial Sequence; identical to SEQ ID NO: 132347
  derived and/or modified CDS sequence (opt3) from hemagglutinin__InfluenzaA__AEA73981

SEQ ID NO: 134732 - RNA, 1701 nt, Artificial Sequence
  derived and/or modified CDS sequence (opt3) from hemagglutinin__InfluenzaA__AEA73991
augaaggccauccuggugguccuccuuuacaccuucgcuacagcaaacgccgacacucugugcauuggcuaucacgcgaauaacagcacggauaccguugacacaguguuggagaaaaauguaacugugacccauuccgucaacuuacuggaagauaagcacaaugggaaacuauguaagcucagaggaguggcuccccugcaucuugguaaaugcaacauagccggcuggauccuggggaauccugagugugaaucuuugucaacagcaaguagcugguccuacauuguugagaccucuucgucagacaacggaacuugcuauccaggcgauuuuaucgacuacgaagaacucagggagcagcugagcaguguguccucuuucgaaaaguuugagauuuucccgaagacaagcuccuggcccaaucacgauucaaacaaaggugucaccgccgcuuguccucaugcaggggccaagaguuuuuauaaaaaucugaucuggcucgugaagaaaggaaacagcuacccaaaguuaucuaaguccuauauaaaugacaaaggcaaggaaguacugguucuuuggggcauccaccaccccucaacgagcgcugaucaacagaguuuguaccagaacgccgacucuuacguguucgucgggacuucccgguauagcaaaaaguuuaaaccugagauugcgauccgcccaaaggugcgagaucaggagggacguaugaauuacuauuggacccugguggaacccggugacaaaauuacauucgaggcaacuggcaaccuagucguuccuagauacgccuuugcuauggaaaggaacgccgggucgggaaucauaauuucugauaccccagugcaugacugcaauacaaccugucaaacgccggagggcgcaaucaacacuucccuccccuuccagaauauucacccuaucacaaucgguaagugcccaaaguauguaaaaucaaccaagcugcggcuugcuacugggcugcgcaacgugcccaguauucagagcagaggauuguuuggcgccauagcgggcuucaucgaagggggauggacagguauggucgacggcugguacggguaucaucaccagaaugagcaaggauccggcuacgccgcagaucucaaaucuacccagaacgcuauugacgagaucacgaauaaggugaacagcguuauagaaaagaugaauacccaguuuacagccguggguaaggaguucaaccaccuggaaaagaggauugagaauuuaaacaaaaaggucgaugacggguuccuggauaucuggacuuacaaugcugaacuccuugugcuguuggagaacgagcggacccuagacuaucaugauucaaauguuaaaaaccuguacgaaaagguacgcagucagcucaaaaacaaugccaaggagaucggcaacggauguuuugaguucuaucacaagugcgacaauacauguauggaguccgugaaaaacggcacuuacgauuauccuaaguacagcgaagaggcaaaacugaaucgagaggaaauugacggggucaaacuugagucuaccagaaucuaucaaauucuggccauauacucaacaguggcuaguagcuugguccucgugguuucccugggagcgaucucuuuuuggaugugcucgaacgguagcuuacagugcaggauuuguaucuga

SEQ ID NO: 134733 - RNA, 1701 nt, Artificial Sequence; identical to SEQ ID NO: 132330
  derived and/or modified CDS sequence (opt3) from hemagglutinin__InfluenzaA__AEA74001

SEQ ID NO: 134734 - RNA, 1701 nt, Artificial Sequence
  derived and/or modified CDS sequence (opt3) from hemagglutinin__InfluenzaA__AEA74011
augaaggccauccuggugguccuccuuuacaccuucgcuacagcaaacgccgacacucugugcauuggcuaucacgcgaauaacagcacggauaccguugacacaguguuggagaaaaauguaacugugacccauuccgucaacuuacuggaagauaagcacaaugggaaacuauguaagcucagaggaguggcuccccugcaucuugguaaaugcaacauagccggcuggauccuggggaauccugagugugaaucuuugucaacagcaaguagcugguccuacauuguugagaccucuucgucagacaacggaacuugcuauccaggcgauuuuaucgacuacgaagaacucagggagcagcugagcaguguguccucuuucgaacgguuugagauuuucccgaagacaagcuccuggcccaaucacgauucaaacaagggugucaccgccgcuuguccucaugcaggggccaaaaguuuuuauaagaaucugaucuggcucgugaaaaagcgcaacagcuacccaaaauuaucucaauccuauauaaaugacaagggaaaggaaguacugguucuuuggggcauccaccaccccucaacgagcgcugaucagcagaguuuguaccagaacgccgacgcguacguguucgucggcacuucucgauauuccaaaaaguuuaaaccugagauugcaauccguccaaaggugagagaucaagaggggaggaugaauuacuauuggacccugguggaacccggagacaaaauuacauucgaggccacugguaaccuagucguuccucgguacgcuuuugccauggaacgcaacgcaggcagcgggaucauaauuucggauaccccagugcaugacugcaauacaaccugucagacgccgaagggagcuaucaacacuucucuccccuuccagaauauucacccuaucacaaucggcaaaugcccaaaguauguaaaguccaccaaacugagacuugccacuggucugaggaacgugcccucaauucagagucggggguuguuuggagcgauagccggcuucaucgagggcggguggacaggaauggucgacgguugguacggcuaucaucaccaaaaugaacaggggagcggauacgcagcugaucucaaguccacccagaacgccauugacaaaaucacgaauaaggugaacucuguuauagagaaaaugaauacccaguuuacagcugugggcaaggaguucaaccaccuggaaaagcgcauugagaauuuaaacaaaaaggucgaugacgguuuccuggauaucuggacuuacaaugccgaacuccuugugcuguuggagaacgaacgaacccuagacuaucaugauagcaauguaaagaaccuguacgagaagguuagaucacaacucaaaaacaaugcaaaggagaucgggaacggcuguuuugaguucuaucacaagugcgacaauacauguauggagaguauuaaaaacggaacuuacgauuauccuaaguacuccgaagaggccaaacugaauagggaagagaucgacggcgugaaacuugagagcacccggauuuaucagauacuggcuaucuacucuacagucgcgucaaguuuggugcucgucgugagccugggggcaauuuccuuuuggaugugcucuaacggaucguuacagugccguaucuguaucuga

SEQ ID NO: 134735 - RNA, 1701 nt, Artificial Sequence
  derived and/or modified CDS sequence (opt3) from hemagglutinin__InfluenzaA__AEA74021
augaaggccauccuggugguccuccuuuacaccuucgcuacagcaaacgccgacacucugugcauuggcuaucacgcgaauaacagcacggauaccguugacacaguguuggagaaaaauguaacugugacccauuccgucaacuuacuggaagauaagcacaaugggaaacuauguaagcucagaggaguggcuccccugcaucuugguaaaugcaacauagccggcuggauccuggggaauccugagugugaaucuuugucaacagcaaguagcugguccuacauuguugagaccucuucgucagacaacggaacuugcuauccaggcgauuuuaucgacuacgaggagcucagggagcagcugagcaguguguccucuuucgaacgguuugagauuuucccgaagacaagcuccuggcccaaucacgauucaaacaagggugucaccgccgcuuguccucaugcaggggccaaaaguuuuuauaagaaucugaucuggcucgugaaaaagggaaacagcuacccaaaauuaucucaauccuauauaaaugacaagggcaaggaaguacugguucuuuggggcauccaccaccccucaacgagcgcugaucagcagaguuuguaccagaacgccgacgcguacguguucgucgggacuucucgcuauuccaaaaaguuuaaaccugagauugcaauccgaccaaaggugcgugaucaagagggaagaaugaauuacuauuggacccugguggaacccggugacaaaauuacauucgaggccacuggcaaccuagucguuccuagguacgcuuuugccauggaacggaacgcagggagcggaaucauaauuucggauaccccagugcaugacugcaauacaaccugucagacgccgaagggcgcuaucaacacuucucuccccuuccagaauauucacccuaucacaaucgguaaaugcccaaaguauguaaaguccaccaaacugcgccuugccacugggcugagaaacgugcccucaauucagaguaggggauuguuuggcgcgauagccggcuucaucgaagggggauggacagguauggucgacggcugguacggguaucaucaccaaaaugaacagggaagcggcuacgcagcugaucucaaguccacccagaacgccauugacaaaaucacgaauaaggugaacucuguuauagagaaaaugaauacccaguuuacagcuguggguaaggaguucaaccaccuggaaaagcggauugagaauuuaaacaaaaaggucgaugacggguuccuggauaucuggacuuacaaugccgaacuccuugugcuguuggagaacgaacgcacccuagacuaucaugauagcaauguaaagaaccuguacgagaagguucgaucacaacucaaaaacaaugcaaaggagaucggcaacggauguuuugaguucuaucacaagugcgacaauacauguauggaaaguauuaaaaacggcacuuacgauuauccuaaguacuccgaagaggccaaacugaauagagaagagaucgacggggugaaacuugagagcaccaggauuuaucagauacuggcuaucuacucuacagucgcgucaaguuuggugcucgucgugagccugggagcaauuuccuuuuggaugugcucuaacgguucguuacagugccggaucuguaucuga

SEQ ID NO: 134736 - RNA, 1701 nt, Artificial Sequence
  derived and/or modified CDS sequence (opt3) from hemagglutinin__InfluenzaA__AEA74031
augaaggccauccuggugguccuccuuuacaccuucgcuacagcaaacgccgacacucugugcauuggcuaucacgcgaauaacagcacggauaccguugacacaguguuggagaaaaauguaacugugacccauuccgucgauuuacuggaagacaagcacaacgggaaacuauguaagcucagaggaguggcuccccugcaucuugguaaaugcaauauagccggcuggauccuggggaacccugagugugaaucuuugucaacagcaaguagcugguccuacauuguugagaccucuucgucagauaauggaacuugcuauccaggcgacuuuaucgauuacgaggagcucagggagcagcugagcaguguguccucuuucgaacgguuugagauuuucccgaagacaagcuccuggcccaaccacgacucaaauaagggugucaccgccgcuuguccucaugcaggggccaaaaguuuuuauaacaaucugaucuggcucgugaagaaaggaaacagcuacccaaaguuaaauaaaucuuauauaaacgauaagggcaaggaaguacugguucuuuggggcauccaccaccccuccacgucaacugaccaacagagcuuguaccagaaugcugaugccuacguguucgucgggaccagucgcuauucuaaaaaguuuaaaccugagauugcgauccgaccaaaggugcguaaccaggagggaagaaugaacuacuauuggacacugguggaacccggugacaaaauuacuuucgaggcaaccggcaaucuagucguuccuagguacgccuuugcuauggaacggaacgccggguccggaaucauaauuagcgauacaccaauccaugacugcaauaccacgugucaaacuccgaagggcgcaauuaacacaucgcuccccuuccagaauauccacccuaucaccauugguaaaugcccaaaguaugugaagucuacuaaacugcgccuugcuacagggcugagaaacguacccuccauacagucaaggggauuguuuggcgccaucgcgggcuucauugaagggggauggaccgguaugguggacggcugguacggguaucaucaccagaaugaacaaggaaguggcuacgccgcagaucucaagagcacgcagaacgcuaucgacgagauaaccaauaaagucaacuccgugauugagaagaugaauacacaguuuacugccguugguaaagaguucaaccaccuggaaaagcggaucgaaaauuuaaacaagaaaguggaugacggguuccuggauaucuggaccuacaaugcugagcuccuuguccuguuggaaaacgagcgcacacuagacuaucaugauucuaacgugaagaaucuguacgagaaaguacgaagccagcucaagaacaaugccaaagaaauuggcaacggauguuuugaguucuaucacaagugcgacaauacuuguauggaaucaguuaagaacggcaccuacgauuauccuaaauacagugaggaagcaaagcugaauagagaggagaucgacggggugaaacuugaauccacaaggauuuaucaaauacuggccaucuacagcaccgucgcuucuucauuggugcucgucgugagucugggagcgauuagcuuuuggaugugcuccaacgguucuuuacagugccggaucuguaucuga

SEQ ID NO: 134737 - RNA, 1701 nt, Artificial Sequence
  derived and/or modified CDS sequence (opt3) from hemagglutinin__InfluenzaA__AEA74035
augaaggccauccuggugguccuccuuuacaccuucgcuacagcaaacgccgacacucugugcauuggcuaucacgcgaauaacagcacggauaccguugacacaguguuggagaaaaauguaacugugacccauuccgucgauuuacuggaagacaagcacaacgggaaacuauguaagcucagaggaguggcuccccugcaucuugguaaaugcaauauagccggcuggauccuggggaacccugagugugaaucuuugucaacagcaaguagcugguccuacauuguugagaccucuucgucagauaauggaacuugcuauccaggcgacuuuaucgauuacgaggagcucagggagcagcugagcaguguguccucuuucgaacgguuugagauuuucccgaagacaagcuccuggcccaaccacgacucaaauaagggugucaccgccgcuuguccucaugcaggggccaaaaguuuuuauaacaaucugaucuggcucgugaagaaaggaaacagcuacccaaaguuaaauaaaucuuauauaaacgauaagggcaaggaaguacugguucuuuggggcauccaccaccccuccacgucaacugaccaacagagcuuguaccagaaugcugaugccuacguguucgucgggaccagucgcuauucuaaaaaguuuaaaccugagauugcgauccgaccaaaggugcgugaccaggagggaagaaugaacuacuauuggacacugguggaacccggugauaaaauuacuuucgaggcaaccggcaaccuagucguuccuagguacgccuuugcuauggaacggaaugccggguccggaaucauaauuagcgacacaccaauccaugacugcaacaccacgugucaaacuccgaagggcgcaauuaauacaucgcuccccuuccagaacauccacccuaucaccauugguaaaugcccaaaguaugugaagucuacuaaacugcgccuugcuacagggcugagaaauguacccuccauacagucaaggggauuguuuggcgccaucgcgggcuucauugaagggggauggaccgguaugguggauggcugguacggguaucaucaccagaacgaacaaggaaguggcuacgccgcagaccucaagagcacgcagaaugcuaucgaugagauaaccaacaaagucaauuccgugauugagaagaugaacacacaguuuacugccguugguaaagaguucaaucaccuggaaaagcggaucgaaaacuuaaauaagaaaguggacgauggguuccuggacaucuggaccuacaacgcugagcuccuuguccuguuggaaaaugagcgcacacuagauuaucaugacucuaacgugaagaaccuguacgagaaaguacgaagccagcucaagaauaacgccaaagaaauuggcaauggauguuuugaguucuaucacaagugcgauaacacuuguauggaaucaguuaagaauggcaccuacgacuauccuaaauacagugaggaagcaaagcugaacagagaggagaucgauggggugaaacuugaauccacaaggauuuaucaaauacuggccaucuacagcaccgucgcuucuucauuggugcucgucgugagucugggagcgauuagcuuuuggaugugcuccaaugguucuuuacagugccggaucuguaucuga

SEQ ID NO: 134738 - RNA, 1701 nt, Artificial Sequence; identical to SEQ ID NO: 130482
  derived and/or modified CDS sequence (opt3) from hemagglutinin__InfluenzaA__AEA77299

SEQ ID NO: 134739 - RNA, 1701 nt, Artificial Sequence; identical to SEQ ID NO: 134483
  derived and/or modified CDS sequence (opt3) from hemagglutinin__InfluenzaA__AEB21316

SEQ ID NO: 134740 - RNA, 1701 nt, Artificial Sequence; identical to SEQ ID NO: 134502
  derived and/or modified CDS sequence (opt3) from hemagglutinin__InfluenzaA__AEB21326

SEQ ID NO: 134741 - RNA, 1701 nt, Artificial Sequence; identical to SEQ ID NO: 134483
  derived and/or modified CDS sequence (opt3) from hemagglutinin__InfluenzaA__AEB21338

SEQ ID NO: 134742 - RNA, 1701 nt, Artificial Sequence; identical to SEQ ID NO: 134502
  derived and/or modified CDS sequence (opt3) from hemagglutinin__InfluenzaA__AEB21348

SEQ ID NO: 134743 - RNA, 1701 nt, Artificial Sequence; identical to SEQ ID NO: 131636
  derived and/or modified CDS sequence (opt3) from hemagglutinin__InfluenzaA__AEB40206

SEQ ID NO: 134744 - RNA, 1701 nt, Artificial Sequence; identical to SEQ ID NO: 131636
  derived and/or modified CDS sequence (opt3) from hemagglutinin__InfluenzaA__AEB66895

SEQ ID NO: 134745 - RNA, 1698 nt, Artificial Sequence
  derived and/or modified CDS sequence (opt3) from hemagglutinin__InfluenzaA__AEB71102
auggacgugcccgucuucguucugcucaugcuuaccagcaucugcgugcaggccgauagaauuuguguaggcuaccuguccacaaacucuucagagaggguggacacuuuguuagaaaauaacgucccugugacgaguagcguugaucugguggagaccaaucacacagggacuuauugcucccuaggagguauaucuccaguccaucucggcgacuguucguuugaaggguggaucgugggaaacccggcuugcgcaucaaaucugggcauucgggaguggagcuaccuuaucgaagaucccagugccccucacggucuguguuauccaggggaguuggacaacaauggagagcuccgccaucuguucuccggcauucgaucuuuuagccguaccgaacugaucgcgcccacauccuggggcgagguaaacgaugggguuaccgcugccugccaagacaagggagcaucaaguuucuacagaaaucucgugugguuugucgaaagggguaacaaauauccugugauacggcgcacuuacaauaacacaaccggcagagauguguuagucaucugggggauucaccauccaguuagcacggacgaggccaggaagcuguaugcuaaagauaaucccuacacucuugugucuaccuccucauggagccggaaguacaacuuggagacaggaacucgcccuggcuauaauggucagaaaaguuggaccaagaucuacugguaucugaugcacccaggggacucuauuuccuucgaaagcaacggaggccuacucgcaccgaaguacggcuauaucauagaggaauacgggaaaggacgaauuuuucagucgagaaucaggauugccaaguguaacacaaaaugccagaccucuguagguggcaucaauacgaacaagacuuuccaaaauaucgagcggaacgcucugggggauugucccaaauauauuaaguccggacagcuuaagcuggccacaggcuugcguaaugugccugcgauaucaaaccgcggucucuuuggggcaaucgccggcuucauugaaggaggcuggccagggcugaucaauggaugguacgguuuucagcaccagaacgagcaaggcauggggauggcugccgacaaagagaguacccagaaggcaauagaccagauuacuacaaaaaucaauaacaucauugaaaagaugaauggaaacuacgauagcaucagaggcgaguucucccaggucgaacaaaggauuaauauguuagcugaccggauagaugacgccgugaccgauguuuggucuuauaacgcgaaacugcucgugcuucuggagaaugacaagacguuggauaugcaugacgccaacguccgaaaccuacacgaucaggugcgcagaguacugaggaccaaugcaaucgacgaagguaacgggugcuuugagcuccugcauaaauguaaugauagcugcauggagacaauucggaacggcacuuacaaucacaucgaauaugaggaagagucaaaacuuaagcgccaggaaaucgagggaauuaaacugaagagugacgacaacguuuacaaggcuuuguccauauauagcugcaucgccucuucaauugugcucgucggccugaucuuagcuuucauuaugugggccuguaguagcgggaauugcagauucaacaucuguauauga

SEQ ID NO: 134746 - RNA, 1698 nt, Artificial Sequence
  derived and/or modified CDS sequence (opt3) from hemagglutinin__InfluenzaA__AEB71896
augaaggugaaacugcucguccuucugugcaccuucacagccacuuacgcugacacgaucuguauuggcuaucacgcaaacaauagcaccgauacaguugacacuguguuggagaagaacguaaccgugacacauuccgucaauuuacuggaaaacucucacaaugggaaacuaugccuccugaagggaauagcgccccuucagcuggguaacuguucaguggccggcuggaucuuggggaauccugagugcgaacuccugauuaguaaagagagcugguccuacaucguugaaaagccaaacccggagaauggaaccuguuaucccggccauuuugcugauuacgaggaacugagagagcaacucucuucggugagcucauucgaaagguuugagauuuucccuaaggagaguuccuggccaaaccacacugucacaggugugucugccagcugcucccauaauggggaaucaaguuuuuaucggaacuuacuguggcuuaccggcaaaaauggauuguaccccaaccugagcaagucuuaugcaaauaacaaagagaaggaaguucuaguacucuggggcgugcaccacccuccaaacaucgucgaccagaaaacgcuguaccgcacugagaaugccuacguguccguggucucaagccauuauagucgaaaguucacccccgaaauagcuaagcguccuaaaguuagagaucaggaggggaggaucaacuacuauuggacacuucuggagccaggagacacuauuaucuuugaagcaaaugguaacuugauugccccgcgguacgcuuucgcccucucucgcggcuuuggguccggaaucauaaauagcaacgcgcccaugggcaagugugaugcaaaaugccagaccccucaaggugccauuaauucgucucugccauuccagaacgugcaccccguaacaaucggggaguguccuaaguaugugagauccgcuaaauuaaggauggucaccggacugcggaauauuccaucaauccagagucgcggccucuuuggcgccaucgcaggguucauugaaggagguuggacgggcaugguggacgggugguacggauaucaucaccagaacgagcaaggcagcgguuacgcugccgaucagaaguccacucagaaugcgauaaacgggaucacaaauaaaguuaacucugugauugaaaagaugaauacccaguuuacugccgucggcaaggaguucaacaaacuugagcgaagaauggaaaaccugaauaagaaaguggacgauggauucaucgacauauggacauacaacgcagaguugcuaguacugcucgaaaaugagaggacccuggauuuucacgacagcaacguuaagaaucuuuaugaaaaagugaagucacaacugaagaacaaugcuaaagagauuggcaacgggugcuucgaguuuuaccauaaguguaaugacgaaugcauggagagugucaaaaacggaacguaugauuaccccaaguauuccgaagagagcaaauugaauaaggagaagaucgacggugugaaacucgaaucuaugggcgucuaccagauccuggccauuuauucaaccguggcuaguagcuuaguucugcuagugucccucggggccaucucuuucuggaugugcucgaacggaagccugcagugucggauuugcauauga

SEQ ID NO: 134747 - RNA, 1701 nt, Artificial Sequence; identical to SEQ ID NO: 130959
  derived and/or modified CDS sequence (opt3) from hemagglutinin__InfluenzaA__AEB71916

SEQ ID NO: 134748 - RNA, 1701 nt, Artificial Sequence; identical to SEQ ID NO: 130482
  derived and/or modified CDS sequence (opt3) from hemagglutinin__InfluenzaA__AEB71925

SEQ ID NO: 134749 - RNA, 1701 nt, Artificial Sequence; identical to SEQ ID NO: 130482
  derived and/or modified CDS sequence (opt3) from hemagglutinin__InfluenzaA__AEB71936

SEQ ID NO: 134750 - RNA, 1701 nt, Artificial Sequence; identical to SEQ ID NO: 130482
  derived and/or modified CDS sequence (opt3) from hemagglutinin__InfluenzaA__AEB71947

SEQ ID NO: 134751 - RNA, 1698 nt, Artificial Sequence; identical to SEQ ID NO: 134020
  derived and/or modified CDS sequence (opt3) from hemagglutinin__InfluenzaA__AEB71958

SEQ ID NO: 134752 - RNA, 1701 nt, Artificial Sequence; identical to SEQ ID NO: 133467
  derived and/or modified CDS sequence (opt3) from hemagglutinin__InfluenzaA__AEB71969

SEQ ID NO: 134753 - RNA, 1701 nt, Artificial Sequence
  derived and/or modified CDS sequence (opt3) from hemagglutinin__InfluenzaA__AEB71980
augaagaccaucauugcccugagcugcauacucugucuuguguucgcucagaaacugcccggcaacgacaauuccacagcaacuuugugcuuagggcaccaugccgucccuaacggaacgaucguuaagaccauuacaaaugaucaaaucgaggugacuaacgcgaccgaacugguacagucuucaaguacaggugagauuugugacagcccacaccagauccuagauggcgaaaauugcacccucauagacgcucugcuuggggauccgcagugugacggauuucaaaacaaaaagugggaucuguucguggagagauccaaagccuacucuaauugcuaucccuacgacgucccugauuaugcaucguugaggucacucguggccagcaguggcacucuggaauuuaacaaugaguccuucaacuggacagguguuacccagaaugggacgucuagcgcuuguauccggcgcuccaacaauucauuuuucagucgacugaacuggcucacucauuuaaaguuuaaguacccagcacugaaugugaccaugcccaacaacgagcaguucgacaaacuuuauauuuggggaguccaccauccuggcacagauaaugaccagaucuuuuuguacgcccaagcuagcggccguauuacugugucuaccaagagaucccagcagacaguaaucccaaacauagggucaaggccccggguucgcaauauuccuagcagaaucaguauuuauuggaccaucgugaaaccaggagauauccugcuaauuaacucuacggguaaucucauagccccgaggggcuacuucaagauccgguccgggaaaagcucgauuaugcgcucugacgcgcccaucggaaagugcaacuccgaauguauaacuccuaauggcucaauuccaaacgacaagcccuuucagaaugucaaccgaaucacauacggugcaugcccuagauaugugaaacaaaauacccugaagcuggccacugggaugaggaacgugccagagaaacagacacggggaaucuucggcgcuauugccggcuuuaucgaaaaugggugggagggaauggucgaugguugguacggcuuccgucaccagaacagugaggggcgcggacaagcagcugaccuuaagagcacccaggccgcgauugaucagauaaauggcaaauugaacagacucaucgguaagacgaacgaaaaauuccaccagauugagaaggaauuuuccgagguugaagggaggauccaagaccuggagaaguauguggaggauaccaaaaucgacuuauggucuuacaaugccgaacugcucguagcacuugagaaccagcauacaauugaucugacugacagcgaaaugaauaaguuguucgagaaaaccaagaaacagcuacgggaaaacgcugaggauaugggcaauggauguuuuaagauauaucacaagugcgacaacgccugcaucggcucaauucgaaaugggacauacgaucaugacguguaucgcgacgaggcucugaacaauagauuccagaucaaaggagucgaacucaagagugguuacaaagauuggauucuguggaucuccuuugccauaagcuguuuccuucugugcguggcauugcucggcuuuaucaugugggccugucaaaaggggaacauuaggugcaauaucuguauuuga

SEQ ID NO: 134754 - RNA, 1698 nt, Artificial Sequence; identical to SEQ ID NO: 131664
  derived and/or modified CDS sequence (opt3) from hemagglutinin__InfluenzaA__AEB71992

SEQ ID NO: 134755 - RNA, 1698 nt, Artificial Sequence; identical to SEQ ID NO: 131664
  derived and/or modified CDS sequence (opt3) from hemagglutinin__InfluenzaA__AEC13313

SEQ ID NO: 134756 - RNA, 1701 nt, Artificial Sequence
  derived and/or modified CDS sequence (opt3) from hemagglutinin__InfluenzaA__AEC46553
augaaggccauccuggugguccuccuuuacaccuucgcuacagcaaacgccgacacucugugcauuggcuaucacgcgaauaacagcacggauaccguugacacaguguuggagaaaaauguaacugugacccauuccgucaacuuacuggaagauaagcacaaugggaaacuauguaagcucagaggaguggcuccccugcaucuugguaaaugcaacauagccggcuggauccuggggaauccugagugugaaucuuugucaacagcaaguagcugguccuacauuguugagaccucuucgucagacaacggaacuugcuauccaggcgauuuuaucgacuacgaggagcucagggagcagcugagcaguguguccucuuucgaacgguuugagauuuucccgaagacaagcuccuggcccaaucacgauccuaacaagggugucaccgccgcuuguccacaugcaggggccaaaucauuuuauaagaaucugaucuggcucgugaaaaagggaaacaguuaccccaaauuaagcacgucuuauauaaaugacaagggcaaggaaguacugguucuuuggggcauccaccacccuuccacuucagcugaucaacagagcuuguaccagaacgccgacgcguacgcauucguggggaccagucgcuauucuaaaaaguuuaaaccagagauugccauccgacccaagguccgugaucaggagggaagaaugaauuacuauuggacacugguggaaccuggugacaaaauuacuuucgaggcuaccggcaaccuaguggucccaagguacgccuuugcaauggaacggaacgcuggguccggaaucauaauuagcgauacaucgguucaugacugcaauaccacgugucaaacuccgaagggcgccaucaacacaucucuccccuuccagaaugugcacccuauuaccaucgguaaaugcccaaaguauguaaaguccacuaaacugcgccuugcgacagggcugagaaacgugcccucaauccagaguaggggauuguuuggcgccauugcaggcuucauagaagggggauggaccgguauggucgacggcugguacggguaucaucaccagaaugaacaaggaagcggcuacgcugccgaucucaaguccacgcagaacgcuuuugacaaaaucaccaauaaggugaacucuguuauugagaaaaugaauacacaguucacugccguggguaaggaguucaaccaccuggaaaagcggaucgagaauuuaaacaaaaaggucgaugacggguuucuggauauauggaccuacaaugcagaacuccuugugcuguuggagaacgaacgcacacuagacuaucaugauagcaauguaaagaaccuguacgagaagguucgaucacagcucaaaaacaaugccaaggagauuggcaacggauguuucgaauuuuaucacaagugcgacaauacuuguauggagagugugaaaaacggcaccuacgauuauccuaaguacuccgaagaggcuaaacugaauagagaagagaucgacggggucaaacuugagagcacaaggaucuaucaaauucuggcgaucuacucuaccguggcaucaaguuugguccucgugguuagccugggagccauuuccuucuggaugugcucuaacgguucguuacagugccggauauguaucuga

SEQ ID NO: 134757 - RNA, 1701 nt, Artificial Sequence
  derived and/or modified CDS sequence (opt3) from hemagglutinin__InfluenzaA__AEC46555
augaaggccauccuggugguccuccuuuacaccuucgcuacagcaaacgccgacacucugugcauuggcuaucacgcgaauaacagcacggauaccguugacacaguguuggagaaaaauguaacugugacccauuccgucaacuuacuggaagauaagcacaaugggaaacuauguaagcucagaggaguggcuccccugcaucuugguaaaugcaacauagccggcuggauccuggggaauccugagugugaaucuuugucaacagcaaguagcugguccuacauuguugagaccucuucgucagacaacggaacuugcuauccaggcgauuuuaucgacuacgaggagcucagggagcagcugagcaguguguccucuuucgaacgguuugagauuuucccgaagacaagcuccuggcccaaucacgauccuaacaagggugucaccgccgcuuguccacaugcaggggccaaaucauuuuauaagaaucugaucuggcucgugaaaaagggaaacaguuaccccaaauuaagcacgucuuauauaaaugacaagggcaagaaaguacugguucuuuggggcauccaccacccuuccacuucagcugaucaacagagcuuguaccagaacgccgacgcguacgcauucguggggaccagucgcuauucuaagaaauuuaagccagaaauugccauccgacccaaaguccgugaucaggagggaagaaugaauuacuauuggacacugguggagccuggugacaagauuacuuucgaagcuaccggcaaccuaguggucccaagguacgccuuugcaauggagcggaacgaaggguccggaaucauaauuagcgauacaucgguucaugacugcaauaccacgugucaaacuccgaaaggcgcuaucaacacaucucuccccuuccagaaugugcacccuauuaccaucgguaagugcccaaaguauguaaaauccacuaagcugcgccuugccacagggcugagaaacgugcccucaauccagaguaggggauuguuuggcgcgauugccggcuucauagaagggggauggaccgguauggucgacggcugguacggguaucaucaccagaaugaacaaggaagcggcuacgcagcugaucucaaauccacgcagaacgccuuugacaagaucaccaauaaagugaacucuguuauugagaagaugaauacacaguucacugcuguggguaaggaguucaaccaccuggaaaaacggaucgagaauuuaaacaagaaagucgaugacggguuucuggauauauggaccuacaaugccgaacuccuugugcuguuggagaacgaacgcacacuagacuaucaugauagcaauguaaagaaccuguacgagaaaguucgaucacagcucaagaacaaugcaaaggagauuggcaacggauguuucgaauuuuaucacaaaugcgacaauacuuguauggagagugugaagaacggcaccuacgauuauccuaaauacuccgaagaggccaagcugaauagagaagagaucgacggggucaaacuugagagcacaaggaucuaucaaauucuggcuaucuacucuaccguggcgucaaguuugguccucgugguuagccugggagcaauuuccuucuggaugugcucuaacgguucguuacagugccggauauguaucuga

SEQ ID NO: 134758 - RNA, 1701 nt, Artificial Sequence; identical to SEQ ID NO: 134756
  derived and/or modified CDS sequence (opt3) from hemagglutinin__InfluenzaA__AEC46557

SEQ ID NO: 134759 - RNA, 1701 nt, Artificial Sequence; identical to SEQ ID NO: 130704
  derived and/or modified CDS sequence (opt3) from hemagglutinin__InfluenzaA__AEC53259

SEQ ID NO: 134760 - RNA, 1701 nt, Artificial Sequence
  derived and/or modified CDS sequence (opt3) from hemagglutinin__InfluenzaA__AEC53269
augaaggccauccuggugguccuccuuuacaccuucgcuacagcaaacgccgacacucugugcauuggcuaucacgcgaauaacagcacggauaccguugacacaguguuggagaaaaauguaacugugacccauuccgucaacuuacuggaagauaagcacaaugggaaacuauguaagcucagaggaguggcuccccugcaucuugguaaaugcaacauagccggcuggauccuggggaauccugagugugaaucuuugucaacagcaaguagcugguccuacauuguugagaccucuucgucagacaacggaacuugcuauccaggcgauuuuaucgacuacgaggagcucagggagcugcugagcaguguguccucuuucgaacgguuugagauuuucccgaagacaagcuccuggcccaaucacgauucaaacaagggugucaccgccgcuuguccucaugcaggggccaaaaguuuuuauaagaaucucaucugguuagugaaaaagggaaacagcuacccaaaacugucuaaguccuauauaaaugacaagggcaaagaaguacuuguuuuguggggcauccaccaccccucaacgagcgcugaucagcaaagucuguaccagaacgccgacgcguacguguucgucgggucuucccgcuauagcaagaaauuuaagccugagauugcaauccgaccaaaagugcgugaucaggagggaagaaugaauuacuauuggacucuaguggaacccggugacaagauuaccuucgaggccacaggcaaccucgucguuccuagguacgcuuuugccauggaacggaacgcagggucgggaaucauaauuucugauacuccagugcaugacugcaauaccacaugucagaccccgaaaggcgcuaucaacacgucccugcccuuccaaaauauucacccuaucacuaucgguaagugcccaaaguauguaaaaucaacaaaacuucgccuggccaccggguugagaaacauucccaguauacagagcaggggacucuuuggcgcgaucgccggcuucauugaagggggauggacugguaugguggacggcugguacggguaucaucaccagaaugaacagggauccggcuacgcagcugaucugaagucuacacaaaacgccaucgacgagauaaccaauaaggucaacagcgugauugagaaaaugaauacgcaguuuaccgcuguugguaaggaguucaaccacuuagaaaagcggaucgaaaaucugaacaaaaagguggaugacggguuccucgauaucuggacauacaaugccgagcuucuggucuugcuagaaaacgagcgcacucuggacuaucaugauucaaaugugaaaaaccucuacgagaagguacgaagucagcugaaaaacaaugcaaaggaaauuggcaacggauguuuugaguucuaucacaagugcgacaauaccuguauggaauccguuaaaaacggcacauacgauuauccuaaguacagcgaggaagccaaacuuaauagagaggagaucgacggggugaagcuggaaucuacuaggauuuaucagauauuggcuaucuacucaaccgucgcgaguagccucgugcuggucguguccuuaggagcaauuucuuuuuggaugugcucgaacgguagccugcaaugccggaucuguaucuga

SEQ ID NO: 134761 - RNA, 1701 nt, Artificial Sequence; identical to SEQ ID NO: 131447
  derived and/or modified CDS sequence (opt3) from hemagglutinin__InfluenzaA__AEC53279

SEQ ID NO: 134762 - RNA, 1701 nt, Artificial Sequence; identical to SEQ ID NO: 130704
  derived and/or modified CDS sequence (opt3) from hemagglutinin__InfluenzaA__AEC53289

SEQ ID NO: 134763 - RNA, 1701 nt, Artificial Sequence; identical to SEQ ID NO: 130704
  derived and/or modified CDS sequence (opt3) from hemagglutinin__InfluenzaA__AEC53299

SEQ ID NO: 134764 - RNA, 1701 nt, Artificial Sequence; identical to SEQ ID NO: 130897
  derived and/or modified CDS sequence (opt3) from hemagglutinin__InfluenzaA__AEC53327

SEQ ID NO: 134765 - RNA, 1701 nt, Artificial Sequence
  derived and/or modified CDS sequence (opt3) from hemagglutinin__InfluenzaA__AEC53347
augaaggccauccuggugguccuccuuuacaccuucgcuacagcaaacgccgacacucugugcauuggcuaucacgcgaauaacagcacggauaccguugacacaguguuggagaagaauguaacugugacccauuccgucaacuuacuggaagauaagcacaaugggaaacuauguaagcucagaggaguggcuccccugcaucuugguaaaugcaacauagccggcuggauccuggggaauccugagugugaaucuuugucaacagcaaguagcugguccuacauuguugagaccucuucgucagacaacggaacuugcuauccaggcgauuuuaucgacuacgaggagcucagggagcagcugagcaguguguccucuuucgaacgguuugagauuuucccgaagacaagcuccuggcccaaucacgauucaaacaagggugucaccgccgcuuguccucaugcaggggccaaaaguuuuuauaagaaucugaucuggcucgugaaaaagggaaacagcuacccaaaauuaucuaaguccuauauaaaugacaagggcaaagaaguacugguucuuuggggcauccaccaccccucaacgagcgcugaucaacagaguuuguaccagaacgccgacgcguacguguucgucgggucuucccgcuauagcaagaaauuuaagccugagauugcaauccgaccaaaagugcgugaucaggagggaagaaugaauuacuauuggacucugauugaacccggugacaagaucaccuucgaggccacaggcaaccuaguggucccuagguacgcuuuugccauggaacggaacgcagggucgggaauaauuaucucugauacuccaguucaugacugcaauaccacaugucaaaccccgaaaggcgcuauuaacacgucccuccccuuccagaauauccacccuaucacuauugguaagugcccaaaguaugugaaaucaacaaagcugcgccuugccaccgggcugagaaacguacccaguauacagagcaggggauuguuuggcgcgaucgccggcuucauugaagggggauggacugguaugguggacggcugguacggguaucaucaccagaaugaacaaggauccggcuacgcagcugaucucaaaucuacacagaacgccaucgacgagauaaccaauaaggucaacagcgugauugagaaaaugaauacgcaguuuaccgcuguugguaaggaguucaaccaccuggaaaagcggaucgaaaauuuaaacaaaaagguggaugacggguuccuggauaucuggacauacaaugccgagcuccuuguccuguuggaaaacgagcgcacucuagacuaucaugauucaaaugugaaaaaccuguacgagaagguacgaagucagcucaaaaacaaugcaaaggaaauuggcaacggauguuuugaguucuaucacaagugcgacaauaccuguauggaauccguuaaaaacggcacauacgauuauccuaaguacagcgaggaagccaaacugaauagagaggagaucgacggggugaaacuugaaucuacuaggauuuaucaaauacuggcuaucuacucaaccgucgcgaguagcuuggugcucgucgugucccugggagcaauuucuuuuuggaugugcucgaacgguagcuuacagugccggaucuguaucuga

SEQ ID NO: 134766 - RNA, 1701 nt, Artificial Sequence
  derived and/or modified CDS sequence (opt3) from hemagglutinin__InfluenzaA__AEC53404
augaaggccauccuggugguccuccuuuacaccuucgcuacagcaaacgccgacacucugugcauuggcuaucacgcgaauaacagcacggauaccguugacacaguguuggagaaaaauguaacugugacccauuccgucaacauauuagaagauaagcacaaugggaaacuguguaagcuaagaggaguggcuccccuccaucuggguaaaugcaacaucgccggcuggauucuugggaauccugagugugaaucucugucaacagcaaguagcugguccuacaucguugagaccucuucgucagacaacggaacuugcuauccaggcgauuuuauugacuacgaagaguugagggagcagcucagcaguguguccucuuucgaacgguuugagaucuucccgaagacaagcuccuggcccaaucacgauucaaacaaggguauaaccgccgcuuguccucaugcaggggccaaaaguuuuuauaagaaucugaucuggcuggucaaaaagggaaacagcuacccaaaacucucuaaguccuauauuaaugacaagggcaaagaaguguuaguacuguggggcauccaccaccccucaacgagcgcugaucaacagagucuuuaccagaacgccgacgcguacguuuucguggggucuucccgcuauagcaagaaauuuaagccugagauugcaauccgaccaaaaguccgugaucaggagggaagaaugaauuacuauuggacuuugguggaacccggugacaagauaaccuucgaggccacaggcaaccugguggucccuagguacgcuuuugccauggaacggaacgcagggucgggaauuaucauuucugauacuccaguucaugacugcaauaccacaugucaaaccccgaaaggcgcuaucaacacgucccuacccuuccagaauauccacccuauuacuauagguaagugcccaaaguaugugaaaucaacaaagcuccgccuggccaccgggcuuagaaacguacccaguauccagagcaggggacuguuuggcgcgauugccggcuucaucgaagggggauggacugguaugguggacggcugguacggguaucaucaccagaaugaacaaggauccggcuacgcagcugauuugaaaucuacacagaacgccauagacgagauuaccaauaaggucaacagcgugaucgagaaaaugaauacgcaguuuaccgcuguugguaaggaguucaaccaccucgagaagcggaucgaaaaucugaacaaaaagguggaugacggguucuuagauauuuggacauacaaugccgagcugcucguccuucuggaaaacgagcgcacuuuggacuaucaugauucaaaugugaaaaaccuauacgagaagguacgaagucagcugaaaaacaaugcaaaggaaaucggcaacggauguuuugaguucuaucacaagugcgacaauaccuguauggaauccguuaaaaacggcacauacgauuauccuaaguacagcgaggaagccaaacucaauagagaggagauugacggggugaagcuggaaucuacuaggauauaucaaauccuugcuauuuacucaaccgucgcgaguagccugguguuggucgugucccucggagcaaucucuuuuuggaugugcucgaacgguagccugcagugccggaucuguauuuga

SEQ ID NO: 134767 - RNA, 1701 nt, Artificial Sequence; identical to SEQ ID NO: 130704
  derived and/or modified CDS sequence (opt3) from hemagglutinin__InfluenzaA__AEC53414

SEQ ID NO: 134768 - RNA, 1701 nt, Artificial Sequence
  derived and/or modified CDS sequence (opt3) from hemagglutinin__InfluenzaA__AEE27177
augaagaccauccuggugguccuccuuuacacauucgccacugcuaacgcagacacgcugugcauuggcuaucacgccaauaacagcaccgauacaguugacacuguguuggagaaaaauguaaccgugacacauuccgucaacauauuagaagauaagcacaaugggaaacuguguaagcuaagaggaguggcgccccuccaucuggguaaaugcaacaucgcuggcuggauucuugggaauccugagugugaaucucugucaaccgccaguagcugguccuacaucguugagacuucuucgucagacaacggaacaugcuauccaggcgauuuuauugacuacgaagaguugagggagcagcucagcaguguguccucuuucgaacgguuugagaucuucccgaagaccagcuccuggcccaaucacgauucaaacaagggugucacggcagccuguccucaugcuggggcaaaaaguuuuuauaagaaucugauauggcuggugaaaaagggaaacagcuacccaaaacucucuaaguccuauaucaaugacaagcgcaaagaaguauuaguucuguggggcauucaccaccccucaacuagcgccgaucaacagagucuuuaccagaacgcugacgccuacguguucgucgggucuucccgauauagcaagaaauuuaagccugagaucgcgauucguccaaaagugagagaucaggagggcaggaugaauuacuauuggaccuugguggaacccggagacaagaucacauucgaggcaacugguaaccuggucguuccucgguacgccuuugcuauggaacgcaacgccggcucggggauaauuaucucugauaccccagugcaugacugcaauacaaccugucaaacgccgaaaggagcaauuaacacuucccuacccuuccagaauauccacccuaucacaauuggcaagugcccaaaguauguaaaaucaaccaagcucagacuggcuacuggucuuaggaacgugcccaguauacagagccgggggcuguuuggagccaucgcgggcuucauugagggcggguggacaggaauggucgacgguugguacggcuaucaucaccagaaugaacaaggguccggauacgccgcagauuugaaaucuacccagaacgcuaucgacgagauaacgaauaaggugaacagcguuauugagaaaaugaauacccaguuuacagccgugggcaaggaguucaaccaccucgaaaagcgcaucgaaaaucugaacaaaaaggucgaugacgguuucuuagauaucuggacuuacaaugcugagcugcucgugcuucuggaaaacgagcgaaccuuggacuaucaugauucaaauguuaaaaaccuauacgagaagguaagaagucagcugaaaaacaaugccaaggaaauugggaacggcuguuuugaguucuaucacaagugcgacaauacauguauggaauccgugaaaaacggaacuuacgauuauccuaaguacagcgaggaagcaaaacucaauagggaggagaucgacggcgucaagcuggaaucuacccggauuuaucaaauacuugccaucuacucaacaguggcuaguagccuggucuuggugguuucccucggggcgauuucuuuuuggaugugcucgaacggaagccugcagugccguaucuguaucuga

SEQ ID NO: 134769 - RNA, 1701 nt, Artificial Sequence; identical to SEQ ID NO: 132489
  derived and/or modified CDS sequence (opt3) from hemagglutinin__InfluenzaA__AEE27187

SEQ ID NO: 134770 - RNA, 1701 nt, Artificial Sequence
  derived and/or modified CDS sequence (opt3) from hemagglutinin__InfluenzaA__AEE27207
augaaggccauccuggugguccuccuuuacaccuucgcuacagcaaacgccgacacucugugcauuggcuaucacgcgaauaacagcacggauaccguugacacaguguuggagaaaaauguaacugugacccauuccgucaacuuacuggaagauaagcacaaugggaaacuauguaagcucagaggaguggcuccccugcaucuugguaaaugcaacauagccggcuggauccuggggaauccugagugugaaucuuugucaacagcaaguagcugguccuacauuguugagaccucuucgucagacaacggaacuugcuauccaggcgauuuuaucgacuacgaggagcucagggagcagcugagcaguguguccucuuucgaacgguuugagauuuucccgaagacaagcuccuggcccaaucacgauucaaacaagggugucaccgccgcuuguccucaugcaggggccaaaaguuuuuauaagaaucugaucuggcucgugaaaaagggaaacagcuacccaaaauuaucuaaguccuauauaaaugacaagggcaaagaaguacugguucuuuggggcauccaccaccccucaacgagcgcugaucaacagaguuuguaccagaacgccgacgcguacguguucgucgggacuucucgcuauuccaagaaauuuaagccugagauugcaauccgaccaaaagugcgugaucaggagggaagaaugaauuacuauuggacccugguggaacccggugacaagauuacauucgaggccacuggcaaccuagucguuccuagguacgcuuuugccauggaacggaacgcagggagcggaaucauaauuucggauaccccagugcaugacugcaauacaaccugucaaacgccgaaaggcgcuaucaacacuucucuccccuuccagaauauucacccuaucacaaucgguaagugcccaaaguauguaaaauccaccaagcugcgccuugccacugggcugagaaacgugcccucaauucagaguaggggauuguuuggcgcgauagccggcuucaucgaagggggauggacagguauggucgacggcugguacggguaucaucaccagaaugaacaaggaagcggcuacgcagcugaucucaaauccacccagaacgccauugacgagaucacgaauaaggugaacucuguuauagagaaaaugaauacccaguuuacagcuguggguaaggaguucaaccaccuggaaaagcggauugaaaauuuaaacaaaaaggucgaugacggguuccuggauaucuggacuuacaaugccgagcuccuugugcuguuggaaaacgagcgcacccuagacuaucaugauagcaaaguaaagaaucuguacgagaaaguucgaucacagcucaagaacaacgcaaaggaaaucggcaauggauguuuugaguucuaucacaaaugcgacaacacauguauggaaagugugaagaauggcacuuacgauuauccuaaauacuccgaggaagccaagcugaacagagaggagauugacggggucaaacuugaaagcaccaggaucuaucaaauucuggcuauauacucuacaguggcgucaaguuugguccucgugguuagccugggagcaaucuccuuuuggaugugcucuaaugguucguuacagugccggauuuguaucuga

SEQ ID NO: 134771 - RNA, 1701 nt, Artificial Sequence
  derived and/or modified CDS sequence (opt3) from hemagglutinin__InfluenzaA__AEG64752
augaaggccauccuggugguccuccuuuacaccuucgcuacagcaaacgccgacacucugugcauuggcuaucacgcgaauaacagcacggauaccguugacacaguguuggagaaaaauguaacugugacccauuccgucaacuuacuggaagauaagcacaaugggaaacuauguaagcucagaggaguggcuccccugcaucuugguaaaugcaacauagccggcuggauccuggggaauccugagugugaaucuuugucaacagcaaguagcugguccuacauuguugagaccucuucgucagacaacggaacuugcuauccaggcgauuuuaucgacuacgaggagcucagggagcagcugagcaguguguccucuuucgaacgguuugagauuuucccgaagacaagcuccuggcccaaucacgauucaaacaagggugucaccgccgcuuguccucaugcaggggccaaaaguuuuuauaagaaucugaucuggcucgugaaaaagggaaacagcuacccaaaauuaucuaaguccuauauaaaugacaagggcaaagaaguacugguucuuuggggcauccaccaccccucaacgagcgcugaucaacagaguuuguaccagaacgccgacgcguacguguucgucgggucuucccgcuauagcaagaaauuuaagccugagauugcaauccgaccaaaagugcgugaucaggagggaagaaugaauuacuauuggacucugguggaacccggugacaagauuaccuucgaggccacaggcaaccuagucguuccuagguacgcuuuugccauggaacggaacgcagggucgggaaucauaauuucugauacuccagugcaugacugcaauaccacaugucaaaccccgaaaggcgcuaucaacacgucccuccccuuccagaauauucacccuaucacuaucgguaagugcccaaaguauguacgcucaacaaaacugagacuugccaccgggcugaggaacgugcccaguauucagagccggggauuguuuggcgcgauagccggcuucaucgaagggggauggacugguauggucgacggcugguacggguaucaucaccagaaugaacaaggauccggcuacgcagcugaucucaagucuacacagaacgccauugacgagaucaccaauaaagugaacagcguuauagagaagaugaauacgcaguuuaccgcuguggguaaagaguucaaccaccuggaaaagcgcauugaaaauuuaaacaagaaagucgaugacggguuccuggauaucuggacauacaaugccgagcuccuugugcuguuggaaaacgagcgaacucuagacuaucaugauucaaauguaaagaaccuguacgagaaaguuagaaggcagcucaagaacaaugcaaaagaaaucggcaacggauguuuugaguucuaucacaagugcgacaauaccuguauggaaagugugaagaacggcacauacgauuauccuaaauacuccgaggaagccaagcugaaucgggaggagauugacggggucaaacuugaaagcacucguaucuaucaaauucuggcuauauacucuaccguggcgucaaguuugguccucgugguuagccugggagcaaucuccuuuuggaugugcucuaacgguucguuacagugccgcauuuguaucuga

SEQ ID NO: 134772 - RNA, 1701 nt, Artificial Sequence
  derived and/or modified CDS sequence (opt3) from hemagglutinin__InfluenzaA__AEG64762
augaaggccagacugcucgugcuucugugcgcuuuggcagccaccgacgcggauacaaucuguauuggcuaccacgcuaacaauagcacugacacggucgauaccuuacuggagaaaaacguuacagugacucauuccguaaaucuacucgaagacucucacaacgggaagcugugcaaacuuaagggaauagccccgcugcaguuggguaaauguaauaucgcaggcuggcuccuggggaacccugagugcgauucacugcucccagccaggaguuggagcuauauuguggaaacccccaauuccgagaacggagcuuguuaccccggcgacuucaucgauuaugaagaguuacgggagcaacugucuacagucucgucacuugaacgcuuugagauuuucccuaaggaaagcaguuggccaaaucauaacaccuugaagggugugacuguuuccugcucucacgggggaaaaagcuccuuuuaccgaaaucugcuauggcucacaaagaccggcgacucauaucccaaacugaacaauaguuacgugaacaauaagggcaaagagguccuugugcuguggggaguacaucacccuucuagcuccaacgagcagcagucauuguaucacaacguuaaugcauacgugagcgucgugaguucuaacuacaaucguagauucacgccagaaaucgccgcuaggcccaaggugcgggaucagccugggcgcaugaacuauuacuggacucuccuggagccaggugacaccauauuauuugaagccacaggcaaucugaucgcgccgugguaugcauucgcccucuccagaggguuuggaagcggcauuaucacuucgaacgcuucuaugcaugaguguaauaccaagugccaaacaccccagggugccauuaacuccucacuuccuuuccagaauauccacccagucaccauaggggaaugucccaaauacguuaggaguacgaagcugcggauggugacuggauugcgcaacauuccuagcauccagucccgaggccuauuuggcgcaauugcuggguucaucgagggagguuggacaggcaugaucgaugggugguauggauaccaucaccaaaaugagcagggcucugguuaugccgcggaccagaaaagcacccagaacgccauuaaugggauaacuaacaagguaaauucagugaucgaaaagaugaacacacaauuuaccgcagucggcaaagaguucaacaaucuggagaaaagaauggaaaaccucaauaagaagguggaugacggauuucuggacauuuggacguacaacgcugaacuucugguuuugcucgagaaugagaggacccuggauuuccacgacuuaaacgugaaaaaucuguacgaaaaggucaaaagucagcuaaagaacaaugccaaagagaucggcaacgggugcuucgaauuuuaucauaagugugauaaugagugcauggaauccgugcgggacggaacauacgauuauccaaaguacagcgaggagucuaaacucaaccgugaaaagauagacgguguaaaacuggagucaaugggcguuuaucagauucuugcuaucuacaguacuguggccagcuccuugguccugcucgugucucugggggcaaucucguucuggaugugcagcaauggaucccuucaaugucgcauuugcaucuga

SEQ ID NO: 134773 - RNA, 1701 nt, Artificial Sequence; identical to SEQ ID NO: 130717
  derived and/or modified CDS sequence (opt3) from hemagglutinin__InfluenzaA__AEG64784

SEQ ID NO: 134774 - RNA, 1701 nt, Artificial Sequence
  derived and/or modified CDS sequence (opt3) from hemagglutinin__InfluenzaA__AEG64834
augaagaccaucauugcccugagcuacauacucugccuuguguucgcucagaaacugcccggcaacgacaauuccacagcaacuuuguguuuagggcaccaugccgucccuaacggaacgaucguuaagaccauuacaaaugaucaaaucgaggugacuaacgcgaccgaacugguacaaaauucuucagcuggugagauuugcgacaguccacaccagauccuagauggcgaaaacuguacacucauagacgcccugcuuggggauccgcagugcgacggauuucagaauaaaaagugggaucuguucguggagagaagcagggcauauuccaacuguuaccccuaugacgucccugauuacgccucuuugcggucgcucguggcuucaagcggcacccuggaauuuaauaacgagaguuucaauuggacugguguuacacagaacgggaccuccucugcaugcauccgccgaagcaauaacuccuuuuucucacgucugaauuggcucacgcauuuaaacuuuaaauauccagcccugaacgugacuaugcccaauaacgagcaguucgacaaacuuuacauuuggggaguccaccauccuggcaccgauaaggaccagaucuuuuuguaugcucaagccaguggcagaauuacagugagcacuaaaaggucucagcaggcgguaaucccaaauauagggucccggccccgcguuagaaacauuccuucaaggaucagcauuuacuggaccaucgugaagccaggagauauccugcuaauuaauaguacagguaaccucauagcaccgcggggcuacuucaaaauccgcucugggaaguccagcauuaugcgaucggacgcccccaucggaaaauguaauucugaaugcauaaccccuaacggcuccauuccaaaugacaagcccuuucagaacgucaauagaaucacguauggugcuuguccuagguacgugaagcaaucaacucugaaacuugccacagggaugcggaacgugccagagaagcagacccguggaaucuucggcgcaauugcuggcuuuaucgaaaaugggugggagggaauggucgaugguugguauggcuuccgccaccagaacagugaggggagaggacaagccgcggaccugaaaagcacucaggccgcaauugaucagauaaauggcaaguugaacaggcucaucgguaaaacaaacgaaaaguuccaccagauugagaaagaauuuuccgagguugaagggcggauccaagaccuggagaaguacguggaggauaccaagaucgacuuauggucuuauaaugcugaacugcucguagcccuugagaaccagcauacgauugaucugaccgacagcgaaaugaauaaauuguucgagaagacaaagaagcagcuacgagaaaacgcugaggauaugggcaauggaugcuuuaaaauauaccacaagugugacaacgccugcaucggcucaauucgcaaugggacuuaugaucaugacguguacagagacgaggcacugaacaauagguuccagaucaagggagucgaacucaaaagugguuacaaggauuggauucuguggaucuccuuugccauaagcugcuuccuucuguguguggcuuugcucggcuuuaucaugugggcgugccaaaaagggaacauucgguguaauaucugcauuuga

SEQ ID NO: 134775 - RNA, 1701 nt, Artificial Sequence
  derived and/or modified CDS sequence (opt3) from hemagglutinin__InfluenzaA__AEG64845
augaagaccaucauugcccugagcuacauacucugccuuguguucgcucagaaacugcccggcaacgacaauuccacagcaacuuuguguuuagggcaccaugccgucccuaacggaacgaucguuaagaccauuacaaaugaucaaaucgaggugacuaacgcgaccgaacugguacaaaauucuucaacaggugagauuugcgacaguccacaccagauccuagauggcgaaaacuguacccucauagacgcucugcuuggggauccgcagugcgacggauuucagaauaaaaagugggaucuguucguggagagaagcaaagccuauuccaacuguuaccccuaugacgucccugauuacgcaucuuugaggucgcucguggccucaagcggcacucuggaauuuaauaacgagaguuucaauuggacagguguuacccagaacgggacguccucugcuugcauccggcgcagcaauaacuccuuuuucucacgacugaauuggcucacucauuuaaacuuuaaguauccagcacugaacgugaccaugcccaauaacgagcaguucgacaaacuuuacauuuggggaguccaccauccuggcacagauaaggaccagaucuuuuuguaugcccaagcuaguggccguauuacugugagcaccaagagaucucagcagacaguaaucccaaauauaggguccaggccccggguucgcaacauuccuucaagaaucagcauuuacuggaccaucgugaaaccaggagauauccugcuaauuaauaguacggguaaccucauagccccgaggggcuacuucaagauccggucugggaaauccagcauuaugcgcucggacgcgcccaucggaaaguguaauucugaaugcauaacuccuaacggcuccauuccaaaugacaagcccuuucagaacgucaaucgaaucacauauggugcauguccuagauacgugaaacaaaacacccugaaacuugccacugggaugaggaaugugccagagaagcagacacggggaaucuucggcgcuauugccggcuuuaucgaaaacgggugggagggaauggucgaugguugguauggcuuccgucaccaaaauucagaggggcgcggacaggcagcugaccugaagaguacccaggccgcgauugaucagauaaacggcaaauugaacagacucaucgguaagacgaaugaaaaauuccaccagauugagaaggaauuuagcgagguugaagggaggauccaagaccuggagaaguacguggaggauaccaaaaucgacuuaugguccuauaacgccgaacugcucguagcacuugagaaucagcauacaauugaucugacugacucugaaaugaacaaguuguucgagaaaaccaagaaacagcuacgggaaaaugcugaggauaugggcaacggaugcuuuaagauauaccacaagugugacaaugccugcaucggcagcauucgaaacgggacauaugaucaugacguguaccgcgacgaggcucugaauaacagauuccagaucaaaggagucgaacucaagucagguuacaaagauuggauucuguggaucaguuuugccauauccugcuuccuucuguguguggcauugcucggcuuuaucaugugggccugccaaaaggggaauauuagguguaacaucugcauuuga

SEQ ID NO: 134776 - RNA, 1701 nt, Artificial Sequence
  derived and/or modified CDS sequence (opt3) from hemagglutinin__InfluenzaA__AEG64856
augaagaccaucauugcccugagcuacauacucugccuuguguucgcucagaaacugcccggcaacgacaauuccacagcaacuuuguguuuagggcaccaugccgucccuaacggaacgcugguuaagaccaucacaaaugaucaaauugaggugacuaacgcgaccgaacuuguacagucuucaaguacagguagaaucugcgacagcccacaccagauucucgauggcgagaauuguacccugaucgacgcucuacugggggauccgcauugcgacggauuucagaacaaagaaugggauuuguucguggagagguccaaggccuauucuaauuguuaccccuaugacgucccugauuacgcaucgcuccggucacugguggccagcaguggcacucuggaauuuaacaaugaguccuucaacuggacagguguugcucaaaaugggaccucuagcgcaugcaaacgccgauccaacaagucauuuuucagucgucucaauugguuacaccagcugaaguauaaauacccagcccuuaacgugacgaugcccaauaacgagaaguuugacaaauuguauauauggggaguccaucacccuagcacugauucugaccagaucucccuguacgcucaggccucaggcagagugaccguaagcacaaagaggagucaacagacuguuauuccaaacaucggcucucggcccugggugcgcggggucuccagcagaauuucgaucuacuggaccauagugaaaccuggagauauucuacucaucaauucuacagguaaccugauugcgccaaggggcuauuucaagauccgguccgggaagucaagugugaugcgcagcgacgcauccaucggaaaauguaauucugaaugcauuaccccgaacggcagcauacccaaugacaagccuuuucagaacgucaaucgaaucacguacggugccuguccaagauauguuaaacagaacacucuuaagcuggcuacagggaugaggaaugugcccgagaaacaaacccggggaauuuucggcgccaucgcaggcuuuauagaaaacgggugggagggaaugguagaugguugguacggcuuccgucaccagaauagcgaggggacuggacaggcugccgacuugaagaguacacaagcggccauuaaccagaucaauggcaaacucaaccgccugaucgaaaagaccaaugagaaguuucaucagauugaaaaagaguucuccgaaguggaggguagaauccaggauuuagagaaguaugucgaagacacgaaaauugaucuguggagcuacaacgcagagcuccuuguggcucuggaaaaccaacacaccauagacuugacagauucugagaugaauaagcuauucgaaaggacuaaaaagcagcugcgggagaacgccgaggacauggggaauggcugcuuuaagaucuaucauaaaugugauaacgcuugcauugaaucaauccgaaauggaaccuacgaccacgauguuuaccgcgacgaggcccucaacaauagauuccagaucaagggcguggaacugaaaaguggguauaaggacuggauucuuuggauaucauuugcaaucuccugcuuccuguugugugucgugcuccugggauuuauuaugugggccugccagaaagguaacaucagguguaauauuugcaucuga

SEQ ID NO: 134777 - RNA, 1701 nt, Artificial Sequence; identical to SEQ ID NO: 128120
  derived and/or modified CDS sequence (opt3) from hemagglutinin__InfluenzaA__AEG64867

SEQ ID NO: 134778 - RNA, 1701 nt, Artificial Sequence
  derived and/or modified CDS sequence (opt3) from hemagglutinin__InfluenzaA__AEG64878
augaagaccaucauugcccugagcuacauacucugccuuguguucgcucagaaacugcccgucaacgacaauuccacagcaacuuuguguuuaggccaccaugccguuccuaacgggacgcuggugaagaccaucacaaaugaucacauugagguaacuaacgcgaccgaacuugugcaaucuucaaguacaggaagaaucugcgacagcccacaucagauucucgauggugagaauuguacccugaucgacgcucuacugggcgauccgcacugcgacggguuucagaacaaagaaugggauuuguucgucgagagguccacugccuauucuaauuguuaccccuaugacgugccugauuacgcaucgcuccggucacugguugccagcaguggaacacuggaauuuaacaaugaguccuucaacuggaccggcguggcucagaaugguacgucuagcgcaugcaagcgccgauccauaaaaucauuuuucagucgucucaacugguuacaucaacugaaguauaaguacccagcccuuaaugucacuaugcccaacaaugagaaauuugacaaguuguauaucuggggagugcaccacccuagcaccgauucugaccagauuucccuguacgcucaggccucagggagaguaacaguuagcacuaaaaggagucagcaaaccgugaucccaaacauuggcucucggcccuggguccgcggcguguccagcagaaucucgauauacuggacaauugugaagccuggggauauccuacucauuaacucuaccggaaaucugaucgcgccaagggguuauuucaaaauccgguccggcaagucaaguauuaugcgcagcaacgcaccgauagggaaguguaauuccgaaugcaucacgcccaacggaucuauuccuaaugacaaaccauuucagaacgucaaucgaaucacuuacggcgccugucccagauauguuaagcagaacacacuuaaacuggcuaccgguaugaggaaugugccugagaagcagacucgggggauauucggagccauugcaggcuuuaucgaaaacggcugggaggggaugguagacggaugguacgguuuccgucaucaaaauagcgagggcaucgggcaggcugccgauuugaaaucaacacaggcggccauuaaccaaaucaauggaaagcucaaccgccugauugagaaaaccaaugaaaaguuucaccagauagaaaaggaguucagugaaguggagggcagaauccaggacuuagagaaauaugucgaagauacgaagauugaccugugguccuacaacgcagagcuccuuguggcucuggaaaaccagcauaccaucgauuugacagacagcgagaugaauaaacuauucgaaaggacucggaagcaacugcgagagaacgccgaggauauggguaaugggugcuuuaaaaucuaucacaagugugacaacgcuugcauuggcucuauacgcaauggaaccuacgaucacgacguuuacagagaugaagcccucaacaauagguuccagaucaagggcguggagcugaaaucaggguauaaggacuggauucuuuggaucaguuuugcaauuagcugcuuccuguugugugucgugcuccugggauuuaucaugugggccugccagaaagguaacauacgguguaauaucugcauuuga

SEQ ID NO: 134779 - RNA, 1701 nt, Artificial Sequence
  derived and/or modified CDS sequence (opt3) from hemagglutinin__InfluenzaA__AEG64889
augaagaccaucauugcccugagcuacauacucugccuuguguucgcucagaaacugcccgucaacgacaauuccacagcaacuuuguguuuaggccaccaugccguuccuaacgggacgcuggugaagaccaucacaaaugaucacauugagguaacuaacgcgaccgaacuugugcaaucuucaaguacaggaagaaucugcgacagcccacaucagauucucgauggugagaauuguacccugaucgacgcucuacugggcgauccgcacugcgacggguuucagaacaaagaaugggauuuguucgucgagagguccacugccuauucuaauuguuaccccuaugacgugccugauuacgcaucgcuccggucacuguuugccagcaguggaacacuggaguucaacaaugaauccuuuaacuggaccggcguugcucagaaugguacgucuagcgcaugcaagcgccgauccauaaaaucauucuuuagucgucucaacugguuacaucaacugaaguauaaguacccagcccuuaaugugacuaugcccaacaaugagaaauucgacaaguuguauaucuggggaguccaccacccuagcaccgauucugaccagauuucccuguacgcucaggccucagggagagugacaguaagcacuaaaaggagucagcaaaccguuaucccaaacauuggcucucggcccugggugcgcggcgucuccagcagaaucucgauauacuggacaauugugaagccuggggauauccuacucauuaacucuaccggaaaucugaucgcgccaagggguuauuuuaaaauccgguccggcaagucaaguauuaugcgcagcaacgcaccgauagggaaguguaauuccgaaugcaucacgcccaacggaucuauuccuaaugacaaaccauuccagaacgugaaucgaaucacuuacggcgccugucccagauaugucaagcagaacacacuuaaacuggcuaccgguaugaggaauguuccugagaagcagacucgggggauauuuggagccauugcaggcuucaucgaaaacggcugggaggggaugguggacggaugguacgguuuucgucaucaaaauagcgagggcacagggcaggcugccgauuugaaaucaacccaggcggccaucaaccaaauuaauggaaagcucaaccgccugaucgagaaaacgaaugaaaaguuccaccagauugaaaaggaguucagugaaguagagggcagaauacaggacuuagagaaauauguggaagauaccaagaucgaccugugguccuacaacgcagagcuccuugucgcucuggaaaaccagcauacaauugauuugacugacagcgagaugaauaaacuauuugaaaagaccaggaaacaacugcgggagaacgccgaggauauggguaaugggugcuucaagaucuaucacaagugugacaacgcuugcaucggcucuauucgaaauggaacauacgaucacgacguguaccgcgaugaagcccucaacaauagauuucagauaaaaggcguugagcugaagucaggguauaaagacuggauccuuuggauuaguuucgcaaucagcugcuuucuguugugugugguccuccugggauucauuaugugggccugccagaaggguaacaucagguguaauauaugcaucuga

SEQ ID NO: 134780 - RNA, 1701 nt, Artificial Sequence; identical to SEQ ID NO: 128080
  derived and/or modified CDS sequence (opt3) from hemagglutinin__InfluenzaA__AEG64911

SEQ ID NO: 134781 - RNA, 1701 nt, Artificial Sequence; identical to SEQ ID NO: 128080
  derived and/or modified CDS sequence (opt3) from hemagglutinin__InfluenzaA__AEG64922

SEQ ID NO: 134782 - RNA, 1701 nt, Artificial Sequence; identical to SEQ ID NO: 128080
  derived and/or modified CDS sequence (opt3) from hemagglutinin__InfluenzaA__AEG64933

SEQ ID NO: 134783 - RNA, 1701 nt, Artificial Sequence; identical to SEQ ID NO: 128166
  derived and/or modified CDS sequence (opt3) from hemagglutinin__InfluenzaA__AEG64944

SEQ ID NO: 134784 - RNA, 1701 nt, Artificial Sequence; identical to SEQ ID NO: 128080
  derived and/or modified CDS sequence (opt3) from hemagglutinin__InfluenzaA__AEG64955

SEQ ID NO: 134785 - RNA, 1701 nt, Artificial Sequence; identical to SEQ ID NO: 128080
  derived and/or modified CDS sequence (opt3) from hemagglutinin__InfluenzaA__AEG64966

SEQ ID NO: 134786 - RNA, 1701 nt, Artificial Sequence
  derived and/or modified CDS sequence (opt3) from hemagglutinin__InfluenzaA__AEG64977
augaagaccaucauugcccugagcuacauacucugccuuguguucgcucagaaacugcccgagaacgacaauuccacagcaacuuuguguuuaggccaccaugccgucccuaacgggacgaucguuaagaccauuacaaaugaucaaaucgaagugacuaacgcgaccgagcugguacagucuucaaguacaggagguauuugcgacagcccacaccagauccuagauggcgaaaauuguacccucauagacgcucugcuuggggauccgcagugcgacggauuucaaaacaaaaagugggaucuguucguggagagauccaaagccuauucuaauuguuaccccuaugacgucccugauuacgcaucguugaggucacucguggccagcaguggcacucuggaauuuaacaaugaguccuucgacuggacagguguuacccagaacgggacgucuagcgcuugcaagcggcgcuccaauaagucauuuuucagucgacugaacuggcucacucauuuaaaauauaaguacccagcacugaaugugaccaugcccaacaaugagaaauuugauaaacuuuauaucuggggaguccaccauccuggcacagacagcgaucagauuucuuuguacgcccaggcuuccggccguaucacugugucaaccaagagaagccaacagacaguaauuccaaacaucgggaguaggccccggguucgcgacgugucuuccagaauaagcauuuacuggaccaucgucaagccuggagacauucugcuaaucaacucgacggguaaucucaucgccccaaggggcuauuucaagauucggucugggaaauccucaauaaugcgcagugaugcgccgaucgacaaguguaacagcgaaugcauuacucccaauggauccaucccuaacgauaaaccauuucagaaugugaaccgaauaacauacggcgcaugucccagauaugugaagcagaauacccugaaacuugccacugguaugaggaacgucccugagaagcaaacacgggggauuuucggagcuaucgccggcuuuaucgaaaauggcugggaggggaugguugacggaugguacgguuuccgucaccagaacucugagggcaccgggcaggcagcugaucugaaaagcacgcaagccgcgauuaaucagaucaacggaaaguugaaucgccucauuggcaagaccaacgaaaaauuucaccagauagagaaggaguucucagaaguggaagguagaauccaggaccuggagaaauauguagaggauacaaagauugacuuauggaguuacaaugccgaacugcucguggcacuugagaaccaacauacuaucgaucugaccgacuccgaaaugaacaaauuguucgagaggacaaagaagcagcuacgggaaaaugcugaggauauggggaacggcugcuuuaaaaucuaucacaagugugacaaugccugcauuggaagcauacgaaacggcacuuacgaccaugaugucuaccgcgacgaggcucugaauaacagauuccagaucaaagggguggaacucaagucuggauauaaagauuggauucuguggaucucauuugccauuaguugcuuccuucuguguguugcauugcucgguuuuaucaugugggccugccagaagggcaauauaagguguaacaucugcauuuga

SEQ ID NO: 134787 - RNA, 1701 nt, Artificial Sequence
  derived and/or modified CDS sequence (opt3) from hemagglutinin__InfluenzaA__AEG64988
augaagaccaucauugcccugagcuacauacucugccuuguguucgcucagaaacugcccggcaacgacaauuccacagcaacuuuguguuuagggcaccaugccgucccuaacggaacgaucguuaagaccauuacaaaugaucaaaucgaggugacuaacgcgaccgaacugguacagucuucaaguacaggugagauuugcgacaugccacaccagauccuagauggcgaaaauuguacccucauagacgcucugcuuggggauccgcagugcgacggauuucaaaacaaaaagugggaucuguucguggagagaagcaaagccuauuccaauuguuaccccuaugacgucccugauuacgcaucuuugaggucgcucguggccucaagcggcacucuggaauuuaacaaugagaguuucaacuggacagguguuacccagaaugggacguccucugcuugcaagcggcgcagcaacaauuccuuuuucucacgacugaacuggcucacucauuuaaaguuuaaauauccagcacugaaugugaccaugcccaacaacgagaaguucgacaaacuuuacaucuggggaguccaccauccuggcacagauaaugaccagauuuuucuuuaugcccaggcuaguggccguaucacugugagcaccaagagaucucaacagacaguaauuccaaacaucggguccaggccccggguucgcaauauaccuucaagaauuagcaucuacuggaccauugugaaaccaggagauauccugcuaaucaacaguacggguaaucucauugccccgaggggcuacuucaagauacggucugggaaguccagcaucaugcgcucggacgcgcccauuggaaaauguaacucugaaugcaucacuccuaauggcuccauaccaaacgacaagcccuuucagaaugucaaccgaauuacauauggugcauguccuagauacgugaaacagaauacccugaaguuggccacugggaugaggaacgugccagagaaacaaacacggggaaucuucggcgcuaucgccggcuuuauugaaaaugggugggagggaauggucgaugguugguauggcuuccgucaccagaacucagaggggaucggacaggcagcugaccugaagaguacccaagccgcgauuaaucagauaaacggcaaauugaaccgccucaucgguaagacgaaugaaaaguuccaccagauugagaaagaauuuagcgagguugaagggagaauccaggaucuggagaaguacguggaggacaccaaaaucgauuuaugguccuauaacgccgaacugcucguagcacuugagaaucaacauacaauugaccugacugauucugaaaugaacaaguuguucgagaggaccaaaaagcagcuacgggaaaaugcugaggacaugggcaacggaugcuuuaagauauaccacaaaugugauaaugccugcaucggcagcauucgaaacgggacauaugaccaugauguguaccgcgacgaggcucugaauaacagauuccagaucaagggagucgaacucaaaucagguuacaaggacuggauucuguggaucaguuuugccauauccugcuuccuucugugugugguuuugcucggcuuuaucaugugggcaugccagaaagggaauauuagguguaacaucugcauuuga

SEQ ID NO: 134788 - RNA, 1701 nt, Artificial Sequence
  derived and/or modified CDS sequence (opt3) from hemagglutinin__InfluenzaA__AEG64999
augaagaccaucauugcccugagcuacauacucugccuuguguucgcucagaaacugcccggcaacgacaauuccacagcaacuuuguguuuagggcaccaugccgucccuaacggaacgaucguuaagaccauuacaaaugaucaaaucgaggugacuaacgcgaccgaacugguacaaaauucuucaacagguggcauuugcgacaguccacaccagauccuagauggggagaacuguacccucauagacgcucugcuuggagauccgcagugcgacggcuuucagaauaaaaagugggaucuguucguggaaagaagcaaagccuauuccaacuguuaccccuaugacgucccugauuacgugucuuugaggucgcucguugcaucaagcgguacucuggaguuuaauaacgaaaguuucaauuggacaggggugacccagaacggaacguccucugccugcaagcggcgcagcaauaacuccuuuuucucacgacugaauuggcucacucauuuaaaguuuaaauauccagcucugaacgucaccaugcccaacaaugagaaguucgacaaacuuuacaucuggggcgugcaccauccuggcacagauaacgaccagauuaguuuguaugcacaggccagcgggcguaucacuguaucuaccaagagaucccaacagacaguuauuccaaauaucggaucaaggccccgggugcgcgauauaccuagcagaauuaguaucuacuggaccauugucaaaccaggugacauccugcuaaucaacucuacgggcaaucucauugcuccgaggggguacuuuaagauacgguccggaaagagcucgaucaugcgcucugacgcccccauuggcaaauguaacuccgagugcaucacuccuaaugguucaauaccaaacgauaagcccuuccagaaugugaaccgaauuacauauggggcguguccuagauacgugaaacagaauacccugaagcuggcaacuggaaugaggaacgucccagaaaaacaaacacggggcaucuuuggcgccaucgcuggguucauugagaauggaugggaagguaugguugacggcugguauggguuucgucaccagaacagugagggaaucggccaggccgcagaucuuaagagcacccaagcugccauuaaucagauaaacgguaaauugaaccgccucaucgggaagacgaaugagaaguuccaccagauugaaaaagaguucuccgaaguggagggcagaauccaggaccuggaaaaguacguagaggauaccaaaaucgacuuauggucuuauaacgcggagcugcucguggcccuugaaaaucaacauacaauugaucugacugacagcgagaugaacaaguuguuugaaaggaccaaaaagcagcuacgggagaaugcagaagauaugggaaacggcugcuucaagauauaccacaaaugugacaaugcuugcaucgggucaauucgaaacggaacauaugaucaugacgucuaccgcgacgaggcccugaauaacagauuucagaucaaggguguggagcucaaaaguggcuacaaggauuggauucuguggaucuccuucgcuauaagcugcuuucuucuguguguugccuugcucggguucaucaugugggcaugccagaaaggaaauauuagguguaacaucugcauuuga

SEQ ID NO: 134789 - RNA, 1701 nt, Artificial Sequence; identical to SEQ ID NO: 128303
  derived and/or modified CDS sequence (opt3) from hemagglutinin__InfluenzaA__AEG65010

SEQ ID NO: 134790 - RNA, 1701 nt, Artificial Sequence
  derived and/or modified CDS sequence (opt3) from hemagglutinin__InfluenzaA__AEG65021
augaagaccaucauugcccugagcuacauacucugccuuguguucgcucagaaacugcccggcaacgacaauuccacagcaacuuuguguuuagggcaccaugccgucccuaacggaacgaucguuaagaccauuacaaaugaucaaaucgaggugacuaacgcgaccgaacugguacagucuucaaguacagguggcauuugcgacagcccacaccagauccuagauggggagaauuguacccucauagacgcucugcuuggagauccgcagugcgacggcuuucaaaacaaaaagugggaucuguucguggaaagauccaaagccuauucuaauuguuaccccuaugacgucccugauuacgugucguugaggucacucguugcaagcagugguacucuggaguuuaacaaugaauccuucaacuggacaggggugacccagaauggaacgucuagcgccugcaagcggcgcuccaacaauucauuuuucagucgacugaacuggcucacucauuuaaaguuuaaauauccagcucugaaugucaccaugcccaacacagagaaguucgacaaacuuuacaucuggggcgugcaccauccuggcacugauaacgaccagauuagcuuguaugcacaggccucugggcguaucaccguauccacaaagagaucacaacagaccguuauuccaaauaucggaagcaggccccgggugcgcgauauaccuaguagaauuucuaucuacuggacgauugucaaaccaggugacauccugcuaaucaacuccacuggcaaucucauugcuccgaggggguacuuuaagauacggagcggaaagucgucuaucaugcgcuccgacgcccccauuggcaaauguaacucagagugcaucacaccuaaugguaguauaccaaacgauaagcccuuccagaaugugaaccgaauuaccuauggggcguguccuagauacgugaaacagaauacucugaaacuugcaacaggaaugaggaacgucccagaaaaacaaacccggggcaucuuuggcgccaucgcuggguucauugagaauggaugggaagguaugguugacggcugguauggguuucgucaccagaacagcgagggaaucggccaggccgcagaucugaaguccacgcaagcugccauuaaucagauaaacgguaaauugaaucgccucaucgggaagaccaacgagaaguuccaccagauugaaaaagaguucucugaaguggagggcagaauccaggaccuggaaaaguacguagaggauacaaaaaucgacuuauggagcuauaacgcggagcugcucguggcccuugaaaaucaacauacuauugaucugaccgacucagagaugaacaaguuguuugaaaggacaaagaagcagcuacgggagaaugcagaagauaugggaaacggcugcuucaagauauaccacaaaugugacaaugcuugcaucgggaguauucgaaacggaacuuaugaucaugacgucuaccgcgacgaggcccugaauaacagauuucagaucaaggguguggagcucaaauccggcuacaaggauuggauucuguggaucagcuucgcuauaucuugcuuucuucuguguguugccuugcucggguucaucaugugggcaugccagaaaggaaauauuagguguaacaucugcauuuga

SEQ ID NO: 134791 - RNA, 1701 nt, Artificial Sequence
  derived and/or modified CDS sequence (opt3) from hemagglutinin__InfluenzaA__AEG65032
augaagaccaucauugcccugagcuacauacucugccuuguguucgcucagaaacugcccggcaacgacaauuccacagcaacuuuguguuuagggcaccaugccgucccuaacggaacgaucguuaagaccauuacaaaugaucaaaucgaggugacuaacgcgaccgaacugguacagucuucaaguacagguggcauuugcgacagcccacaccagauccuagauggggagaauuguacccucauagacgcucugcuuggagauccgcagugcgacggcuuucaaaacaaaaagugggaucuguucguggaaagauccaaagccuauucuaauuguuaccccuaugacgucccugauuacgcaucguugaggucacucguggccagcagugguacucuggaguuuaacaaugaauccuucaacuggacagggguuacccagaauggaacgucuagcgcuugcaagcggcgcuccaacaauucauuuuucagucgacugaacuggcucacucauuuaaaguuuaaauauccagcacugaaugugaccaugcccaacaacgagaaguucgacaaacuuuacaucuggggcguccaccauccuggcacagauaaugaccagaucuuuuuguaugcccaggcuagcgggcguauuacugugucuaccaagagaucccaacagacaguaauuccaaacaucggaucaaggccccggguucgcaauauaccuagcagaauuaguaucuacuggaccauugugaaaccaggugauauccugcuaaucaacucuacgggcaaucucauugccccgaggggguacuucaagauacgguccggaaagagcucgaucaugcgcucugacgcgcccauuggcaaauguaacuccgagugcaucacuccuaaugguucaauaccaaacgacaagcccuuucagaaugucaaccgaauuacauauggggcauguccuagauacgugaaacagaauacccugaagcuggccacuggaaugaggaacgugccagaaaaacaaacacggggcaucuucggcgcuaucgccggguuuauugagaauggaugggaagguauggucgauggcugguauggguuccgucaccagaacagugagggaaucggccaggcagcugaccuuaagagcacccaagccgcgauuaaucagauaaacgguaaauugaacaagcucaucgggaagacgaaugagaaauuccaccagauugaaaaggaguuuuccgaaguugagggccgcauccaggaucuggaaaaauacguggaggacaccaagaucgauuuauggucuuauaacgccgagcugcucguagcacuugaaaaucaacauacaauugaccugacugauagcgagaugaacaaauuguucgaaagaaccaagaagcagcuaagggagaaugcugaagacaugggaaacggcugcuuuaaaauauaccacaagugugauaaugccugcaucgggucaauucggaacggaacauaugaccaugauguguaccgagacgaggcucugaauaaccgcuuccagaucaaaggugucgagcucaagaguggcuacaaagacuggauucuguggaucuccuuugccauaagcugcuuccuucuguguguggcauugcucggguuuaucaugugggccugccagaagggaaauauuagauguaacaucugcauuuga

SEQ ID NO: 134792 - RNA, 1701 nt, Artificial Sequence; identical to SEQ ID NO: 128678
  derived and/or modified CDS sequence (opt3) from hemagglutinin__InfluenzaA__AEG65043

SEQ ID NO: 134793 - RNA, 1701 nt, Artificial Sequence; identical to SEQ ID NO: 128678
  derived and/or modified CDS sequence (opt3) from hemagglutinin__InfluenzaA__AEG65054

SEQ ID NO: 134794 - RNA, 1701 nt, Artificial Sequence
  derived and/or modified CDS sequence (opt3) from hemagglutinin__InfluenzaA__AEG65065
augaagaccaucauugcccugagcuacauacucugccuuguguucgcucagaaacugcccggcaacgacaauuccacagcaacuuuguguuuagggcaccaugccgucccuaacggaacgaucguuaagaccauuacaaaugaucaaaucgaggugacuaacgcgaccgaacugguacagucuucaaguacaggugagauuugcgacagcccacaccagauccuagauggcgaaaauuguacccucauagacgcucugcuuggggauccgcagugcgacggauuucaaaacaaaaagugggaucuguucguggagagauccaaagccuauucuaauuguuaccccuaugacgucccugauuacgcaucguugaggucacucguggccagcaguggcacucuggaauuuaacaaugaguccuucaacuggacagguguuacccagaaugggacgucuagcgcuugcaagcggcgcuccaacaauucauuuuucagucgacugaacuggcucacucauuuaaaguuuaaauauccagcacugaaugugaccaugcccaacaacgagaaguucgacaaacuuuacaucuggggaguccaccauccuggcacagauaaugaccagaucuuuuuguaugcccaggcuagcggccguauuacugugucuaccaagagaucccaacagacaguaauuccaaacaucgggucaaggccccggguucgcaauauaccuagcagaauuaguaucuacuggaccauugugaaaccaggagauauccugcuaaucaacucuacggguaaucucauugccccgaggggcuacuucaagauacgguccggaaagagcucgaucaugcgcucugacgcgcccauugggaaauguaacuccgaaugcaucacuccuaauggcucaauaccaaacgacaagcccuuucagaaugucaaccgaauuacauauggugcauguccuagauacgugaaacagaauacccugaagcuggccacugggaugaggaacgugccagagaaacaaacacggggaaucuucggcgcuaucgccggcuuuauugaaaaugggugggagggaauggucgaugguugguauggcuuccgucaccagaacagugaggggaucggacaggcagcugaccuuaagagcacccaagccgcgauuaaucagauaaacggcaaauugaaccgccucaucgguaagacgaaugaaaaguuccaccagauugagaaagaauuuuccgagguugaagggagaauccaggaucuggagaaguacguggaggacaccaaaaucgauuuauggucuuauaacgccgaacugcucguagcacuugagaaucaacauacaauugaccugacugauagcgaaaugaacaaguuguucgagaggaccaaaaagcagcuacgggaaaaugcugaggacaugggcaacggaugcuuuaagauauaccacaaaugugauaaugccugcaucggcucaauucgaaacgggacauaugaccaugauguguaccgcgacgaggcucugaauaacagauuccagaucaagggagucgaacucaaaagugguuacaaggacugggugcuguggauuuccuuugccaucagcugcuuccuucuguguguuguguugcucggcuuuauaaugugggcaugccagaaagggaauaucagguguaacauuugcaucuga

SEQ ID NO: 134795 - RNA, 1701 nt, Artificial Sequence
  derived and/or modified CDS sequence (opt3) from hemagglutinin__InfluenzaA__AEG65076
augaagaccaucauugcccugagcuacauacucugccuuguguucgcucagaaacugcccggcaacgacaauuccacagcaacuuuguguuuagggcaccaugccgucccuaacggaacgaucguuaagaccauuacaaaugaucaaaucgaggugacuaacgcgaccgaacugguacagucuucaaguacagguggcauuugcgacagcccacaccagauccuagauggggagaauuguacccucauagacgcucugcuuggagauccgcagugcgacggcuuucaaaacaaaaagugggaucuguucguggaaagauccaaagccuauucuaauuguuaccccuaugacgucccugauuacgcaucguugaggucacucguggccagcagugguacucuggaguuuaacaaugaauccuucaacuggacagggguuacccagaauggaacgucuagcgcuugcaagcggcgcuccaacaauucauuuuucagucgacugaacuggcucacucauuuacguuuuaaguauccagcacugaaugugaccaugcccaacaacgagaaauucgacaaguuguacaucuggggcguccaccauccuggcacagauaaugaccagauuuuucuuuaugcccaggcuagcgggagaaucacugugucuaccaaaaggucccaacagacaguaauuccaaacguuggaucacggccccgcgugagaaauaucccuagcaggauaaguauuuacuggaccaucgucaagccaggugauauucugcuaaucaacucuacgggcaaucucaucgccccgcggggguacuucaaaauucgcuccggaaagagcucgauaaugcgaucugacgcgcccaucggcaaguguaacuccgagugcauuacuccuaaugguucaaucccaaacgacaaacccuuucagaaugugaacagaauaacauauggggcauguccuagguacgugaagcagaauacccugaaacuugccacuggaaugcggaacgucccagaaaagcaaacacguggcauuuucggcgcuaucgccggguuuaucgagaauggaugggaagguaugguugauggcugguauggguuccgccaccagaacagugagggaaccggccaggcagcugaccugaaaagcacgcaagccgcgauuaaucagaucaacgguaaguugaacagacucauugggaaaaccaaugagaaguuccaccagauagaaaaggaguuuuccgaaguggagggcaggauccaggaucuggaaaaauacguagaggacacaaagauugauuuauggucuuauaacgccgagcugcucguggcacuugaaaaucaacauacuaucgaccugaccgauagcgagaugaacaaauuguucgaacggacaaagaaacagcuacgagagaaugcugaagacaugggaaacggcugcuuuaagaucuaccacaagugugauaaugccugcauugggucaauacgcaacggaacuuaugaccaugaugucuacagagacgaggcucugaauaacagguuccagaucaaagguguggagcucaagaguggcuacaaagacuggauucuguggaucuccuuugccauuagcugcuuccuucuguguguugcauugcucggguuuaucaugugggccugccagaagggaaauauacgguguaacaucugcauuuga

SEQ ID NO: 134796 - RNA, 1701 nt, Artificial Sequence
  derived and/or modified CDS sequence (opt3) from hemagglutinin__InfluenzaA__AEG65087
augaagaccaucauugcccugagcuacauacucugccuuguguucgcucagaaacugcccggcaacgacaauuccacagcaacuuuguguuuagggcaccaugccgucccuaacggaacgaucguuaagaccauuacaaaugaucaaaucgaggugacuaacgcgaccgaacugguacagucuucaaguacagguggcauuugcgacagcccacaccagauccuagauggggagaauuguacccucauagacgcucugcuuggagauccgcagugcgacggcuuucaaaacaaaaagugggaucuguucguggaaagauccaaagccuauucuaauuguuaccccuaugacgucccugauuacgcaucguugaggucacucguggccagcagugguacucuggaguuuaacaaugaauccuucaacuggacagggguuacccagaauggaacgucuagcgcuugcaagcggcgcuccaacaauucauuuuucagucgacugaacuggcucacucauuuaaaguuuaaauauccagcacugaaugugaccaugcccaacaacgagaaguucgacaaacuuuacaucuggggcguccaccauccuggcacaaauaacgaucagaucuuuuuguaugcccaggcuagcgggcguauuacugugucuaccaagagaucccaacagacaguaauuccaaauaucggaucaaggccccggguucgcaacauaccuagcagaauuaguaucuacuggaccauugugaaaccaggugacauccugcuaaucaauucuacgggcaaccucauugccccgaggggguacuucaagauacgguccggaaagagcucgaucaugcgcucugaugcgcccauuggcaaauguaauuccgagugcaucacuccuaacgguucaauaccaaaugacaagcccuuucagaacgucaaucgaauuacauauggggcauguccuagauacgugaaacagaacacccugaagcuggccacuggaaugaggaaugugccagaaaaacaaacacggggcaucuucggcgcuaucgccggguuuauugagaacggaugggaagguauggucgacggcugguauggguuccgucaccagaauagugagggaaucggccaggcagcugaucuuaagagcacccaagccgcgauuaaccagauaaacgguaaauugaaucgccucaucgggaagacgaacgagaaguuccaccagauugaaaaagaguuuuccgaaguugagggcagaauccaggaccuggaaaaguacguggaggauaccaaaaucgacuuauggucuuauaaugccgagcugcucguagcacuugaaaaccaacauacaauugaucugacugacagcgagaugaauaaguuguucgaaaggaccaaaaagcagcuacgggagaacgcugaagauaugggaaauggcugcuuuaagauauaccacaaaugugacaacgccugcaucgggucaauucgaaauggaacauaugaucaugacguguaccgcgaugaggcucugaacaauagauuccagaucaagggugucgagcucaaaaguggcuacaaggacuggauucuguggaucuccuuugccauaagcugcuuccuucuguguguggcauugcucggguuuaucaugugggccugccagaaaggaaacauuagguguaauaucugcauuuga

SEQ ID NO: 134797 - RNA, 1701 nt, Artificial Sequence
  derived and/or modified CDS sequence (opt3) from hemagglutinin__InfluenzaA__AEG65098
augaagaccaucauugcccugagcuacauacucugccuuguguucgcucagaaacugcccggcaacgacaauuccacagcaacuuuguguuuagggcaccaugccgucccuaacggaacgaucguuaagaccauuacaaaugaucaaaucgaggugacuaacgcgaccgaacugguacagucuucaaguacaggugagauuugcgacagcccacaccagauccuagauggcgaaaauuguacccucauagacgcucugcuuggggauccgcagugcgacgauuuucaaaacaaaaagugggaccuguucguggagagauccaaagccuauucuaauuguuaccccuaugaugucccugacuacgcaucguugaggucacucguggccagcaguggaacucuggaauuuaacaaugaguccuucaacuggacaggcguuacccagaaugguacgucuagcgcuugcaagcggcgcuccaacaauucauuuuucagucgacugaacuggcucacucauagcaaguuuaaauauccagcauuaaaugugaccaugcccaacaacgagaaguucgauaaacuguacaucuggggaguccaccauccugggacagacaaugaucagauuuuucuuuaugcccaggcuucuggccguaucacuguguccaccaagagaucacaacagacaguaauuccaaacaucggcagcaggccccggguucgcaauauaccuaguagaauuucuaucuacuggaccauugugaaaccaggggacaucuugcugaucaacuccacgggaaaucuaauugccccgagggguuacuucaagauacggagcggcaagucgucuaucaugcgcuccgacgcgcccauugggaaauguaacucagaaugcaucacuccuaauggaaguauaccaaacgauaagcccuuucagaaugucaaccgaauuacauauggcgcauguccuagauacgugaaacagaauacccucaagcuggccacugguaugaggaacgugccagagaaacaaacacgggggaucuucggagcuaucgccggcuuuauugaaaauggcugggaggggauggucgacggaugguaugguuuccgucaccagaacagcgagggcaucgggcaggcagcugaucuuaaguccacccaagccgcgauuaaucagauaaacggaaaccugaaucgcuugaucggcaaaacgaacgaaaaguuccaccagauugagaaggaauuuucugagguugaagguagaauccaggaccucgagaaauacguggaggauaccaagaucgaccuguggagcuauaaugccgaauuacugguagcacucgagaaccaacauacaauugaucuuacugacucagaaaugaauaaacuguucgagaggaccaagaaacaguugcgggaaaacgcugaggauauggggaauggcugcuuuaagauauaccacaagugugacaacgccugcaucggaaguauucgaaauggcacauaugaucaugacguguaccgcgacgaggcucuaaacaauagauuccagaucaaaggggucgaacugaaguccggauacaaagauuggauucucuggaucagcuuugccauaucuugcuuccugcuuugugugguucuguuggguuuuaucaugugggcaugccagaagggcaacauuagguguaauaucugcauuuga

SEQ ID NO: 134798 - RNA, 1701 nt, Artificial Sequence
  derived and/or modified CDS sequence (opt3) from hemagglutinin__InfluenzaA__AEG65109
augaagaccaucauugcccugagcuacauacucugccuuguguucgcucagaaacugcccggcaacgacaauuccacagcaacuuuguguuuagggcaccaugccgucccuaacggaacgaucguuaagaccauuacaaaugaucaaaucgaggugacuaacgcgaccgaacugguacagucuucaaguacaggugagauuugcgacagcccacaccagauccuagauggcgaaaauuguaaacucauagacgcucugcuuggggauccgcagugcgacggauuucaaaacaagaaaugggaucuguucguggagagauccaaggccuauucuaauuguuaccccuaugacgucccugauuacgcaucguugaggucacucguggccagcaguggcacccuggaauuuaacaaugaguccuucaacuggacugguguuacacagaaugggaccucuagcgcuugcaagcggcgcuccaacaauucauuuuucagucgacugaacuggcucacgcauuuaaaauuuaaguauccagcacugaaugugacuaugcccaacaacgagaaauucgacaaguuguacaucuggggaguccaccauccuggcaccgauaaugaccagauuuuucuuuaugcccagagcucuggccguaucacaguguccacuaaaagaucacaacagaccguaauuccaaacaucgggagcaggccccggguucgcaauauaccuaguagaauuucuaucuacuggacaauugugaagccaggagauauccugcuaaucaacuccaccgguaaucucauugcuccgaggggcuacuucaagauacggagcgggaaaucgucuaucaugcgcuccgacgcccccauuggaaaguguaacucagaaugcaucacgccuaauggcaguauaccaaacgacaaacccuuucagaaugucaaccgaauuacuuauggugcguguccuagauacgugaagcagaauacacugaaacuugcaaccgggaugaggaacgugccagagaagcaaacucggggaaucuucggcgccaucgcuggcuuuauugaaaaugggugggagggaauggucgaugguugguauggcuuccgucaccagaacagcgaggggaucggacaggccgcagaccugaaauccacacaagcugccauuaaucagauaaacggcaaguugaaccgccucaucgguaagaccaaugaaaaauuccaccagauugagaaggaauuuucugagguugaagggagaauccaggaucuggagaaauacguggaggacacgaagaucgauuuauggagcuauaacgcggaacugcucguagcccuugagaaucaacauaccauugaccugacagauucagaaaugaacaaauuguucgagaggacuaagaagcagcuacgggaaaaugcagaggacaugggcaacggaugcuuuaaaauauaccacaagugugauaaugcuugcaucggcaguauucgaaacgggaccuaugaccaugauguguaccgcgacgaggcccugaauaacagauuccagaucaaaggagucgaacucaaguccgguuacaaagacuggauucuguggaucagcuuugcuauaucuugcuuccuucuguguguggccuugcucggcuuuaucaugugggcaugccagaaggggaauauuagguguaacaucugcauuuga

SEQ ID NO: 134799 - RNA, 1701 nt, Artificial Sequence
  derived and/or modified CDS sequence (opt3) from hemagglutinin__InfluenzaA__AEG65120
augaagaccaucauugcccugagcuacauacucugccuuguguucgcucagaaacugcccggcaacgacaauuccacagcaacuuuguguuuagggcaccaugccgucccuaacggaacgaucguuaagaccauuacaaaugaucaaaucgaggugacuaacgcgaccgaacugguacagucuucaaguacaggugagauuugcgacagcccacaccagauccuagauggcgaaaauuguacccucauagacgcucugcuuggggauccgcagugcgacggauuucaaaacaaaaagugggaucuguucguggagagauccaaagccuauucuaauuguuaccccuaugacgucccugauuacgcaucguugaggucacucguggccagcaguggcacucuggaauuuaacaaugaguccuucaacuggacagguguuacccagaaugggacgucuagcgcuugcaagcggcgcuccaacaauucauuuuucagucgacugaacuggcucacucauuuaaaguuuaaauauccagcacugaaugugaccaugcccaacaacgagaaguucgacaaacuuuacaucuggggaguccaccauccuggcacagauaaugaccagaucuuuuuguaugcccaggcuagcggccguauuacugugucuaccaagagaucccaacagacaguaauuccaaacaucgggucaaggccccggguucgcaauauaccuagcagaauuaguaucuacuggaccauugugaaaccaggagauauccugcuaaucaacucuacggguaaucucauugccccgaggggcuacuucaagauacgguccggaaagagcucgaucaugcgcucugacgcgcccauugggaaauguaacuccgaaugcaucacuccuaauggcucaauaccaaacgacaagcccuuucagaaugucaaccgaauugcauauggugccuguccuagauacgugaaacagaauacacugaagcuggcuaccgggaugaggaacgugccagagaaacaaacucggggaaucuucggcgccaucgcaggcuuuauugaaaaugggugggagggaauggucgaugguugguauggcuuccgucaccagaacagugaggggaucggacaggcugccgaccuuaagagcacacaagcggccauuaaucagauaaacggcaaauugaaccgccucaucgguaagaccaaugaaaaguuccaccagauugagaaagaauuuuccgagguugaagggagaauccaggaucuggagaaguacguggaggacacgaaaaucgauuuauggucuuauaacgcagaacugcucguagcucuugagaaucaacauaccauugaccugacagauagcgaaaugaacaaguuguucgagaggacuaaaaagcagcuacgggaaaaugccgaggacaugggcaacggaugcuuuaagauauaccacaaaugugauaaugcuugcaucggcucaauucgaaacgggaccuaugaccaugauguguaccgcgacgaggcccugaauaacagauuccagaucaagggagucgaacucaaaagugguuacaaggacuggauucuguggaucuccuuugcaauaagcugcuuccuucugugugugguuuugcucggcuuuaucaugugggccugccagaaagggaauauuagguguaacaucugcauuuga

SEQ ID NO: 134800 - RNA, 1701 nt, Artificial Sequence
  derived and/or modified CDS sequence (opt3) from hemagglutinin__InfluenzaA__AEG65131
augaagaccaucauugcccugagcuacauacucugccuuguguucgcucagaaacugcccggcaacgacaauuccacagcaacuuuguguuuagggcaccaugccgucccuaacggaacgaucguuaagaccauuacaaaugaucaaaucgaggugacuaacgcgaccgaacugguacagucuucaaguacaggugagauuugcgacagcccacaccagauccuagauggcgaaaauuguacccucauagacgcucugcuuggggauccgcagugcgacggauuucaaaacaaaaagugggaucuguucguggagagauccaaagccuauucuaauuguuaccccuaugacgucccugauuacgcaucguugaggucacucguggccagcaguggcacucuggaauuuaacaaugaguccuucaacuggacagguguuacccagaaugggacgucuagcgcuugcaagcggcgcuccaacaauucauuuuucagucgacugaacuggcucacucauagcaaguuuaaauauccagcauuaaaugugaccaugcccaacaacgagaaguucgacaaacuguacaucuggggaguccaccauccuggcacagauaaugaccagauuuuucuuuaugcccaggcuucuggccguaucacuguguccaccaagagaucacaacagacaguaauuccaaacaucgggagcaggccccggguucgcaauauaccuaguagaauuucuaucuacuggaccauugugaaaccaggagauaucuugcugaucaacuccacggguaaucuaauugccccgaggggcuacuucaagauacggagcgggaagucgucuaucaugcgcuccgacgcgcccauuggaaaauguaacucagaaugcaucacuccuaauggcaguauaccaaacgacaagcccuuucagaaugucaaccgaauuacauauggugcauguccuagauacgugaaacagaauacccucaagcuggccacugggaugaggaacgugccagagaaacaaacacggggaaucuucggcgcuaucgccggcuuuauugaaaaugggugggagggaauggucgaugguugguauggcuuccgucaccagaacagcgaggggaucggacaggcagcugaccuuaaguccacccaagccgcgauuaaucagauaaacggcaaacugaaccgcuugaucgguaagacgaaugaaaaguuccaccagauugagaaagaauuuucugagguugaagggagaauccaggaucucgagaaguacguggaggacaccaaaaucgaucuguggagcuauaacgccgaauuacugguagcacucgagaaucaacauacaauugaccuuacugauucagaaaugaacaagcuguucgagaggaccaaaaagcaguugcgggaaaaugcugaggacaugggcaacggaugcuuuaagauauaccacaaaugugauaaugccugcaucggcaguauucgaaacgggacauaugaccaugauguguaccgcgacgaggcucuaaauaacagauuccagaucaagggagucgaacugaaauccgguuacaaggacuggauucucuggaucagcuuugccauaucuugcuuccugcuuugugugguucuguugggcuuuaucaugugggcaugccagaaagggaauauuagguguaacaucugcauuuga

SEQ ID NO: 134801 - RNA, 1701 nt, Artificial Sequence; identical to SEQ ID NO: 128099
  derived and/or modified CDS sequence (opt3) from hemagglutinin__InfluenzaA__AEG65142

SEQ ID NO: 134802 - RNA, 1701 nt, Artificial Sequence; identical to SEQ ID NO: 128099
  derived and/or modified CDS sequence (opt3) from hemagglutinin__InfluenzaA__AEG65153

SEQ ID NO: 134803 - RNA, 1701 nt, Artificial Sequence
  derived and/or modified CDS sequence (opt3) from hemagglutinin__InfluenzaA__AEG65164
augaagaccaucauugcccugagcuacauacucugccuuguguucgcucagaaacugcccggcaacgacaauuccacagcaacuuuguguuuagggcaccaugccgucccuaacggaacgcugguuaagaccaucacaaaugaucaaauugaggugacuaacgcgaccgaauugguacagucuucaaguacagguagaaucugcgacagcccacaccagauucucgauggcgagaauuguacccugaucgacgcccuucugggggauccgcauugcgacggauuucagaacaaagaaugggauuuguucguggagagguccaaggcuuauucuaauuguuaccccuaugacgucccugauuacgugucgcuccggucacugguugcaagcaguggcacucuggaauuuaacaaugaguccuucaacuggacagguguggcccaaaaugggaccucuagcgcuugcaaacgccgauccgacaagucauuuuucagucgucucaacugguuacaccagcugaaguauaaauacccagcacuuaaugucacgaugcccaacaaugagaaguuugauaaauuguauauauggggagugcaucacccuggcacugacagcgaucagaucucucuguacgcccaggcuuccggcagaguaaccguuucaacaaagaggagccaacagacugugauuccaaacaucgggagucggcccuggguccgcggagugucuuccagaauuagcaucuacuggaccauagugaaaccuggugacauucuacucaucaacucgacaggcaaucugauugccccaaggggguauuucaagauccggucuggaaaguccucaaucaugcgcagugacgcgccgauuggcaaauguaacagcgaaugcauaacccccaaugguuccaucccuaacgauaagccauuucagaaugucaaccgaauuacguacgggcccuguccuagauauguuaaacagaauacucuuaagcuggcaacaggaaugaggaacgugccagagaaacaaacccggggcaucuucggcgccauagcuggguuuauugaaaauggaugggaggguaugauggacggcugguacggguuccgucaccagaacucugagggaacuggccaggccgcagaucuaaagagcacacaagcugccaucaaucagaucaacgguaaacucaaucgccugauugaaaagaccaacgagaaguuucaucagaucgaaaaagaguucucagaaguagaggggaggauucaggacuuagagaaguauguggaagauacgaaaauagaccuguggaguuacaaugcggaguuccucgucgcccuugaaaaccaacacaccaucgaucugacagacuccgagaugaacaaguuguuugaaagaacuaaaaagcagcuacgggagaaugcagaggauaugggcaacggaugcuucaagauuuaucauaaaugugacaaugcuugcaucggcagcauccgaaacgggaccuacgaucacgacguguaccgcgacgaagcccugaauaacagauuucagauuaagggaguugagcucaaaucugguuauaaggauuggauacuguggaucucauucgcuauuaguugcuuucuucuguguaucguguugcucggcuucauuaugugggccugccagaaagggaauaucagguguaacauaugcaucuga

SEQ ID NO: 134804 - RNA, 1701 nt, Artificial Sequence
  derived and/or modified CDS sequence (opt3) from hemagglutinin__InfluenzaA__AEG65175
augaagaccaucauugcccugagcuacauacucugccuuguguucgcucagaaacugcccggcaacgacaauuccacagcaacuuuguguuuagggcaccaugccgucccuaacggaacgaucguuaagaccauuacaaaugaucaaaucgaggugacuaacgcgaccgaacugguacagucuucaaguacagguggcauuugcgacagcccacaccagauccuagauggggagaauuguacccucauagacgcucugcuuggagauccgcagugcgacggcuuucaaaacaaaaagugggaucuguucguggaaagauccaaagccuauucuaauuguuaccccuaugacgucccugauuacgcaucguugaggucacucguggccagcagugguacucuggaguuuaacaaugaauccuucaacuggacagggguuacccagaauggaacgucuagcgcuugcgagcggcgcuccaacaagucauuuuucagucgacugaauuggcucacucauuuaaaguauaaauacccagcacugaacgugaccaugcccaauaacgagaaguuugacaaacuuuauaucuggggcguccaccauccuggcacagauagcgaccagauuucuuuguacgcccaggcuuccgggcguaucacugugucaaccaagagaagccaacagacaguaauuccaaacaucggaaguaggccccggguucgcgaugugucuuccagaauaagcauuuacuggaccaucgucaaaccuggugacauucugcuaaucaauucgacgggcaaccucaucgccccaaggggguauuucaagauucggaauggaaagucuuccauaaugcgcucagacgcgccgaucggcaaauguaacagugaaugcauuacucccaaugguagcaucccuaacgauaagccauuucagaaugugaaccgaauaacauacggggcaugucccagauaugugaaacagaauacccugaaacuugccacuggaaugaggaacgucccugagaaacaaacacggggcauuuucggcgcuaucgccggguuuaucgaaaauggaugggaggguaugguugacggcugguacggguuccgucaccagaacuccgagggaaccggccaggcagcugaucugaagucuacgcaagccgcgauuaaucagaucaacgguaaauugaaucgccucauugggaagaccaacgaaaaguuucaccagauagagaaagaguucagcgaaguggaaggcagaauccaggaccuggagaaguauguagaggauacaaaaauugacuuauggucauacaacgccgaacugcucguggcacuugagaaucaacauacuaucgaucugaccgacagugaaaugaacaaguuguucgagaggacaaagaagcagcuacgggaaaaugcugaggauaugggaaacggcugcuuuaagaucuaucacaaaugugacaaugccugcauuggguccauacgaaacggaacuuacgaucaugacgucuaccgcgacgaggcucugaauaacagauuccagaucaaggguguggaacucaaaagcggcuauaaggauuggauucuguggaucucuuuugccauuucaugcuuccuucuguguguugcauugcucggguuuaucaugugggccugccagaaaggaaauauaaggugugacaucugcauuuga

SEQ ID NO: 134805 - RNA, 1701 nt, Artificial Sequence; identical to SEQ ID NO: 128467
  derived and/or modified CDS sequence (opt3) from hemagglutinin__InfluenzaA__AEG65186

SEQ ID NO: 134806 - RNA, 1701 nt, Artificial Sequence
  derived and/or modified CDS sequence (opt3) from hemagglutinin__InfluenzaA__AEG65197
augaagaccaucauugcccugagcuacauacucugccuuguguucgcucagaaacugcccggcaacgacaauuccacagcaacuuuguguuuagggcaccaugccgucccuaacggaacgaucguuaagaccauuacaaaugaucaaaucgaggugacuaacgcgaccgaacugguacagucuucaccaacagguggcauuugcgacaguccgcaccagauccuagauggggagaauuguacccucauagacgcucugcuuggagauccccagugcgacggcuuucaaaacaaaaagugggaucuguucguggaaagaagcaaagccuauuccaauuguuacccuuaugacgucccagauuacgcaucuuugaggucgcucguggccucaagcgguacucuggaguuuaacaaugaaaguuucaacuggacagggguuacccagaauggaacguccucugcuugcaagcggcgcagcaacaauuccuuuuucucacgacugaacuggcucacucauuuaaaguuuaaauaucccgcacugaaugugaccaugccuaacaacgagaaguucgacaaacuuuacaucuggggcguccaccauccaggcacagauaaugaccagauuaguuuguaugcccaggcuagcgggcguaucacugugucuaccaagagaucccaacagacaguaauucccaacaucggaucaaggccucggguucgcgauauaccaagcagaauuaguaucuacuggaccauugugaaaccgggugacaucauccugauuaauucuacgggcaaccuaauagcccccaggggguacuuuaagauccgguccggaaagagcucgauuaugcgcucugacacuccuaucggcaaauguaauuccgagugcauaacaccaaacgguucaauucccaaugauaagccuuuccagaacgucaaucgaaucaccuauggggcguguccaagauacgugaaacagaacacucucaagcuggcaacaggaaugaggaaugugcccgaaaaacaaacccggggcaucuuuggcgccauugcuggguucaucgagaacggaugggaagguauggucgacggcugguauggguuucgucaccagaauagugagggaauuggccaggccgcagaucuuaagagcacgcaagcugccauaaaccagaucaaugguaaacugaaccgcuugauugggaagaccaacgagaaguuccaccagaucgaaaaagaguucuccgaaguugagggcagaauccaggaccucgaaaaguacguggaggauacaaaaauugaccuguggucuuauaaugcggaguuacugguagcccucgaaaaccaacauacuauagaucuuaccgacagcgagaugaauaagcuguuugaaaggacuaaaaagcaguugcgggagaacgcagaagauaugggaaauggcugcuucaagaucuaccacaaaugugacaacgcuugcauugggucaauccgaaauggaacauaugaucaugacguguaccgcgacgaggcccuaaacaauagauuucagauuaagggugucgagcugaaaaguggcuacaaggauuggauccucuggauauccuucgcuaucagcugcuuucugcuuuguguggcccuguugggguucauuaugugggcaugccagaaaggaaacaucagguguaauauuugcaucuga

SEQ ID NO: 134807 - RNA, 1701 nt, Artificial Sequence; identical to SEQ ID NO: 128678
  derived and/or modified CDS sequence (opt3) from hemagglutinin__InfluenzaA__AEG65208

SEQ ID NO: 134808 - RNA, 1701 nt, Artificial Sequence
  derived and/or modified CDS sequence (opt3) from hemagglutinin__InfluenzaA__AEG65219
augaagaccaucauugcccugagcuacauacucugccuuguguucgcucagaaacugcccggcaacgacaauuccacagcaacuuuguguuuagggcaccaugccgucccuaacggaacgaucguuaagaccauuacaaaugaucaaaucgaggugacuaacgcgaccgaacugguacagucuucaaguacagguggcauuugcgacagcccacaccagauccuagauggggagaauuguacccucauagacgcucugcuuggagauccgcagugcgacggcuuucaaaacaaaaagugggaucuguucguggaaagauccaaagccuauucuaauuguuaccccuaugacgucccugauuacgcaucguugaggucacucguggccagcagugguacucuggaguuuaacaaugaauccuucaacuggacagggguuacccagaauggaacgucuagcgcuugcaagcggcgcuccaacaagucauuuuucagucgacugaauuggcucacucauuuaaaauuuaaguauccagcacugaacgugaccaugcccaauaacgagaaauucgacaaacuuuacaucuggggcguccaccauccuggcacagauaacgaccagauuagcuuguaugcccaggcuucugggcguaucacuguguccaccaagagaucacaacagacaguaauuccaaauaucggaagcaggccccggguucgcgaugugccuaguagaauaucuauuuacuggaccaucgucaagccaggugacauucugcuaaucaacuccacgggcaaucucaucgccccgaggggguacuuuaagauucggagcggaaaaucgucuauaaugcgcuccgacgcgcccaucggcaaguguaacucagagugcauuacuccuaaugguaguaucccaaacgauaaacccuuccagaaugugaaccgaauaacauauggggcauguccuagauacgugaagcagaauacccugaaacuugccacuggaaugaggaacgucccagaaaagcaaacacggggcauuuuuggcgcuaucgccggguucaucgagaauggaugggaagguaugguugacggcugguauggguuucgucaccagaacagcgagggaaccggccaggcagcugaucugaaauccacgcaagccgcgauuaaucagaucaacgguaaguugaaucgccucauugggaagaccaacgagaaauuccaccagauagaaaaggaguucucugaaguggagggcagaauccaggaccuggaaaaauacguagaggauacaaagauugacuuauggagcuauaacgccgagcugcucguggcacuugaaaaucaacauacuaucgaucugaccgacucagagaugaacaaauuguuugaaaggacaaagaagcagcuacgggagaaugcugaagauaugggaaacggcugcuucaaaaucuaccacaagugugacaaugccugcauugggaguauacgaaacggaacuuaugaucaugacgucuaccgcgacgaggcucugaauaacagauuucagaucaaagguguggagcucaaguccggcuacaaagauuggauucuguggaucagcuucgccauuucuugcuuucuucuguguguugcauugcucggguucaucaugugggccugccagaagggaaauauaaaguguaacaucugcauuuga

SEQ ID NO: 134809 - RNA, 1701 nt, Artificial Sequence; identical to SEQ ID NO: 129843
  derived and/or modified CDS sequence (opt3) from hemagglutinin__InfluenzaA__AEG65230

SEQ ID NO: 134810 - RNA, 1701 nt, Artificial Sequence; identical to SEQ ID NO: 129843
  derived and/or modified CDS sequence (opt3) from hemagglutinin__InfluenzaA__AEG65252

SEQ ID NO: 134811 - RNA, 1701 nt, Artificial Sequence; identical to SEQ ID NO: 128564
  derived and/or modified CDS sequence (opt3) from hemagglutinin__InfluenzaA__AEG65263

SEQ ID NO: 134812 - RNA, 1701 nt, Artificial Sequence; identical to SEQ ID NO: 128564
  derived and/or modified CDS sequence (opt3) from hemagglutinin__InfluenzaA__AEG65274

SEQ ID NO: 134813 - RNA, 1701 nt, Artificial Sequence; identical to SEQ ID NO: 128564
  derived and/or modified CDS sequence (opt3) from hemagglutinin__InfluenzaA__AEG65285

SEQ ID NO: 134814 - RNA, 1701 nt, Artificial Sequence
  derived and/or modified CDS sequence (opt3) from hemagglutinin__InfluenzaA__AEG65296
augaagaccgugaucgcccugagcuacauucucugccuugucuucgcucagaaacugcccggcaacgacaauuccacagcaacuuuguguuuagggcaccaugccguuccuaacggaacgauagugaagaccaucacaaaugaucaaauugagguaacuaacgcgaccgaacuggugcagucuucaaguacagguggcaucugcgacagcccacaccagauucuagauggggagaauuguacccucaucgacgcucugcuuggagauccgcagugcgacggcuuucaaaacaaaaagugggaucuguucgucgaaagauccaaagccuauucuaauuguuaccccuaugacgugccugaucaugcaucguugaggucacucguugccagcagugguacucuggaguuuaacaaugaauccuucgacuggacaggggugacccagaacggaacgucuagcgcuugcaagcggcgcuccaauaagucauuuuucagucgacugaacuggcucacucacuuaaaauacaaguauccagcacugaaugucaccaugcccaacaaugagaaauuugauaaacuuuacauauggggcgugcaucacccuggcacagacagcgaucagaucucuuuguaugcccaggcuuccgggcguauuacuguaucaaccaagagaagccaacagacaguuaucccaaacauuggaaguaggccccgggugcgcgacgucucuuccagaaucagcauauacuggaccauugugaagccuggugacauccugcuaauuaacucgacgggcaaucucaucgccccaaggggguacuucaagauccggucuggaaaauccucaauuaugcgcagugaugcgccgauaggcaaguguaacagcgagugcaucacucccaaugguuccauuccuaacgacaaaccauuucagaaugugaaccgaaucacauauggggcaugucccagauacgucaagcagaauacccugaaacuugccacuggaaugaggaacguuccugaaaagcaaacacggggcauauucggcgcuauugccggguuuaucgagaauggaugggaagguaugguggauggcugguauggguuccgucaccagaacucugagggaaccggccaggcagcugaccugaaaagcacgcaagccgcgaucaaucagauuaacgguaaguugaaucgccucaucgggaagaccaacgagaaauuucaucagauugaaaaggaguucucagaaguagagggcagaauacaggaucuggaaaaauacguggaggacacaaagaucgauuuauggaguuauaaugccgagcugcucgucgcacuugaaaaccaacacacuauugaccugaccgauuccgagaugaacaaauuguucgaaaggacaaagaagcagcuacgggagaaugcugaagacaugggaaacggcugcuuuaaaaucuaccauaagugugauaaugccugcaucgggagcauucgaaacggaacuuaugaccacgacguguaccgcgaugaggcucugaauaacagauuccagauaaaagguguugagcucaagucuggcuacaaagacuggauccuguggauuucauuugccaucaguugcuuccuucuguguguggcauugcucggguuuauuaugugggccugccagaagggaaauaucagguguaacauaugcaucuga

SEQ ID NO: 134815 - RNA, 1701 nt, Artificial Sequence; identical to SEQ ID NO: 129843
  derived and/or modified CDS sequence (opt3) from hemagglutinin__InfluenzaA__AEG65307

SEQ ID NO: 134816 - RNA, 1701 nt, Artificial Sequence
  derived and/or modified CDS sequence (opt3) from hemagglutinin__InfluenzaA__AEG65318
augaagaccaucauugcccugagcuacauacucugccuuguguucgcucagaaacugcccggcaacgacaauuccacagcaacuuuguguuuagggcaccaugccgucccuaacggaacgaucguuaagaccauuacaaaugaucaaaucgaggugacuaacgcgaccgaacugguacagucuucaaguacagguggcauuugcgacagcccacaccagauccuagauggggagaauuguacccucauagacgcucugcuuggagauccgcagugcgacggcuuucaaaacaaaaagugggaucuguucguggaaagauccaaagccuauucuaauuguuaccccuaugacgucccugauuacgcaucguugaggucacucguggccagcagugguacucuggaguuuaacaaugaauccuucaacuggacagggguuacccagaauggaacgucuagcgcuugcaagcggcgcuccaacaagucauuuuucagucgacugaauuggcucacucauuuaaaauuuaaguauccagcacugaacgugaccaugcccaauaacgagaaauucgacaaacuuuacaucuggggcguccaccauccuggcacagauaacgaccagauuagcuuguaugcccaggcuucugggcguaucacuguguccaccaaaagaucacaacagacaguaauuccaaauaucggaagcaggccccggguucgcgaugugccuaguagaauaucuauuuacuggaccaucgucaagccaggugacauucugcuaaucaacuccacgggcaaucucaucgccccgaggggguacuuuaagauucggagcggaaaaucgucuauaaugcgcuccgacgcgcccaucggcaaguguaacucagagugcauuacuccuaaugguaguaucccaaacgauaaacccuuccagaaugugaaccgaauaacauauggggcauguccuagauacgugaggcagaauacccugaaacuugccacuggaaugcggaacgucccagaaaagcaaacacguggcauuuuuggcgcuaucgccggguucaucgagaauggaugggaagguaugguugacggcugguauggguuucgccaccagaacagcgagggaaccggccaggcagcugaucugaaguccacgcaagccgcgauuaaucagaucaacgguaaauugaauagacucauugggaagaccaacgagaaguuccaccagauagaaaaagaguucucugaaguggagggcaggauccaggaccuggaaaaguacguagaggauacaaaaauugacuuauggagcuauaacgccgagcugcucguggcacuugaaaaucaacauacuaucgaucugaccgacucagagaugaacaaguuguuugaacggacaaagaagcagcuacgagagaaugcugaagauaugggaaacggcugcuucaagaucuaccacaaaugugacaaugccugcauugggaguauacgcaacggaacuuaugaucaugacgucuacagagacgaggcucugaauaacagguuucagaucaaggguguggagcucaaauccggcuacaaggauuggauucuguggaucagcuucgccauuucuugcuuucuucuguguguugcauugcucggguucaucaugugggccugccagaaaggaaauauacgguguaacaucugcauuuga

SEQ ID NO: 134817 - RNA, 1701 nt, Artificial Sequence; identical to SEQ ID NO: 129843
  derived and/or modified CDS sequence (opt3) from hemagglutinin__InfluenzaA__AEG65329

SEQ ID NO: 134818 - RNA, 1701 nt, Artificial Sequence
  derived and/or modified CDS sequence (opt3) from hemagglutinin__InfluenzaA__AEG65340
augaagaccaucauugcccugagcuacauacucugccuuguguucgcucagaaacugcccggcaacgacaauuccacagcaacuuuguguuuagggcaccaugccgucccuaacggaacgaucguuaagaccauuacaaaugaucaaaucgaggugacuaacgcgaccgaacugguacagucuucaaguacagguggcauuugcgacagcccacaccagauccuagauggggagaauuguacccucauagacgcucugcuuggagauccgcagugcgacggcuuucaaaacaaaaagugggaucuguucguggaaagauccaaagccuauucuaauuguuaccccuaugacgucccugauuacgcaucguugaggucacucguggccagcagugguacucuggaguuuaacaaugaauccuucaacuggacagggguuacccagaauggaacgucuagcgcuugcgagcggcgcuccaacaagucauuuuucagucgacugaauuggcucacucauuuaaaguauaaauacccagcacugaacgugaccaugcccaauaacgagaaguuugacaaacuuuauaucuggggcguccaccauccuggcacagauagcgaccagauuucuuuguacgcccaggcuuccgggcguaucacugugucaaccaagagaagccaacagacaguaauuccaaacaucggaaguaggccccggguucgcgaugugucuuccagaauaagcauuuacuggaccaucgucaaaccuggugacauucugcuaaucaauucgacgggcaaccucaucgccccaaggggguauuucaagauucggucuggaaaguccucaauaaugcgcagugacgcgccgaucggcaaauguaauagcgaaugcauuacucccaacgguuccaucccuaaugauaagccauuucagaacgugaaucgaauaacauacggggcaugucccagauaugugaaacagaacacccugaaacuugccacuggaaugaggaaugucccugagaaacaaacacggggcauuuucggcgcuaucgccggguuuaucgaaaacggaugggaggguaugguugacggcugguacggguuccgucaccagaauagcgagggaaccggccaggcagcugaucugaagucuacgcaagccgcgauuaaccagaucaaugguaaauugaaccgccucauugggaagaccaaugaaaaguuucaccagauagagaaagaguucucagaaguggaaggcagaauccaggaccuggagaaguauguagaggauacaaaaauugacuuauggaguuacaacgccgaacugcucguggcacuugagaaccaacauacuaucgaucugaccgacuccgaaaugaauaaguuguucgagaggacaaagaagcagcuacgggaaaacgcugaggauaugggaaauggcugcuuuaagaucuaucacaaaugugacaacgccugcauugagagcauacgaaaugggacuuacgaucaugacgucuaccgcgacgaagcucugaacaauagauuccagaucaagggaguggagcucaaaucugguuauaaggauuggauucuguggaucucauuugccauuaguugcuuccuucuguguguugcauugcucggcuuuaucaugugggccugccagaaagggaacauaagguguaauaucugcauuuga

SEQ ID NO: 134819 - RNA, 1701 nt, Artificial Sequence; identical to SEQ ID NO: 129843
  derived and/or modified CDS sequence (opt3) from hemagglutinin__InfluenzaA__AEG65351

SEQ ID NO: 134820 - RNA, 1701 nt, Artificial Sequence; identical to SEQ ID NO: 129843
  derived and/or modified CDS sequence (opt3) from hemagglutinin__InfluenzaA__AEG65362

SEQ ID NO: 134821 - RNA, 1701 nt, Artificial Sequence; identical to SEQ ID NO: 134818
  derived and/or modified CDS sequence (opt3) from hemagglutinin__InfluenzaA__AEG65373

SEQ ID NO: 134822 - RNA, 1701 nt, Artificial Sequence; identical to SEQ ID NO: 128564
  derived and/or modified CDS sequence (opt3) from hemagglutinin__InfluenzaA__AEG65384

SEQ ID NO: 134823 - RNA, 1701 nt, Artificial Sequence; identical to SEQ ID NO: 128564
  derived and/or modified CDS sequence (opt3) from hemagglutinin__InfluenzaA__AEG65406

SEQ ID NO: 134824 - RNA, 1701 nt, Artificial Sequence; identical to SEQ ID NO: 128564
  derived and/or modified CDS sequence (opt3) from hemagglutinin__InfluenzaA__AEG65417

SEQ ID NO: 134825 - RNA, 1701 nt, Artificial Sequence; identical to SEQ ID NO: 128564
  derived and/or modified CDS sequence (opt3) from hemagglutinin__InfluenzaA__AEG65428

SEQ ID NO: 134826 - RNA, 1701 nt, Artificial Sequence
  derived and/or modified CDS sequence (opt3) from hemagglutinin__InfluenzaA__AEG65439
augaagaccaucauugcccugagcuacauacucugccuuguguucgcucagaaacugcccggcaacgacaauuccacagcaacuuuguguuuagggcaccaugccgucccuaacggaacgaucguuaagaccauuacaaaugaucaaaucgaggugacuaacgcgaccgaacugguacagucuucaaguacagguggcauuugcgacagcccacaccagauccuagauggggagaauuguacccucauagacgcucugcuuggagauccgcagugcgacggcuuucaaaacaaaaagugggaucuguucguggaaagauccaaagccuauucuaauuguuaccccuaugacgucccugauuacgcaucguugaggucacucguggccagcagugguacucuggaguuuaacaaugaauccuucaacuggacagggguuacccagaauggaacgucuagcgcuugcaagcggcgcuccaacaauucauuuuucagucgacugaacuggcucacucauuuaaaguuuaaauauccagcacugaaugugaccaugcccaacaacgagaaguucgacaaacuuuacaucuggggcguccaccauccuggcacagauaaugaccagaucuuuuuguaugcccaggcuagcgggcguauuacugugucuaccaagagaucccaacagacaguaauuccaaacaucggaucaaggccccggguucgcaauauaccuagcagaauuaguaucuacuggaccauugugaaaccaggugauauccugcuaaucaacucuacgggcaaucucauugccccgaggggguacuucaagauacgguccggaaagagcucgaucaugcgcucugacgcgcccauuggcaaauguaacuccgagugcaucacuccuaaugguucaauaccaaacgacaagcccuuucagaaugucaaccgaauuacauauggggcauguccuagauacgugaaacagaauacccugaagcuggccacuggaaugaggaacgugccagaaaaacaaacacggggcaucuucggcgcuaucgccggguuuauugagaauggaugggaagguauggucgauggcugguauggguuccgucaccagaacagugagggaguuggccaggcagcugaccuuaagagcacccaagccgcgaucaaucagauuaacgguaaauugaaccgccucauagggaagacgaaugagaaguuccaccagaucgaaaaagaguuuuccgaaguggagggcaggauucaggaucuggaaaaguacguagaggacaccaaaaucgauuuauggucuuauaacgccgagcugcucguggcacuugaaaaucaacauacaaucgaccugacugauagcgagaugaacaaguuguucgaaagaaccaaaaagcagcuacgggagaaugcugaagacaugggaaacggcugcuuuaagauuuaccacaaaugugauaaugccugcauagggucaauccgaaacggaacauaugaccaugaugucuaccgcgacgaggcucugaauaacagauuccagauuaaggguguggagcucaaaaguggcuacaaggacuggauccuguggauuuccuuugccaucagcugcuuccuucuguguguugcauugcucggguuuauaaugugggccugccagaaaggaaauaucagguguaacauuugcaucuga

SEQ ID NO: 134827 - RNA, 1701 nt, Artificial Sequence
  derived and/or modified CDS sequence (opt3) from hemagglutinin__InfluenzaA__AEG65450
augaagaccaucauugccuggagcuacauacugugccucguguucgcucagaaacuucccggcaacgacaauuccacagcaacucuguguuuggggcaccaugccgucccuaacggaacgaucguuaagaccauuacaaaugaucaaaucgaggugacuaacgcgaccgaauuaguacagucuucaaguacagguggcauuugcgacagcccacaccagauccuggauggggagaauuguacccuaauagacgcucuccugggagauccgcagugcgacggcuuucaaaacaaaaagugggaucuuuucguggaaagauccaaagccuauucuaauuguuaccccuaugacgucccugauuacgcaucgcugaggucauugaucgccagcagugguacucucgaguuuaacaaugaauccuucaacuggacaggggugacccagaauggaacgucuagcgcuugcaagcggcgcuccaacucaaguuucuucagccgacugaauuggcugacucaucucaaguuuaaauauccagcauuaaacguuaccaugcccaauaacgaggaguucgacaagcuguacauuuggggcgugcaccauccuggcacauauaacgaucagaucucucuuuacgcccaggcuuccgggcguauuacugucucaaccaaaagaagccaacagacagugaucccaaauauaggaaguaggccccggguacgcgacauuccuucuagaaucuccauuuacuggaccaucguuaagccaggugauaucuugcugauuaacagcacgggcaaucuaauagccccgaggggguauuuuaaaauccggucgggaaagucuuccauuaugcgcucagacgcgcccaucggcaaguguaacagugaaugcauaacuccuaaugguagcauuccaaacgacaaacccuuccagaaugugaaccgaaucacauacggggcauguccuagauaugucaagcagaauacccucaaacuggccacuggaaugaggaacgugccagagaagcaaacacggggcaucuuuggcgcuauugccggguucaucgaaaauggaugggaggguaugguggauggcugguacggguuucgucaccagaacuccgagggaauuggccaggcagcugaccuuaaaucuacccaagccgcgauagaucagaucaaugguaagcugaaccgcuugauugggaaaacgaaugaaaaguuccaccagaucgagaaggaauuuagcgaggucgaaggcagaauccaggaccucgagaaauauguugaggauaccaagauugaccuguggucauacaacgccgaauuacugguggcacucgagaaccaacauacaauagaucuuacugacagugaaaugaauaaacuguuugagaggaccaagaaacaguugcgggaaaacgcugaggauaugggaaauggcugcuucaagaucuaucacaagugugacaacgccugcauuggguccauccgaaauggaacauacgaucaugacguauaccgcgacgaggcucuaaacaauagauuucagauuaaagguguggaacucaagagcggcuauaaagauuggauccuguggauaucuuucgccaucucaugcuuucugcuuugugucgcacuguugggguucauuaugugggccugccagaagggaaacaucagguguaauauuugcaucuga

SEQ ID NO: 134828 - RNA, 1701 nt, Artificial Sequence; identical to SEQ ID NO: 134827
  derived and/or modified CDS sequence (opt3) from hemagglutinin__InfluenzaA__AEG65461

SEQ ID NO: 134829 - RNA, 1701 nt, Artificial Sequence
  derived and/or modified CDS sequence (opt3) from hemagglutinin__InfluenzaA__AEG65472
augaagaccaucauugccuggagcuacauacugugccucguguucgcucagaaacuucccggcaacgacaauuccacagcaacucuguguuuggggcaccaugccgucccuaacggaacgaucguuaagaccauuacaaaugaucaaaucgaggugacuaacgcgaccgaauuaguacagucuucaaguacagguggcauuugcgacagcccacaccagauccuggauggggagaauuguacccuaauagacgcucuccugggagauccgcagugcgacggcuuucaaaacaaaaagugggaucuuuucguggaaagauccaaagccuauucuaauuguuaccccuaugacgucccugauuacgcaucgcugaggucauugaucgccagcagugguacucucgaguuuaacaaugaauccuucaacuggacaggggugacccagaauggaacgucuagcgcuugcaagcggcgcuccaacucaaguuucuucagccgacugaauuggcugacucaucucaaguuuaaauauccagcauuaaacguuaccaugcccaauaacgaggaguucgacaagcuguacauuuggggcgugcaccauccuggcacauauaacgaucagaucucucuuuacgcccaggcuuccgggcguauuacugucucaaccaaaagaagccaacagacagugaucccaaauauaggaaguaggccccggguacgcgacauuccuucuagaaucuccauuuacuggaccaucguuaagccaggugauaucuugcugauuaacagcacgggcaaucuaauagccccgaggggguauuuuaaaauccggucgggaaagucuuccauuaugcgcucagacgcgcccaucggcaaguguaacagugaaugcauaacuccuaaugguagcauuccaaacgacaaacccuuccagaaugugaaccgaaucacauacggggcauguccuagauaugucaagcagaauacccucaaacuggccacuggaaugaggaacgugccagagaagcaaacacggggcaucuuuggcgcuauugccggguucaucgaaaauggaugggaggguaugguggauggcugguacggguuucgucaccagaacuccgagggaauuggccaggcagcugaccuuaaaucuacccaagccgcgauagaucagaucaaugguaagcugaaccgcuugauugggaaaacgaaugaaaaguuccaccagaucgagaaggaauuuagcgaggucgaaggcagaauccaggaccucgagaaauauguugaggauaccaagauugaccuguggucauacaacgccgaauuacugguggcacucgagaaccaacauacaauagaucuuacugacagugaaaugaauaaacuguuugagaucaccaagaaacaguugagggaaaacgcugaggauaugggaaauggcugcuucaagauuuaucacaagugugacaacgccugcaucggguccauucggaauggaacauacgaucaugacguauaccgagacgaggcucuaaacaaucgcuuucagaucaaagguguggaacucaagagcggcuauaaagauuggauacuguggaucucuuucgccauuucaugcuuucugcuuugugucgcacuguugggguucaucaugugggccugccagaagggaaacauuagauguaauaucugcauauga

SEQ ID NO: 134830 - RNA, 1701 nt, Artificial Sequence; identical to SEQ ID NO: 134827
  derived and/or modified CDS sequence (opt3) from hemagglutinin__InfluenzaA__AEG65483

SEQ ID NO: 134831 - RNA, 1701 nt, Artificial Sequence; identical to SEQ ID NO: 134827
  derived and/or modified CDS sequence (opt3) from hemagglutinin__InfluenzaA__AEG65494

SEQ ID NO: 134832 - RNA, 1701 nt, Artificial Sequence; identical to SEQ ID NO: 134827
  derived and/or modified CDS sequence (opt3) from hemagglutinin__InfluenzaA__AEG65505

SEQ ID NO: 134833 - RNA, 1701 nt, Artificial Sequence; identical to SEQ ID NO: 134827
  derived and/or modified CDS sequence (opt3) from hemagglutinin__InfluenzaA__AEG65516

SEQ ID NO: 134834 - RNA, 1701 nt, Artificial Sequence; identical to SEQ ID NO: 134827
  derived and/or modified CDS sequence (opt3) from hemagglutinin__InfluenzaA__AEG65527

SEQ ID NO: 134835 - RNA, 1701 nt, Artificial Sequence; identical to SEQ ID NO: 134827
  derived and/or modified CDS sequence (opt3) from hemagglutinin__InfluenzaA__AEG65538

SEQ ID NO: 134836 - RNA, 1701 nt, Artificial Sequence
  derived and/or modified CDS sequence (opt3) from hemagglutinin__InfluenzaA__AEG65560
augaagaccaucauugcccugagcuacauacucugccuuguguucgcucagaaacugcccggcaacgacaauuccacagcaacuuuguguuuagggcaccaugccgucccuaacggaacgaucguuaagaccauuacaaaugaucaaaucgaggugacuaacgcgaccgaacugguacagucuucaaguacagguggcauuugcgacagcccacaccagauccuagauggggagaauuguacccucauagacgcucugcuuggagauccgcagugcgacggcuuucaaaacaaaaagugggaucuguucguggaaagauccaaagccuauucuaauuguuaccccuaugacgucccugauuacgcaucguugaggucacucaucgccagcagugguacucuggaguuuaacaaugaauccuucaacuggacaggggugacccagaauggaacgucuagcgcuugcaagcggcgcuccaacucaaguuucuucagccgacugaauuggcucacucauuuaaaguuuaaauauccagcacugaacguuaccaugcccaauaacgaggaguucgacaaacuuuacauuuggggcgugcaccauccuggcacauauaacgaucagaucucuuuguacgcccaggcuuccgggcguauuacugucucaaccaagagaagccaacagacagugaucccaaauauaggaaguaggccccggguacgcgacauuccuucuagaaucuccauuuacuggaccaucguuaagccaggugauauccugcuaauuaacagcacgggcaaucucauagccccgaggggguauuuuaaaauccggucgggaaagucuuccauuaugaagucagacgcgcccaucggcaaauguaacagugaaugcauaacuccuaaugguagcauuccaaacgacaagcccuuccagaaugugaaccgcaucacauacggggcauguccucgauaugucaaacagaauacccugaaacuugccacuggaaugagaaacgugccagagaagcaaacaaggggcaucuuuggcgcuauugccggguucaucgaaaauggaugggaggguaugguggauggcugguacggguuucggcaccagaacuccgagggaauuggccaggcagcugaccugaagucuacccaagccgcgauagaucagaucaaugguaaauugaaccgucucauugggaagacgaaugaaaaguuccaccagaucgagaaagaauuuagcgaggucgaaggccgcauccaggaccuggagaaguauguugaggauaccaaaauugacuuauggucauacaacgccgaacugcucguggcacuugagaaccaacauacaauagaucugacugacagugaaaugaauaaguuguuugagagaaccaaaaagcagcuaagggaaaacgcugaggauaugggaaauggcugcuucaagaucuaucacaaaugugacaacgccugcauuggguccauccggaauggaacauacgaucaugacguauaccgagacgaggcucugaacaaucgcuuucagauuaaggguguggaacucaaaagcggcuauaaggauuggauccuguggauaucuuucgccaucucaugcuuucuucugugugucgcauugcucggguucauuaugugggccugccagaaaggaaacaucagauguaauauuugcaucuga

SEQ ID NO: 134837 - RNA, 1701 nt, Artificial Sequence; identical to SEQ ID NO: 134836
  derived and/or modified CDS sequence (opt3) from hemagglutinin__InfluenzaA__AEG65571

SEQ ID NO: 134838 - RNA, 1701 nt, Artificial Sequence; identical to SEQ ID NO: 134836
  derived and/or modified CDS sequence (opt3) from hemagglutinin__InfluenzaA__AEG65582

SEQ ID NO: 134839 - RNA, 1701 nt, Artificial Sequence; identical to SEQ ID NO: 134836
  derived and/or modified CDS sequence (opt3) from hemagglutinin__InfluenzaA__AEG65593

SEQ ID NO: 134840 - RNA, 1701 nt, Artificial Sequence
  derived and/or modified CDS sequence (opt3) from hemagglutinin__InfluenzaA__AEG65604
augaagaccaucauugcccugagcuacauacucugccuuguguucgcucagaaacugcccggcaacgacaauuccacagcaacuuuguguuuagggcaccaugccgucccuaacggaacgaucguuaagaccauuacaaaugaucaaaucgaggugacuaacgcgaccgaacugguacagucuucaaguacagguggcauuugcgacagcccacaccagauccuagauggggagaauuguacccucauagacgcucugcuuggagauccgcagugcgacggcuuucaaaacaaaaagugggaucuguucguggaaagauccaaagccuauucuaauuguuaccccuaugacgucccugauuacgcaucguugaggucacucaucgccagcagugguacucuggaguuuaacaaugaauccuucaacuggacaggggugacccagaauggaacgucuagcgcuugcaagcggcgcuccaacaauucauuuuucagucgacugaacuggcucacucauuuaaaguuuaaauauccagcacugaauguuaccaugcccaacaacgaggaguucgacaaacuuuacauuuggggcgugcaccauccuggcacagauaaugaccagaucagcuuguaugcccaggcuucugggaagauuacugucuccaccaagcguucacaacagacagugaucccaaacauaggaagcagacccaggguacgggauauuccuagucgcaucucuauuuacuggaccaucguuaaaccaggugacauccugcuaauuaauuccacgggcaaccucauagccccgagaggguacuuuaagaucaggagcggaaagucgucuauuaugcgguccgacgcgcccaucggcaaauguaauucagaaugcauaacuccuaacgguaguauuccaaaugauaagcccuuccagaacgugaaucgcaucacauauggggcauguccucgauacgucaaacagaacacccugaaacuugccacuggaaugagaaaugugccagagaagcaaacaaggggcaucuuuggcgcuauugccggguucaucgaaaacggaugggaggguaugguggacggcugguauggguuucggcaccagaauagcgagggaauuggccaggcagcugaucugaaguccacccaagccgcgauagaccagaucaacgguaaauugaaucgucucauugggaagacgaacgaaaaguuccaccagaucgagaaagaguucucugaagucgaaggccgcauccaggaucuggagaaguacguugaggacaccaaaauugauuuauggagcuauaacgccgaacugcucguggcacuugagaaucaacauacaauagaccugacugauucagaaaugaacaaguuguuugagagaaccaaaaagcagcuaagggaaaaugcugaggacaugggaaacggcugcuucaagaucuaccacaaaugugauaaugccugcauugggaguauccggaacggaacauaugaccaugacguauaccgagaugaggcucugaauaaccgcuuucagauuaaggguguggaacucaaauccggcuacaaggacuggauccuguggaucagcuucgccauaucuugcuuucuucugugugucgcauugcucggguucauuaugugggccugccagaaaggaaauaucagauguaacauuugcaucuga

SEQ ID NO: 134841 - RNA, 1701 nt, Artificial Sequence
  derived and/or modified CDS sequence (opt3) from hemagglutinin__InfluenzaA__AEG65626
augaagaccaucauugcccugagcuacauacucugccuuguguucgcucagaaacugcccggcaacgacaauuccacagcaacuuuguguuuagggcaccaugccgucccuaacggaacgaucguuaagaccauuacaaaugaucaaaucgaggugacuaacgcgaccgaacugguacagucuucaaguacagguggcauuugcgacagcccacaccagauccuagauggggagaauuguacccucauagacgcucugcuuggagauccgcagugcgacggcuuucaaaacaaaaagugggaucuguucguggaaagauccaaagccuauucuaauuguuaccccuaugacgucccugauuacgcaucguugaggucacucguggccagcagugguacucuggaguuuaacaaugaauccuucaacuggacagggguuacccagaauggaacgucuagcgcuugcaagcggaaguccaacaauucauuuuucagucgccugaacuggcucacucauuuaaaauuuaaguauccagcacugaaugugaccaugcccaacaacaaaaaguucgacaaacuuuacaucuggggcguccaccauccuggcacagauaaugaccagauuagcuuguaugcccaggcuucugggcgaaucacuguguccaccaagcguucacaacagacaguaauuccaaacaucggaagcagacccaggguucgggauauaccuagucgcauuucuaucuacuggaccauugugaagccaggugacaugcugcuaaucaauuccacgggcaaccucaucgccccgagaggguacuuuaaaauuaggagcggaaagucgucuauaaugcgguccgacgcgcccaucggcaaauguaauucagagugcauuacuccuaacgguaguaucccaaaugauaagcccuuccagaacgucaaucgcauaacauauggggcauguccucgauacgugaaacagaacacccugaaacuugccacuggaaugagaaaugugccagagaagcaaacaaggggcauuuuuggcgcuaucgccggguucaucgaaaacggaugggaggguauggucgacggcugguauggguuucggcaccagaauagcgaaggaaccggccaggcagcugaucugaaguccacgcaagccgcgauuaaccagaucaaugguaaguugaaccgucucauugggaaaaccaacgagaaguuccaccagauagagaaagaguucucugaaguugaaggccgcauccaggaccuggagaaguacguggaagauacaaaaauugacuuauggagcuauaaugccgagcugcucguagcacuugagaaccaacauacuaucgaucugaccgacucagaaaugaauaaguuguuugagagaacaaagaaacagcuaagggaaaacgcugaggauaugggaaauggcugcuucaagaucuaccacaaaugugacaacgccugcauugggaguauacggaauggaacuuaugaucaugacguguaccgagacgaagcucugaacaaucgcuuucagaucaagggugucgagcucaaauccggcuacaaggauuggauucuguggaucagcuucgccauuucuugcuuucuucuguguguggcauugcucggguucaucaugugggccugccagaagggaaacauaagauguaauaucugcauuuga

SEQ ID NO: 134842 - RNA, 1701 nt, Artificial Sequence
  derived and/or modified CDS sequence (opt3) from hemagglutinin__InfluenzaA__AEG65637
augaagaccaucauugcccugagcuacauacucugccuuguguucgcucagaaacugcccggcaacgacaauuccacagcaacuuuguguuuagggcaccaugccgucccuaacggaacgaucguuaagaccauuacaaaugaucaaaucgaggugacuaacgcgaccgaacugguacagucuucaaguacagguggcauuugcgacagcccacaccagauccuagauggggagaauuguacccucauagacgcucugcuuggagauccgcagugcgacggcuuucaaaacaaaaagugggaucuguucguggaaagauccaaagccuauucuaauuguuaccccuaugacgucccugauuacgcaucguugaggucacucguggccagcagugguacucuggaguuuaacaaugaauccuucaacuggacagggguuacccagaauggaacgucuagcgcuugcaagcggaaguccaacaauucauuuuucagucgccugaacuggcucacucauuuaaaauuuaaguauccagcacugaaugugaccaugcccaacaacaaaaaguucgacaaacuuuacaucuggggcguccaccauccuggcacagauaaugaccagauuagcuuguaugcccaggcuucugggcgaaucacuguguccaccaagcguucacaacagacaguaauuccaaacaucggaagcagacccaggguucgggauauaccuagucgcauuucuaucuacuggaccauugugaagccaggugacaugcugcuaaucaauuccacgggcaaccucaucgccccgagaggguacuuuaaaauuaggagcggacggucgucuauaaugcgcuccgacgcgcccaucggcaaguguaauucagagugcauuacuccuaacgguaguaucccaaaugauaaacccuuccagaacgucaaucgaauaacauauggggcauguccuagauacgugaagcagaacacccugaaacuugccacuggaaugaggaaugugccagagaagcaaacacggggcauuuuuggcgcuaucgccggguucaucgaaaacggaugggaggguauggucgacggcugguauggguuucgucaccagaauagcgaaggaaccggccaggcagcugaucugaaauccacgcaagccgcgauuaaccagaucaaugguaaguugaaccgccucauugggaagaccaacgagaaauuccaccagauagagaaggaguucucugaaguugaaggcagaauccaggaccuggagaaauacguggaagauacaaagauugacuuauggagcuauaaugccgagcugcucguagcacuugagaaccaacauacuaucgaucugaccgacucagaaaugaauaaauuguuugagaggacaaagaagcagcuacgggaaaacgcugaggauaugggaaauggcugcuucaaaaucuaccacaagugugacaacgccugcauugggaguauacgaaauggaacuuaugaucaugacguguaccgcgacgaagcucugaacaauagauuucagaucaaaggugucgagcucaaguccggcuacaaagauuggauucuguggaucagcuucgccauuucuugcuuucuucuguguguggcauugcucggguucaucaugugggccugccagaagggaaacauaagguguaauaucugcauuuga

SEQ ID NO: 134843 - RNA, 1701 nt, Artificial Sequence; identical to SEQ ID NO: 128079
  derived and/or modified CDS sequence (opt3) from hemagglutinin__InfluenzaA__AEG65648

SEQ ID NO: 134844 - RNA, 1701 nt, Artificial Sequence; identical to SEQ ID NO: 129843
  derived and/or modified CDS sequence (opt3) from hemagglutinin__InfluenzaA__AEG65659

SEQ ID NO: 134845 - RNA, 1701 nt, Artificial Sequence; identical to SEQ ID NO: 129843
  derived and/or modified CDS sequence (opt3) from hemagglutinin__InfluenzaA__AEG65670

SEQ ID NO: 134846 - RNA, 1701 nt, Artificial Sequence; identical to SEQ ID NO: 129843
  derived and/or modified CDS sequence (opt3) from hemagglutinin__InfluenzaA__AEG65681

SEQ ID NO: 134847 - RNA, 1701 nt, Artificial Sequence; identical to SEQ ID NO: 134818
  derived and/or modified CDS sequence (opt3) from hemagglutinin__InfluenzaA__AEG65692

SEQ ID NO: 134848 - RNA, 1701 nt, Artificial Sequence; identical to SEQ ID NO: 128678
  derived and/or modified CDS sequence (opt3) from hemagglutinin__InfluenzaA__AEG65703

SEQ ID NO: 134849 - RNA, 1701 nt, Artificial Sequence
  derived and/or modified CDS sequence (opt3) from hemagglutinin__InfluenzaA__AEG65747
augaagaccaucauugcccugagcuacauacucugccuuguguucgcucagaaacugcccggcaacgacaauuccacagcaacuuuguguuuagggcaccauacggucccuaacggaaccaucguuaagacaauuacuaaugaucaaaucgaggugaccaacgccacagaacugguacagucuucaaguaccggugagauuugcgacagcccacaccagauccuagauggcgaaaauuguacucucauagacgcgcugcuuggggauccgcagugcgacggauuucaaaacaaaaagugggaucuguucguggagagauccaaggcuuauucuaauuguuaccccuaugacgucccugauuacgccucguugaggucacucguggcaagcaguggcacacuggaauuuaacaaugaguccuucaacuggaccgguguuacgcagaaugggacuucuagcgccugcaagcggcgcuccaacaauucauuuuucagucgacugaacuggcucacccauuuaaaguuuaaauauccagcucugaaugugacaaugcccaacaacgagaaguucgacaaacuuuacaucuggggaguccaccauccuggcacugauaaugaccagaucuuuuuguaugcacaggccagcggccguauuaccgugucuacaaagagaucccaacagaccguaauuccaaacaucgggucaaggccccggguucgcaauauaccuagcagaauuaguaucuacuggacgauugugaaaccaggagauauccugcuaaucaacucuacugguaaucucauugcuccgaggggcuacuucaagauacgguccgggaaaagcucgaucaugcgcucugacgcccccauuggaaaauguaacuccgaaugcaucacaccuaauggcucaauaccaaacgacaagcccuuucagaaugucaaccgaauuaccuauggugcguguccuagauacgugaaacagaauacucugaagcuggcaacagggaugaggaacgugccagagaaacaaacccggggaaucuucggcgccaucgcuggcuuuauugaaaaugggugggagggaauggucgaugguugguauggcuuccgucaccagaacagugaggggacgggacaggccgcagaccuuaagagcacccaagcugccaucaaucagauuaacggcaaauugaaccgccucauagguaagacaaaugaaaaguuccaccagaucgagaaagaauuuuccgagguugaagggaggauucaggaucuggagaaguacguggaggacacuaaaaucgauuuauggucuuauaacgcggaacugcucguagcccuugagaaucaacauaccaucgaccugacagauagcgaaaugaacaaguuguucgagagaacuaaaaagcagcuacgggaaaaugcagaggacaugggcaacggaugcuuuaagauuuaccacaaaugugauaaugcuugcauaggcucaauccgaaacgggaccuaugaccaugauguguaccgcgacgaggcccugaauaacagauuccagauuaagggagucgaacucaaaagugguuacaaggacuggauccuguggauuuccuuugcuaucagcugcuuccuucuguguguggccuugcucggcuuuauaaugugggcaugccagaaagggaauaucagguguaacauuugcaucuga

SEQ ID NO: 134850 - RNA, 1701 nt, Artificial Sequence
  derived and/or modified CDS sequence (opt3) from hemagglutinin__InfluenzaA__AEG65758
augaagaccaucauugcccugagcuacauacucugccuuguguccgcucagaaacugcccggcaacgacaauucuacagcaacuuuguguuuagggcaccaugccgucccuaacggaacgaucguuaagaccauuacaaaugaucaaaucgaggugacuaacgcgaccgaacugguacagucaaguagcacagguggcauuugcgacuccccacaccagauccuagauggggagaauuguacccucauagacgcucugcuuggagauccgcagugcgacggcuuccaaaacaaaaagugggaucuguuuguggaaagaucuaaagccuauucgaauuguuaccccuaugacgucccugauuacgcaucauugaggagccucguggccaguuccgguacucuggaguucaacaaugaaucuuuuaacuggacagggguuacccagaauggaacgagcuccgcuugcaagcggcgcucaaacaauaguuucuuuagccgacugaacuggcucacucauuuaaaguucaaauauccagcacugaaugugaccaugcccaacaacgagaaguuugacaaacuuuacaucuggggcguccaccauccuggcacagauaaugaccagauuuucuuguaugcccaggcuucugggcguaucacuguguccaccaagagaucacaacagacaguaauuccaaacaucggaagcaggccccggguucgcaauauaccuaguagaauuucuaucuacuggaccauugugaaaccaggugauauccugcuaaucaacuccacgggcaaucucauugccccgaggggguacuuuaagauacggagcggaaagucgucuaucaugcgcuccgacgcgcccauuggcaaauguaacucagagugcaucacuccuaaugguaguauaccaaacgacaagcccuuccagaaugucaaccgaauuacauauggggcauguccuagauacgugaaacagaauacccugaaacuugccacuggaaugaggaacgugccagaaaagcaaacacggggcaucuuuggcgcuaucgccggguucauugagaauggaugggaagguauggucgauggcugguauggguuucgucaccagaacagcgagggaaucggccaggcagcugaccugaaguccacccaagccgcgauuaaucagauaaacgguaaauugaaccgccucaucgggaagacgaaugagaaguuccaccagauugaaaaagaguucucugaaguugagggcagaauccaggaucuggaaaaguacguggaggacaccaaaaucgauuuauggagcuauaacgccgagcugcucguagcacuugaaaaucaacauacaauugaccugacugauucagagaugaacaaguuguuugaaaggaccaaaaagcagcuacgggagaaugcugaagacaugggaaacggcugcuucaagauauaccacaaaugugauaaugccugcaucgggaguauucgaaacggaacauaugaccaugauguguaccgcgacgaggcucugaauaacagauuucagaucaagggugucgagcucaaauccggcuacaaggacuggauucuguggaucagcuucgccauaucuugcuuucuucuguguguggcauugcucggguucaucaugugggccugccagaaaggaaauauuagguguaacaucugcauuuga

SEQ ID NO: 134851 - RNA, 1701 nt, Artificial Sequence; identical to SEQ ID NO: 128329
  derived and/or modified CDS sequence (opt3) from hemagglutinin__InfluenzaA__AEG65769

SEQ ID NO: 134852 - RNA, 1701 nt, Artificial Sequence
  derived and/or modified CDS sequence (opt3) from hemagglutinin__InfluenzaA__AEG65780
augaagaccaucauugcccugagcuacauacucugccuuguguucgcucagaaacugcccggcaacgacaauuccacagcaacuuuguguuuagggcaccaugccgucccuaacggaacgaucguuaagaccauuacaaaugauaaaaucgaggugacuaacgcgaccgaacugguacaaucuucaaguacaggugagauuugcaauagcccacaccagauccuagacggcgaaaacuguacccucauagaugcucugcuuggggacccgcagugcgauggauuucagaauaagaaaugggaccuguucguggagagauccaaggcccauucuaacuguuaucccuacgaugucccugacuaugcaucguugaggucacucguggccgcuagcggcacucuggaauuuaauaacgagaguuucaauuggacagguguuacccaaaacgggacguccucugcaugcauccggcgcagcaauaacuccuuuuucucacgacugaauuggcucacucacuuaaacuuuaaguacccagcccugaacgugaccaugcccaauaacgagcaguucgauaaacuuuauauuuggggaguccaucacccuggcacagacaaggaucagaucuuuuuguacgcucaggccgcgggccguauuacugugaguaccaaaagaagccaacaggcaguaaucccaaauauagggucuaggccccggguucgcaacauuccuuccagagugucaaucuauuggacaauugucaagccaggagacauccugcuaaucaauagcaccgguaaccucauugccccgaggggcuacuucaaaauacggagugggaagucuuccaucaugcgcagcgaugcucccauuggaaaguguaauucggccugcaucacgccuaacggcucuauaccaaaugacaaacccuuucagaacgugaaucgaauuacuuacggugcauguccuagauaugugaagcagaacacacugaaacuugcuaccgggaugaggaaugucccagaaaagcaaacucggggaaucuucggcgccaucgcgggcuuuauugagaacgggugggaaggaaugguugacgguugguacggcuuccgucaccaaaauuccgaggggcgcggacaggccgcagaucugaaaucaacacaggcugccaucgaccagauuaacggcaaguugaacagacucauagguaaaaccaaugagaaguuccaucagaucgaaaaggaguuuagugaaguggaggggaggauucaggaucuggaaaaauauguagaggacacgaagaucgauuuauggagcuacaacgcugagcugcucguggcccuugaaaaucaacacaccaucgaccugacagauuccgagaugaacaaauuguucgaaaagacuaaaaagcagcuacgggagaaugcagaagacaugggcaacggaugcuuuaagauuuaucauaaaugugauaaugccugcauaggcucuauccgaaacgggaccuacgaccacgaugucuaucgcgacgaggcucugaauaacagauuccagauuaagggaguggagcucaaaagcgguuacaaggacuggauccuguggauuucauuugcgaucaguugcuuccuucuguguguugcauugcucggcuuuauaaugugggccugccagaaagggaauaucagguguaacauuugcaucuga

SEQ ID NO: 134853 - RNA, 1701 nt, Artificial Sequence
  derived and/or modified CDS sequence (opt3) from hemagglutinin__InfluenzaA__AEG65813
augaagaccaucauugcccugagcuacauacucugccuuguguucgcucagaaacugcccggcaacgacaauuccacagcaacuuuguguuuagggcaccaugccgucccuaacggaacgaucguuaagaccauuacaaaugaucaaaucgaggugacuaacgcgaccgaacugguacagucuucaaguacaggugagauuugcaauagcccacaccagauccuagacggcgaaaacuguacccucauagaugcucugcuuggggacccgcagugcgauggauuucaaaauaaaaagugggaccuguucguggagagauccaaagcccauucuaacuguuaucccuacgaugucccugacuaugcaucguugaggucacucguggccagcaguggcacucuggaauuuaauaacgaguccuucaauuggacagguguuacccagaacgggacgucuagcgcuugcauccggcgcuccaauaacucauuuuucagucgacugaauuggcucacucacuuaaacuuuaaguacccagcacugaacgugaccaugcccaauaacgagcaguucgauaaacuuuauauuuggggaguccaucacccuggcacagacaaagaucagaucuuuuuguacgcccaagcugccggccguauuacugugagcaccaagagaucucagcaggcgguaaucccaaauauaggguccaggccccggguucgcaacauuccuucaagagugagcaucuauuggacaauugucaaaccaggagacauccugcuaaucaauaguaccgguaaccucauugcaccgaggggcuacuucaagauacggucugggaaauccagcaucaugcgcucggaugcccccauuggaaaguguaauucugcuugcaucacgccuaacggcuccauaccaaaugacaagcccuuucagaacgugaaucgaauuacuuacggugccuguccuagauaugugaaacaaaacacacugaaacuugcaaccgggaugaggaaugucccagaaaagcagacucggggaaucuucggcgcuaucgccggcuuuauugagaacgggugggaaggaaugguugacgguugguacggcuuccgucaccaaaauucagaggggcgcggacaggcggccgaucugaagaguacacaggcagcuaucgaccagauuaacggcaaauugaacagacucauagguaagaccaaugagaaauuccaucagaucgaaaaggaguuuagcgaaguggaggggaggauucaagaucuggaaaaguauguagaggacacgaaaaccgauuuaugguccuacaacgccgagcugcucguggcucuugaaaaucagcacacaaucgaccugacugauucugagaugaacaaguuguucgaaaagaccaagaaacagcuacgggagaaugccgaagacaugggcaacggaugcuuuaagaucuaucauaagugugauaaugcaugcauuggcagcauacgaaacgggacauacgaccacgaugucuaucgcgacgaggcccugaauaacagauuccagaucaaaggaguggagcucaagucagguuacaaagacuggauucuguggaucaguuuugcuauuuccugcuuccuucuguguguugcguugcucggcuuuaucaugugggcaugccaaaaggggaauauaagguguaacaucugcauuuga

SEQ ID NO: 134854 - RNA, 1701 nt, Artificial Sequence
  derived and/or modified CDS sequence (opt3) from hemagglutinin__InfluenzaA__AEG79801
augaaggccauccuggugguccuccuuuacaccuucgcuacagcaaacgccgacacucugugcauuggcuaucacgcgaauaacagcacggauaccguugacacaguguuggagaaaaauguaacugugacccauuccgucaacuuacuggaagauaagcacaaugggaaacuauguaagcucagaggaguggcuccccugcaucuugguaaaugcaacauagccggcuggauccuggggaauccugagugugaaucuuugucaacagcaaguagcugguccuacauuguugagaccucuucgucagacaacggaacuugcuauccaggcgauuuuaucaauuacgaggagcucagggagcagcugagcaguguguccucuuucgaacgguuugagauuuucccgaagacaagcuccuggcccaaccacgacucaaauaagggugucaccgccgcuuguccucaugcaggggccaaaaguuuuuauaagaaccugaucuggcucgugaaaaagggaaauagcuacccaaaauuaucuaaguccuauauaaacgauaagggcaaagaaguacugguucuuuggggcauccaccaccccucaacgacugcugaccaacagagcuuguaccagaaugccgaugcguacguguucgucgggaccagucgcuauucuaagaaauuuaagccugagauugcaauccgaccaaaagugcgugacagagagggaaggaugaacuacuauuggacacugguggaacccggugauaagauuacuuucgaggccaccggcaaccuagucguuccucgguacgcuuuugccauggaacgcaaugcaggguccggaaucauaauuagcgacacaccagugcaugauugcaacaccacgugucagacuccgaaaggcgcuaucaauacaucgcuccccuuccaaaacauucacccuaucaccaucgguaagugcccaaaguauguaaaaucuacuaagcugagacuugccacagggcugaggaaugugcccuccauucagucacggggauuguuuggcgcgauagccggcuucaucgaagggggauggaccgguauggucgacggcugguacggguaucaucaccagaacgaacagggaaguggcuacgcagcugaccucaaaagcacgcaaaaugccauugauaagaucaccaacaaaguuaauuccgugauagagaagaugaacacacaguuuacugcuguggguaaggaguucaaucaccuggaaaaacgcauugagaacuuaaauaagaaagucgacgauggguuccuggacaucuggaccuacaacgccgaacuccuugugcuguuggagaaugaacgaacacuagauuaucaugacucuaacguaaagaaccuguacgagaaaguuagaaaucagcucaagaacaaugcaaaggagaucggcaacggauguuuugaguucuaucacaaaugcgauaauacuuguauggaaagcgugaagaacggcaccuacgacuauccuaaauacucagaagaggccaagcugaauagggaagagauugauggggucaaacuugagaguacacggaucuaucagauucuggcuauauacuccaccguggcgagcucuuugguccucgugguuucacugggagcaaucaguuuuuggaugugcagcaacgguuccuuacaaugccguauuuguaucuga

SEQ ID NO: 134855 - RNA, 1701 nt, Artificial Sequence
  derived and/or modified CDS sequence (opt3) from hemagglutinin__InfluenzaA__AEG79807
augaaggccauccuggugguccuccuuuacaccuucgcuacagcaaacgccgacacucugugcauuggcuaucacgcgaauaacagcacggauaccguugacacaguguuggagaaaaauguaacugugacccauuccgucaacuuacuggaagauaagcacaaugggaaacuauguaagcucagaggaguggcuccccugcaucuugguaaaugcaacauagccggcuggauccuggggaauccugagugugaaucuuugucaacagcaaguagcugguccuacauuguugagaccucuucgucagacaacggaacuugcuauccaggcgauuuuaucaauuacgaagaacucagggagcagcugagcaguguguccucuuucgaacgguuugagauuuucccgaagacaagcuccuggcccaaccacgacucaaauaagggugucaccgccgcuuguccucaugcaggggccaaaaguuuuuauaagaaccugaucuggcucgugaaaaaggaaaauagcuacccaaaauuaucuaaguccuauauaaacgauaagggaaaagagguacugguucuuuggggcauccaccaccccucaacgacugcugaccaacagagcauuuaccagaaugccgaugcguacguguucgucggcaccagucgcuauucuaagaaauuuaagccugagaucgcaauucgaccaaaagugcgugaccaggaagggagaaugaacuacuauuggacauugguggagcccggagauaagaucacuuucgaagccaccgguaaccuggucguuccuagguacgcuuuugccauggagcggaaugcaggcuccgggauaauuaucagcgacacaccagugcaugauugcaacaccacgugucaaacuccgaaaggagcuauuaauacaucgcuacccuuccagaacauccacccuaucaccauuggcaagugcccaaaguauguaaaaucuacuaagcuccgccuggccacaggucuuagaaaugugcccuccauacagucaagggggcuguuuggagcgaucgccggcuucauugaaggcggguggaccggaauggucgacgguugguacggcuaucaucaccagaacgagcaagggaguggauacgcagcugacuugaaaagcacgcagaaugccaucgauaagauaaccaacaaaguuaauuccgugauugagaagaugaacacacaguuuacugcugugggcaaggaguucaaucaccucgagaaacggaucgaaaaccugaauaagaaagucgacgaugguuucuuagacaucuggaccuacaacgccgagcugcucgugcuucuggaaaaugagcgcacauuggauuaucaugacucuaacguaaagaaccuauacgagaaaguucgaaaucagcugaagaacaaugcaaaggaaauugggaacggcuguuuugaguucuaucacaaaugcgauaauacuuguauggaaagcgugaagaacggaaccuacgacuauccuaaauacucagaggaagccaagcucaauagagaggagaucgauggcgucaaacuggaaaguacaaggauuuaucaaauacuugcuaucuacuccaccguggcgagcucucuggucuuggugguuucacucggggcaauuaguuuuuggaugugcagcaacggaucccugcagugccggaucuguaucuga

SEQ ID NO: 134856 - RNA, 1701 nt, Artificial Sequence
  derived and/or modified CDS sequence (opt3) from hemagglutinin__InfluenzaA__AEG79835
augaaggccauccuggugguccuccuuuacaccuucgcuacagcaaacgccgacacucugugcauuggcuaucacgcgaauaacagcacggauaccguugacacaguguuggagaaaaauguaacugugacccauuccgucaacuuacuggaagauaagcacaaugggaaacuauguaagcucagaggaguggcuccccugcaucuugguaaaugcaacauagccggcuggauccuggggaauccugagugugaaucuuugucaacagcaaguagcugguccuacauuguugagaccucuucgucagacaacggaacuugcuauccaggcgauuuuaucgacuacgaagaacucagggagcagcugagcaguguguccucuuucgaacgguuugagauuuucccgaagacaagcuccuggcccaaucacgauucaaacaagggugucaccgccgcuuguccucaugcaggggccaaaggauuuuauaagaaucugaucuggcucgugaaaaagggcaacaguuacccaaaauuaagcaagucuuauauaaaugacaagggcaaagaaguacugguucuuugggggauccaccaccccuccacgacugcugaucaacagucaauuuaccagaacgccgacaccuacguguucgucggaacaagccgcuauaguaagaaauuuaagccugagaucgcgauucgaccaaaagugcgugaucaggaggguagaaugaauuacuauuggacuuugguggaacccggcgacaagaucaccuucgaggcaacagggaaccuggucguuccuagguacgccuuugcuauggaacggaacgccggaucuggcauaauuaucuccgauaccccagugcaugacugcaauacgacuugucaaacaccgaaaggugcaauuaacaccagccuacccuuccagaauauccacccuaucacuauugggaagugcccaaaguauguaaaaucgacaaagcuccgccuggcuaccggacuuagaaacgugcccucuauacaguccaggggccuguuuggcgccaucgcgggguucauugagggagguuggacgggcauggucgacgggugguacggauaucaucaccagaaugaacaaggcucagguuacgccgcagauuugaaaaguacccagaacgcuaucgacaagauaacaaauaaagugaacagcguuauugagaagaugaauacucaguuuaccgccguggggaaggaguucaaccaccucgaaaaacggaucgagaaucugaacaagaaagucgaugacggcuucuuagauaucuggacauacaaugcugaacugcucgugcuucuggagaacgaacgcacuuuggacuaucaugauuccaauguaaagaaccuauacgagaaaguucgaaaccagcugaagaauaacgccaaggagauuggaaauggcuguuuugaguucuaucacaaaugcgacaacaccuguauggagucugugaagaaugggacauacgauuauccuaaauacagcgaagaggcaaagcucaacagagaagagaucgacggagucaaacuggagucaaccaggauuuaucaaauacuugccaucuacaguacuguggcuuccagccuggucuuggugguuucucucggugcgauuucauuuuggaugugcaguaauggcagccugcagugccggaucuguaucuga

SEQ ID NO: 134857 - RNA, 1701 nt, Artificial Sequence
  derived and/or modified CDS sequence (opt3) from hemagglutinin__InfluenzaA__AEH59363
augaaggccauccuggugguccuccuuuacaccuucgcuacagcaaacgccgacacucugugcauuggcuaucacgcgaauaacagcacggauaccguugacacaguguuggagaaaaauguaacugugacccauuccgucaacuuacuggaagauaagcacaaugggaaacuauguaagcucagaggaguggcuccccugcaucuugguaaaugcaacauagccggcuggauccuggggaauccugagugugaaucuuugucaacagcaaguagcugguccuacauuguugagaccucuucgucagacaacggaacuugcuauccaggcgauuuuaucaauuacgaggagcucagggagcagcugagcaguguguccucuuucgaacgguuugagauuuucccgaagacaagcuccuggcccaaccacgacucaaauaagggugucaccgccgcuuguccucaagcaggggccaaaaguuuuuauaagaaccugaucuggcucgugaaaaagggaaauagcuacccaaaauuaucuaaguccuauauaaacgauaagggcaaagaaguacugguucuuuggggcauccaucaccccucaacgagcgcugaccagcagaguuuguaccagaaugccgaugcguacguguucgucgggacuucuaaguauuccaaaaaguuuaaaccugagauugcagugcgcccaaaggugcgagaccaagagggacguaugaacuacuauuggacccuggucgaacccggugauaaaaucacauucgaggccacuggcaaccuacucguuccuagauacgcuuuugccauggaaaggaaugcagggagcggaauuaucauaucggacaccccagugcacgauugcaacacaaccugucagacgccgaagggcgcuauuaauacuucucugcccuuccagaacauccauccuauuacaaucgguaagugcccaaaauauguaaaguccaccaaacuucggcuggccacuggguugcgcaaugugcccucaauccagaguagaggacucuuuggcgcgauugccggcuucauagaagggggauggacagguauggucgacggcugguacggguaucaccaucaaaacgcacagggaagcggcuacgcugccgaccugaaguccacccagaaugcuaucgauaaaauuacgaacaagguaaauucuguuaucgaaaagaugaacacccaguuuacagccguggguaaagaguucaaucacuuagagaagaggauagaaaaccugaauaaaaaggucgacgauggguuccucgacauuuggacuuacaacgcagagcuucugguguugcuagaaaaugagcggacccuggauuaucacgacagcaacgugaaaaaccucuacgaaaagguucgcucacaacugaagaauaacgccaaagagaucggcaauggauguuuugaguucuaucauaagugcgauaacacauguauggaaagugugaaaaauggcacuuacgacuauccuaaguacuccgaggaagcuaaacuuaaccgagaggaaaucgauggggucaagcuggagagcaccagaauuuaucagaucuuggcgauuuacucuacaguggcaucaagucucguccuggugguuagcuuaggagccauauccuuuuggaugugcucuaaugguucgcugcagugcaggaucuguauuuga

SEQ ID NO: 134858 - RNA, 1701 nt, Artificial Sequence
  derived and/or modified CDS sequence (opt3) from hemagglutinin__InfluenzaA__AEH59367
augaaggccauccuggugguccuccuuuacaccuucgcuacagcaaacgccgacacucugugcauuggcuaucacgcgaauaacagcacggauaccguugacacaguguuggagaaaaauguaacugugacccauuccgucaacuuacuggaagauaagcacaaugggaaacuauguaagcucagaggaguggcuccccugcaucuugguaaaugcaacauagccggcuggauccuggggaauccugagugugaaucuuugucaacagcaaguagcugguccuacauuguugagaccucuucgucagacaacggaacuugcuauccaggcgauuuuaucaauuacgaggagcucagggagcagcugagcaguguguccucuuucgaacgguuugagauuuucccgaagacaagcuccuggcccaaccacgacucaaauaagggugucaccgccgcuuguccucaugcaggggccaaaaguuuuuauaagaaccugaucuggcucgugaaaaagggaaauagcuacccaaaauuaucuaaguccuauauaaacgauaagggcaaagaaguacugguucuuuggggcauccaccaccccucaacgacugcugaccaacagagcuuguaccagaaugccgaugcguacguguucgucgggaccagucgcuauucuaagaaauuuaagccugagauugcaauccgaccaaaagugcgugaccaggagggaagaaugaacuacuauugggcccugguggaacccggugauaagauuacauucgaggcuacuggcaaccuagucguuccuagguacgccuuugcaauggaacggaaugcuggguccggaaucauaauuagcgacaccccagugcaugauugcaacacaaccugucaaacgccgaaaggcgccaucaauacuucgcuccccuuccagaacauucacccuaucacaaucgguaagugcccaaaguauguaaaaucuaccaagcugcgccuugcgacugggcugagaaaugugcccuccauucagucaaggggauuguuuggcgccauagcaggcuucaucgaagggggauggacagguauggucgacggcugguacggguaucaucaccagaacgaacaaggaaguggcuacgcugccgaccucaaaagcacccagaaugcuauugauaagaucacgaacaaaguuaauuccgugauagagaagaugaacacccaguuuacagccguggguaaggaguucaaucaccuggaaaaacggauugagaacuuaaauaagaaagucgacgauggguuccuggacaucuggacuuacaacgcagaacuccuugugcuguuggagaaugaacgcacccuagauuaucaugacucuaacguaaagaaccuguacgagaaaguucgaaaucagcucaagaacaaugccaaggagaucggcaacggauguuuugaguucuaucacaaaugcgauaauacauguauggaaagcgugaagaacggcacuuacgacuauccuaaauacucagaagaggcuaagcugaauagagaagagauugauggggucaaacuugagaguaccaggaucuaucaaauucuggcgauauacuccacaguggcaagcucuuugguccucgugguuucacugggagccaucaguuuuuggaugugcagcaacgguuccuuacagugccggauuuguaucuga

SEQ ID NO: 134859 - RNA, 1701 nt, Artificial Sequence
  derived and/or modified CDS sequence (opt3) from hemagglutinin__InfluenzaA__AEH59369
augaaggccauccuggugguccuccuuuacaccuucgcuacagcaaacgccgacacucugugcauuggcuaucacgcgaauaacagcacggauaccguugacacaguguuggagaaaaauguaacugugacccauuccgucaacuuacuggaagauaagcacaaugggaaacuauguaagcucagaggaguggcuccccugcaucuugguaaaugcaacauagccggcuggauccuggggaauccugagugugaaucuuugucaacagcaaguagcugguccuacauuguugagaccucuucgucagacaacggaacuugcuauccaggcgauuuuaucgacuacgaagaacucagggagcagcugagcaguguguccucuuucgaacgguuugagauuuucccgaaggccagcuccuggcccaaucacgauucaaacaagggugucacagcugcauguccucaugccggggcuaaaggauuuuauaagaaucugaucuggcucgugaaaaagggcaacaguuacccaaaauuaagcaagucuuauauaaaugacaagggcaaagaaguacugguucuuugggggauccaccaccccuccaccacggccgaucaacagucauuguaccagaacgcggacacuuacguguucgucggaaccagccgcuauaguaagaaauuuaagccugagauugcaauccgaccaaaagugcgugaucaggaggguagaaugaauuacuauuggacacugguggaacccggcgacaagauuacuuucgaggccaccgggaaccuagucguuccuagguacgcuuuugccauggaacggaacgcaggaucuggcaucauaauuuccgauacaccagugcaugacugcaauaccacgugucaaacuccgaaaggugcuaucaacacaagccuccccuuccagaauauucacccuaucaccaucgggaagugcccaaaguauguaaaaucgacuaagcugcgccuugccacaggacugagaaacgugcccucuauucaguccaggggcuuguuuggcgcgauagccggguucaucgagggagguuggaccggcauggucgacgggugguacggauaucaucaccagaaugaacaaggcucagguuacgcagcugaucucaaaaguacgcagaacgccauugacaagaucaccaauaaagugaacagcguuauagagaagaugaauacacaguuuacugcuguggggaaggaguucaaccaccuggaaaaacggauugagaauuuaaacaagaaagucgaugacggcuuccuggauaucuggaccuacaaugccgaacuccuugugcuguuggagaacgaacgcacacuagacuaucaugauuccaauguaaagaaccuguacgagaaaguucgaaaccagcucaagaauaacgcaaaggagaucggaaauggcuguuuugaguucuaucacaaaugcgacaacacuuguauggagucugugaagaaugggaccuacgauuauccuaaauacagcgaagaggccaagcugaacagagaagagauugacggagucaaacuugagucaacaaggaucuaucaaauucuggcuauauacaguaccguggcguccagcuugguccucgugguuucucugggugcaaucucauuuuggaugugcaguaauggcagcuuacagugccggauuuguaucuga

SEQ ID NO: 134860 - RNA, 1701 nt, Artificial Sequence; identical to SEQ ID NO: 134857
  derived and/or modified CDS sequence (opt3) from hemagglutinin__InfluenzaA__AEH59371

SEQ ID NO: 134861 - RNA, 1701 nt, Artificial Sequence
  derived and/or modified CDS sequence (opt3) from hemagglutinin__InfluenzaA__AEH59373
augaaggccauccuggugguccuccuuuacaccuucgcuacagcaaacgccgacacucugugcauuggcuaucacgcgaauaacagcacggauaccguugacacaguguuggagaaaaauguaacugugacccauuccgucaacuuacuggaagauaagcacaaugggaaacuauguaagcucagagagguggcuccccugcaucuuggaaaaugcaacauagccgguuggauccugggcaauccugaaugugagucuuugucaacagcaaguagcugguccuacauuguugaaaccucuucgucagacaacgggacuugcuauccaggagauuuuaucgacuacgaggagcucagggaacagcugagcaguguguccucuuucgagcgguuugaaauuuucccgaagacaagcuccuggcccaaucacgauucaaacaagggcgucaccgccgcuuguccucaugccggugcaaaaggguuuuauaagaaucugaucuggcucgugaaaaagggaaacaguuacccaaaauuaagcaagucuuauauaaaugacaagggcaaagagguacugguucuuuggggcauccaccaccccuccacgacugcugaucaacagucauuguaccagaacgccgacaccuacguguucgucgggacaagccgcuauaguaagaaauuuaagccugagauugcgauccgaccaaaagugcgugaucaggaaggaagaaugaauuacuauuggacucugguggagcccggugacaagauuaccuucgaagcaacaggcaaccuagucguuccuagguacgccuuugcuauggagcggaacgccgggucuggaaucauaauuuccgauaccccagugcaugacugcaauacgacuugucaaacaccgaaaggcgcaaucaacaccagccuccccuuccagaauauucacccuaucacuaucgguaagugcccaaaguauguaaaaucgacaaagcugcgccuugcuaccgggcugagaaacgugcccucuauucaguccaggggauuguuuggcgccauagcgggcuucaucgaagggggauggacggguauggucgacggcugguacggguaucggcaucagaaugagcaaggaucaggcuacgccgcagaucucaaaaguacccagaacgcuauugacaagaucacaaauaaagugaacagcguuauagagaagaugaauacucaguuuaccgccguggguaaggaguucaaccaccuggaacgccgaauugaaaauuuaaacaaaaaggucgaugacggguuccuggauaucuggacauacaaugcugagcuccuugugcuguuggaaaacgagagaacucuagacuaucacgauuccaauguaaagaaccuguacgagaagguuaggaaccagcucaaaaauaacgccaaggaaaucggcaauggauguuuugaguucuaucauaagugcgacaacaccuguauggaaucugugaaaaauggcacauacgauuauccuaaguacagcgaggaagcaaaacugaaccgggaggagauugacggggucaaacuugaaucaacccguaucuaucaaauucuggccauauacaguacuguggcuuccagcuugguccucgugguuucucugggagcgaucucauuuuggaugugcaguaaugguagcuuacagugccgcauuuguaucuga

SEQ ID NO: 134862 - RNA, 1701 nt, Artificial Sequence; identical to SEQ ID NO: 134857
  derived and/or modified CDS sequence (opt3) from hemagglutinin__InfluenzaA__AEH59375

SEQ ID NO: 134863 - RNA, 1701 nt, Artificial Sequence
  derived and/or modified CDS sequence (opt3) from hemagglutinin__InfluenzaA__AEH59379
augaaggccauccuggugguccuccuuuacaccuucgcuacagcaaacgccgacacucugugcauuggcuaucacgcgaauaacagcacggauaccguugacacaguguuggagaaaaauguaacugugacccauuccgucaacuuacuggaagauaagcacaaugggaaacuauguaagcucagaggaguggcuccccugcaucuugguaaaugcaacauagccggcuggauccuggggaauccugagugugaaucuuugucaacagcaaguagcugguccuacauuguugagaccucuucgucagacaacggaacuugcuauccaggcgauuuuaucgacuacgaggagcucagggagcagcugagcaguguguccucuuucgaacgguuugagauuuucccgaagacaagcuccuggcccaaucacgauucaaacaagggugucaccgccgcuuguccucaugcaggggccaaaaguuuuuauaagaaucugaucuggcucgugaaaaagggaaacagcuacccaaaauuaucuaaguccuauauaaaugacaagggcaaagaaguacugguucuuuggggcauccaccaccccucaacgacugcugaucaacagagcuuguaccagaacgccgacaccuacguguucgucgggacaagucgcuauucuaagaaauuuaagccugagauugcgauccgaccaaaagugcgugaucaggagggaagaaugaauuacuauuggacucugguggaacccggugacaagauuaccuucgaggcaacaggcaaccuagucguuccuagguacgccuuugcuauggaacggaacgccggguccggaaucauaauuagcgauaccccagugcaugacugcaauacgacuugucaaacaccgaaaggcgcaaucaacaccucgcuccccuuccagaauauucacccuaucacuaucgguaagugcccaaaguauguaaaaucuacaaagcugcgccuugcuaccgggcugagaaacgugcccuccauucagucaaggggauuguuuggcgccauagcgggcuucaucgaagggggauggacggguauggucgacggcugguacggguaucaucaccagaaugaacaaggaaguggcuacgccgcagaucucaaaagcacccagaacgcuauugacaagaucacaaauaaagugaacuccguuauagagaagaugaauacucaguuuaccgccguggguaaggaguucaaccaccuggaaaaacggauugagaauuuaaacaagaaagucgaugacggguuccuggauaucuggacauacaaugcugaacuccuugugcuguuggagaacgaacgcacucuagacuaucaugauucuaauguaaagaaccuguacgagaaaguucgaaaccagcucaagaauaacgccaaggagaccggcaauggauguuuugaguucuaucacaaaugcgacaacacauguauggaaagcgugaagaauggcaccuacgauuauccuaaauacucagaagaggcaaagcugaacagagaagagaucgacggggucaaacuugagaguacuaggauuuaucaaauccuggccauuuacuccacgguggcuagcucuuugguccucgugguuucacugggagcgauaaguuuuuggaugugcagcaaugguuccuuacagugccggaucuguauuuga

SEQ ID NO: 134864 - RNA, 1701 nt, Artificial Sequence; identical to SEQ ID NO: 134857
  derived and/or modified CDS sequence (opt3) from hemagglutinin__InfluenzaA__AEH59381

SEQ ID NO: 134865 - RNA, 1701 nt, Artificial Sequence
  derived and/or modified CDS sequence (opt3) from hemagglutinin__InfluenzaA__AEH59383
augaaggccauccuggugguccuccuuuacaccuucgcuacagcaaacgccgacacucugugcauuggcuaucacgcgaauaacagcacggauaccguugacacaguguuggagaaaaauguaacugugacccauuccgucaacuuacuggaagauaagcacaaugggaaacuauguaagcucagaggaguggcuccccugcaucuugguaaaugcaacauagccggcuggauccuggggaauccugagugugaaucuuugucaacagcaaguagcugguccuacauuguugagaccucuucgucagacaacggaacuugcuauccaggcgauuuuaucgacuacgaagaacucagggagcagcugagcaguguguccucuuucgaacgguuugagauuuucccgaagacaagcuccuggcccaaucacgauucaaacaagggugucaccgccgcuuguccucaugcaggggccaaaggauuuuauaagaaucugaucuggcucgugaaaaagggcaacaguuacccaaaauuaagcauaucuuauaucaaugacaagggcaaggaaguacugguucuuugggggauucaccaccccuccacgacugcugaucaacagucauuguaccagaacgccgacaccuacguguucgucggaacaagccgcuauaguaaaaaguuuaaaccugagaucgcgauucgaccaaaggugcgugaucaggaggguagaaugaauuacuauuggacucugguggaacccggcgacaaaaucaccuucgaggcaacagggaaccuagucguuccuagguacgccuuugcuauggaacggaacgccggaucuggcauaauuaucuccgauaccccagugcaugacugcaauacgacuugucaaacaccgaagggugcaauuaacaccagccuccccuuccagaauauccacccuaucacuauugggaaaugcccaaaguauguaaagucgacaaaacugcgccuugcuaccggacugagaaacgugcccucuauacaguccaggggcuuguuuggcgccaucgcgggguucauugagggagguuggacgggcauggucgacgggugguacggauaucaucaccagaaugaacaaggcucagguuacgccgcagaucucaagaguacccagaacgcuaucgacaaaauaacaaauaaggugaacagcguuauugagaaaaugaauacucaguuuaccgccguggggaaggaguucaaccaccuggaaaagcggaucgagaauuuaaacaaaaaggucgaugacggcuuccuggauaucuggacauacaaugcugaacuccuugugcuguuggagaacgaacgcacucuagacuaucaugauuccaauguaaagaaccuguacgagaagguucgaaaccagcucaaaaauaacgccaaggagauuggaaauggcuguuuugaguucuaucacaagugcgacaacaccuguauggagucugugaaaaaugggacauacgauuauccuaaguacagcgaagaggcaaaacugaacagagaagagaucgacggagucaaacuugagucaaccaggauuuaucaaauacuggccaucuacaguacuguggcuuccagcuugguccucgugguuucucugggugcgauuucauuuuggaugugcaguaauggcagcuuacagugccggaucuguaucuga

SEQ ID NO: 134866 - RNA, 1701 nt, Artificial Sequence
  derived and/or modified CDS sequence (opt3) from hemagglutinin__InfluenzaA__AEH59385
augaaggccauccuggugguccuccuuuacaccuucgcuacagcaaacgccgacacucugugcauuggcuaucacgcgaauaacagcacggauaccguugacacaguguuggagaaaaauguaacugugacccauuccgucaacuuacuggaagauaagcacaaugggaaacuauguaagcucagaggaguggcuccccugcaucuugguaaaugcaacauagccggcuggauccuggggaauccugagugugaaucuuugucaacagcaaguagcugguccuacauuguugagaccucuucgucagacaacggaacuugcuauccaggcgauuuuaucgacuacgaggagcucagggagcagcugagcaguguguccucuuucgaacgguuugagauuuucccgaagacaagcuccuggcccaaucacgauucaaacaagggugucaccgccgcuuguccucaugcaggggccaaaaguuuuuauaagaaucugaucuggcucgugaaaaagggaaacagcuacccaaaauuaucuaaguccuauauaaaugacaagggcaaagaaguacugguucuuuggggcauccaccaccccucaacgacugcugaucaacagagcuuguaccagaacgccgacgcguacauuuucguggggaccagucgcuauucuaagaaauuuaagccugagaucgcaauucgaccaaaaguccgugaucaggagggaagaaugaauuacuauuggacacugguggaacccggugacaagaucacuuucgaggccaccggcaaccuaguggucccuagguacgcuuuugccauggaacggaacgcaggguccggaauaauuaucagcgauacaccaguucaugacugcaauaccacgugucaaacuccgaaaggcgcuauuaacacaucgcuccccuuccagaauauccacccuaucaccauugguaagugcccaaaguaugugaaaucuacuaagcugcgccuugccacagggcugagaaacguacccuccauacagucaaggggauuguuuggcgcgaucgccggcuucauugaagggggauggaccgguaugguggacggcugguacggguaucaucaccagaaugaacaaggaaguggcuacgcagcugaucucaaaagcacgcagaacgccaucgacaagauaaccaauaaagucaacuccgugauugagaagaugaauacacaguuuacugcuguugguaaggaguucaaccaccuggaaaaacggaucgagaauuuaaacaagaaaguggaugacggguuccuggauaucuggaccuacaaugccgaacuccuuguccuguuggagaacgaacgcacacuagacuaucaugauucuaaugugaagaaccuguacgagaaaguacgaaaccagcucaagaauaacgcaaaggagauuggcaauggauguuuugaguucuaucacaaaugcgacaacacuuguauggaaagcguuaagaauggcaccuacgauuauccuaaauacucagaagaggccaagcugaacagagaagagaucgacggggugaaacuugagaguacaaggauuuaucaaauacuggcuaucuacuccaccgucgcgagcucuuuggugcucgucgugucacugggagcaauuaguuuuuggaugugcagcaaugguuccuuacagugccggaucuguaucuga

SEQ ID NO: 134867 - RNA, 1701 nt, Artificial Sequence; identical to SEQ ID NO: 134857
  derived and/or modified CDS sequence (opt3) from hemagglutinin__InfluenzaA__AEH59387

SEQ ID NO: 134868 - RNA, 1701 nt, Artificial Sequence
  derived and/or modified CDS sequence (opt3) from hemagglutinin__InfluenzaA__AEH59393
augaaggccauccugguggucauucucuacaccuucgcuacagcaaacgccgacacucuuugcauaggcuaucacgcgaauaacagcacggauaccguugacacagugcuggagaaaaauguaacugugacccauuccgucaacuuguuagaagauaagcacaaugggaaacuguguaagcuaagaggaguggcuccccuccaucuggguaaaugcaacaucgccggcuggauucuugggaauccugagugugaaucucugucaacagcaaguagcugguccuacaucguugagaccucuucgucagacaacggaacuugcuauccaggcgauuuuauugacuacgaagaguugagggagcagcucagcaguguguccucuuucgaacgguuugagaucuucccgaagacaagcuccuggcccaaucacgauucaaacaagggugucaccgccgcuuguccucaugcaggggccaaaggauuuuauaagaaucugauauggcuggugaaaaagggcaacaguuacccaaaacucagcaagucuuauaucaaugacaagggcaaagaaguauuaguucugugggggauucaccaccccuccacgacugcugaucaacagucacuuuaccagaacgccgacaccuacguguucgucggaacaagccgcuauaguaagaaauuuaagccugagaucgcgauucgaccaaaagugcgugaucaggaggguagaaugaauuacuauuggacuuugguggaacccggcgacaagaucaccuucgaggcaacagggaaccuggucguuccuagguacgccuuugcuauggaacggaacgccggaucuggcauaauuaucuccgauaccccagugcaugacugcaauacgacuugucaaacaccgaaaggugcaauuaacaccagccuacccuuccagaauauccacccuaucacuauugggaagugcccaaaguauguaaaaucgacaaagcuccgccuggcuaccggacuuagaaacgugcccucuauacaguccaggggccuguuuggcgccaucgcgggguucauugagggagguuggacgggcauggucgacgggugguacggauaucaucaccagaaugaacaaggcucagguuacgccgcagauuugaaaaguacccagaacgcuaucgacaagauaacaaauaaagugaacagcguuauugagaagaugaauacucaguuuaccgccguggggaaggaguucaaccaccucgaaaaacggaucgagaaucugaacaagaaagucgaugacggcuucuuagauaucuggacauacaaugcugaacugcucgugcuucuggagaacgaacgcacuuuggacuaucaugauuccaauguaaagaaccuauacgagaaaguucgaaaccagcugaagaauaacgccaaggagauuggaaauggcuguuuugaguucuaucacaaaugcgacaacaccuguauggaaucugugaagaaugggacauacgauuauccuaaauacagcgaagaggcaaagcucaacagagaagagaucgacggagucaaacuggagucaaccaggauuuaucaaauacuugccaucuacaguacuguggcuuccagccuggucuuggugguuucucucggugcgauuucauuuuggaugugcaguaauggcagccugcagugccggaucuguaucuga

SEQ ID NO: 134869 - RNA, 1701 nt, Artificial Sequence
  derived and/or modified CDS sequence (opt3) from hemagglutinin__InfluenzaA__AEH59397
augaaggccauccuggugguccuccuuuacaccuucgcuacagcaaacgccgacacucugugcauuggcuaucacgcgaauaacagcacggauaccguugacacaguguuggagaaaaauguaacugugacccauuccgucaacuuacuggaagauaagcacaaugggaaacuauguaagcucagaggaguggcuccccugcaucuugguaaaugcaacauagccggcuggauccuggggaauccugagugugaaucuuugucaacagcaaguagcugguccuacauuguugagaccucuucgucagacaacggaacuugcuauccaggcgauuuuaucaauuacgaggagcucagggagcagcugagcaguguguccucuuucgaacgguuugagauuuucccgaagacaagcuccuggcccucacacgacaguaacaagggugucaccgccgcuuguccucaugcaggggccaagagcuuuuauaaaaaucugaucuggcucgugaaaaagggaaacucuuacccaaaauuauccaagucauauauaaaugauaagggcaaagaaguacugguucuuuggggcauccaccaccccagcacgagugcugaccaacagucuuuguaccagaacgccgaugcguacguguucgucgggacuuccaaguauagcaaaaaguuuaaaccugagauugcagugcgcccaaaggugcgagaccaggagggacguaugaauuacuauuggacccuggucgaacccggugauaaaaucacauucgaggccacuggcaaccuacucguuccuagauacgcuuuugccauggaaaggaacgcagggucgggaauuaucauaucugacaccccagugcaugauugcaauacaaccugucaaacgccgaagggcgcuauuaacacuucccugcccuuccagaauauccacccuauuacaaucgguaagugcccaaaauauguaaagucaaccaaacuucggcuggccacuggguugcgcaacgugcccaguauccagagcagaggacucuuuggcgcgauugccggcuucauagaagggggauggacagguauggucgacggcugguacggguaucaucaccagaaugaacaaggauccggcuacgcagcugaccugaagucuacccagaacgccaucgauaaaauuacgaauaaggugaacagcguuaucgagaagaugaauacccaguuuacagcuguggguaaagaguucaaccacuuagaaaagaggauagagaaucugaacaaaaaggucgacgauggguuccucgacauuuggacuuacaaugccgaacuucugguguugcuagagaacgaacggacccuggauuaucaugacucaaauguuaaaaaccucuacgagaagguacgcagucagcugaagaacaaugcaaaagagaucgaaaacggcuguuuugaguucuaucacaagugcgauaauacauguauggaauccgugaaaaacggaacuuacgacuauccuaaguacagcgaggaagccaaacuuaaucgagaggagaucgauggcgucaagcuggaaucuaccagaauuuaucaaaucuuggcuauuuacucaacaguggcgaguagccucguccuggugguuuccuuaggggcaauaucuuuuuggaugugcucgaacggaagccugcagugcaggaucuguauuuga

SEQ ID NO: 134870 - RNA, 1701 nt, Artificial Sequence
  derived and/or modified CDS sequence (opt3) from hemagglutinin__InfluenzaA__AEH59399
augaaggccauccuggugguccuccuuuacaccuucgcuacagcaaacgccgacacucugugcauuggcuaucacgcgaauaacagcacggauaccguugacacaguguuggagaaaaauguaacugugacccauuccgucaacuuacuggaagauaagcacaaugggaaacuauguaagcucagaggaguggcuccccugcaucuugguaaaugcaacauagccggcuggauccuggggaauccugagugugaaucuuugucaacagcaaguagcugguccuacauuguugagaccucuucgucagacaacggaacuugcuauccaggcgauuuuaucgacuacgaagaacucagggagcagcugagcaguguguccucuuucgaacgguuugagauuuucccgaagacaagcuccuggcccaaucacgauucaaacaagggugucaccgccgcuuguccucaugcaggggccaaaggauuuuauaagaaucugaucuggcucgugaaaaagggcaacaguuacccaaaauuaagcaagucuuauauaaaugacaagggcaaagaaguacugguucuuugggggauccaccaccccuccacgacugcugaucaacagucauuguaccagaacgccgacaccuacguguucgucggaacaagccgcuauaguaagaaauuuaagccugagauugcgauccgaccaaaagugcgugaucaggaggguagaaugaauuacuauuggacuauuguggaacccggcgacaagaucaccuucgaggcaacagggaaccuggucguuccuagguacgccuuugcuauggaacggaacgccggaucuggcauaauuaucuccgauaccccagugcaugacugcaauacgacuugucaaacaccgaaaggugcaauuaacaccagccuacccuuccagaauauccacccuaucacuauugggaagugcccaaaguauguaaaaucgacaaagcuccgccuggcuaccggacuuagaaacgugcccucuauacaguccaggggccuguuuggcgccaucgcgggguucauugagggagguuggacgggcauggucgacgggugguacggauaucaucaccagaaugaacaaggcucagguuacgccgcagauuugaaaaguacccagaacgcuaucgacaagauaacaaauaaagugaacagcguuauugagaagaugaauacucaguuuaccgccguggggaaggaguucaaccaccucgaaaaacggaucgagaaucugaacaagaaagucgaugacggcuucuuagauaucuggacauacaaugcugaacugcucgugcuucuggagaacgaacgcacuuuggacuaucaugauuccaauguaaagaaccuauacgagaaaguucgaaaccagcugaagaauaacgccaaggagauuggaaauggcuguuuugaguucuaucacaaaugcgacaacaccuguauggagucugugaagaaugggacauacgauuauccuaaauacagcgaagaggcaaagcucaacagagaagagaucgacggagucaaacuggagucaaccaggauuuaucaaauacuugccaucuacaguacuguggcuuccagccuggucuuggugguuucucucggugcgauuucauuuuggaugugcaguaauggcagccugcagugccggaucuguaucuga

SEQ ID NO: 134871 - RNA, 1701 nt, Artificial Sequence
  derived and/or modified CDS sequence (opt3) from hemagglutinin__InfluenzaA__AEH59403
augaaggccauccuggugguccuccuuuacaccuucgcuacagcaaacgccgacacucugugcauuggcuaucacgcgaauaacagcacggauaccguugacacaguguuggagaaaaauguaacugugacccauuccgucaacuuacuggaagauaagcacaaugggaaacuauguaagcucagaggaguggcuccccugcaucuugguaaaugcaacauagccggcuggauccuggggaauccugagugugaaucuuugucaacagcaaguagcugguccuacauuguugagaccucuucgucagacaacggaacuugcuauccaggcgauuuuaucgacuacgaggaacucagggagcagcugagcaguguguccucuuucgaacgguuugagauuuucccgaagacaagcuccuggcccaaucacgauucaaacaagggugucaccgccgcuuguccucaugcaggggccaaaggauuuuauaagaaucugaucuggcucgugaaaaagggcaacaguuacccaaaauuaagcaagucuuauauaaaugacaagggcaaagaaguacugguucuuugggggauccaccaccccuccacgacugcugaucaacagucauuguaccagaacgccgacaccuacguguucgucggaacaagccgcuauaguaagaaauuuaagccugagauugcgauccgaccaaaagugcgugaucaggaggguagaaugaauuacuauuggacucugguggcacccggcgacaagauuaccuucgaagccacagggaaccuagucguuccuagguacgcuuuugccauggagcggaacgcaggaucuggcaucauaauuuccgauaccccagugcaugacugcaauacgacuugucaaacaccgaaaggugcuaucaacaccagccuccccuuccagaauauucacccuaucacuaucgggaagugcccaaaguauguaaaaucgacaaagcugcgccuugccaccggacugagaaacgugcccucuauucaguccaggggcuuguuuggcgcgauagccggguucaucgaaggagguuggacgggcauggucgacgggugguacggauaucaucaccagaaugagcaaggcucagguuacgcagcugaucucaaaaguacccagaacgccauugacaagaucacaaauaaagugaacagcguuauagaaaagaugaauacucaguuuaccgcuguggggaaggaguucaaccaccuggagaaacggauugaaaauuuaaacaagaaagucgaugacggcuuccuggauaucuggacauacaaugccgagcuccuugugcuguuggaaaacgagcgcacucuagacuaucaugauuccaauguaaagaaccuguacgaaaaaguucgaaaccagcucaagaauaacgcaaaggagaucggaaauggcuguuuugaguucuaucacaaaugcgacaacaccuguauggaaucugugaagaaugggacauacgauuauccuaaauacagcgaggaagccaagcugaacagagaggaaauugacggagucaaacuugagucaaccaggaucuaucaaauucuggcuauauacaguacuguggcguccagcuugguccucgugguuucucugggugcaaucucauuuuggaugugcaguaauggcagcuuacagugccggauuuguaucuga

SEQ ID NO: 134872 - RNA, 1701 nt, Artificial Sequence
  derived and/or modified CDS sequence (opt3) from hemagglutinin__InfluenzaA__AEH59407
augaaggccauccugguggucaugcucuacaccuucgcuacagcaaacgccgacacucuuugcauuggcuaucacgcgaauaacagcacggauaccguugacacagugcuggagaaaaauguaacugugacccauuccgucaacuuguuagaagauaagcacaaugggaaacuguguaagcuaagaggaguggcuccccuccaucuggguaaaugcaacauagccggcuggauccuugggaauccugagugugaaucucugucaacagcaaguagcugguccuacauuguugagaccucuucgucagacaacggaacuugcuauccaggcgauuuuaucgacuacgaagaguugagggagcagcucagcaguguguccucuuucgaacgguuugagauuuucccgaagacaagcuccuggcccaaucacgauucaaacaagggugucaccgccgcuuguccucaugcaggggccaaaggauuuuauaagaaucugaucuggcuggugaaaaagggcaacaguuacccaaaacucagcaagucuuauauaaaugacaagggcaaagaaguauuaguucugugggggauccaccaccccuccacgacugcugaucaacagucacuuuaccagaacgccgacaccuacguguucgucggaacaagccgcuauaguaagaaauuuaagccugagauugcgauccgaccaaaagugcgugaucaggaggguagaaugaauuacuauuggacuuugguggaacccggcgacaagauuaccuucgaggcaacagggaaccuggucguuccuagguacgccuuugcuauggaacggaacgccggaucuggcaucauaauuuccgauaccccagugcaugacugcaauacgacuugucaaacaccgaaaggugcaaucaacaccagccuacccuuccagaauauucacccuaucacuaucgggaagugcccaaaguauguaaaaucgacaaagcuccgccuggcuaccggacuuagaaacgugcccucuauucaguccaggggccuguuuggcgccauagcgggguucaucgagggagguuggacgggcauggucgacgggugguacggauaucaucaccagaaugaacaaggcucagguuacgccgcagauuugaaaaguacccagaacgcuauugacaagaucacaaauaaagugaacagcguuauagagaagaugaauacucaguuuaccgccguggggaaggaguucaaccaccucgaaaaacggauugagaaucugaacaagaaagucgaugacggcuucuuagauaucuggacauacaaugcugaacugcucgugcuucuggagaacgaacgcacuuuggacuaucaugauuccaauguaaagaaccuauacgagaaaguucgaaaccagcugaagaauaacgccaaggagaucggaaauggcuguuuugaguucuaucacaaaugcgacaacaccuguauggaaucugugaagaaugggacauacgauuauccuaaauacagcgaagaggcaaagcucaacagagaagagauugacggagucaaacuggagucaaccaggaucuaucaaauucuugccauauacaguacuguggcuuccagccuggucuuggugguuucucucggugcgaucucauuuuggaugugcaguaauggcagccugcagugccggauuuguaucuga

SEQ ID NO: 134873 - RNA, 1701 nt, Artificial Sequence; identical to SEQ ID NO: 134872
  derived and/or modified CDS sequence (opt3) from hemagglutinin__InfluenzaA__AEH59409

SEQ ID NO: 134874 - RNA, 1701 nt, Artificial Sequence
  derived and/or modified CDS sequence (opt3) from hemagglutinin__InfluenzaA__AEH59411
augaaggccauccuggugguccuccuuuacaccuucgcuacagcaaacgccgacacucugugcauuggcuaucacgcgaauaacagcacggauaccguugacacaguguuggagaaaaauguaacugugacccauuccgucaacuuacuggaagauaagcacaaugggaaacuauguaagcucagaggaguggcuccccugcaucuugguaaaugcaacauagccggcuggauccuggggaauccugagugugaaucuuugucaacagcaaguagcugguccuacauuguugagaccucuucgucagacaacggaacuugcuauccaggcgauuuuaucgacuacgaggaacucagggagcagcugagcaguguguccucuuucgaacgguuugagauuuucccgaagacaagcuccuggcccaaucacgauucaaacaagggugucaccgccgcuuguccucaugcaggggccaaaggauuuuauaagaaucugaucuggcucgugaaaaagggcaacaguuacccaaaauuaagcaagucuuauauaaaugacaagggcaaagaaguacugguucuuugggggauccaccaccccuccacgacugcugaucaacagucauuguaccagaacgccgacaccuacguguucgucggaacaagccgcuauaguaagaaauuuaagccugagauugcgauccgaccaaaagugcgugaucaggaggguagaaugaauuacuauuggacucugguggaacccggcgacaagauuaccuucgaggcaacagggaaccuagucguuccuagguacgccuuugcuauggaucggaacgccggaucuggcaucauaauuuccgacaccccagugcaugacugcaauacgacuugucaaacaccgaaaggugcaaucaacaccagccuccccuuccagaauauucacccuaucacuaucgggaagugcccaaaguauguaaaaucgacaaagcugcgccuugcuaccggacugagaaacgugcccucuauucaguccaggggcuuguuuggcgccauagcgggguucaucgaaggagguuggacgggcauggucgaugggugguacggauaucaucaccagaaugagcaaggcucagguuacgccgcagaccucaaaaguacccagaacgcuauugauaagaucacaaauaaagugaacagcguuauagaaaagaugaauacucaguuuaccgccguggggaaggaguucaaccaccuggagaaacggauugaaaauuuaaacaagaaagucgacgauggcuuccuggacaucuggacauacaaugcugagcuccuugugcuguuggaaaacgagcgcacucuagauuaucaugacuccaauguaaagaaccuguacgaaaaaguucgaaaccagcucaagaauaacgccaaggagaucggaaauggcuguuuugaguucuaucacaaaugcgauaacaccuguauggaaucugugaagaaugggacauacgacuauccuaaauacagcgaggaagcaaagcugaacagagaggaaauugauggagucaaacuugagucaaccaggaucuaucaaauucuggccauauacaguacuguggcuuccagcuugguccucgugguuucucugggugcgaucucauuuuggaugugcaguaauggcagcuuacagugccggauuuguaucuga

SEQ ID NO: 134875 - RNA, 1701 nt, Artificial Sequence
  derived and/or modified CDS sequence (opt3) from hemagglutinin__InfluenzaA__AEH59413
augaaggccauccuggugguccuccuuuacaccuucgcuauugcaaacgccgacacacugugcauaggcuaucacgcgaauaacagcacugauacgguugacaccguguuggagaaaaauguaacagugacucauuccgucaacuuacuggaagauaagcacaaugggaaacuauguaagcucagaggaguggcuccccugcaucuugguaaaugcaacaucgccggcuggauucuggggaauccugagugugaaucuuugucaaccgcaaguagcugguccuacaucguugagacaucuucgucagacaacggaaccugcuauccaggcgauuuuauuaauuacgaagaacucagggagcagcugagcaguguguccucuuucgaacgguuugagaucuucccgaagacuagcuccuggcccaaccacgacucaaauaagggugucacagccgcuuguccucaugcaggggccaaaaguuuuuauaagaaccugauauggcucgugaaaaagggaaauagcuacccaaaauuaucuaaguccuauaucaacgauaagggcaaagaaguacugguucuuuggggcauucaccaccccucaaccagcgcugaccaacagaguuuguaccagaaugccgaugcguacguguucgucgggacgucuaaguauuccaaaaaguuuaaaccugagaucgcagugcgcccaaaggugcgagaccaggagggacguaugaacuacuauuggacucuggucgaacccggugauaaaauuaccuucgaggccacaggcaaccuacucguuccuagauacgcuuuugccauggaaaggaaugcagggagcggaaucauaauuucggacacuccagugcaugauugcaacaccacaugucaaaccccggagggcgcuaucaauacgucucugcccuuccagaacauucacccuaucacuaucgguaagugcccaaaguauguaaaauccacaaaacuucggcuggccaccggguugcgcaaugugcccucaauucagaguagaggacucuuuggcgcgauagccggcuucaucgaagggggauggacugguauggucgacggcugguacggguaucaucaccagaacgagcaaggaagcggcuacgcagcugaccugaaguccacacagaaugccauugauaagaucaccaacaaaguuaauucugugauagagaagaugaacacgcaguuuaccgcuguggguaaggaguucaaucacuuagagaaaaggauugaaaaccugaauaagaaagucgacgauggguuccucgacaucuggacauacaacgccgagcuucugguguugcuagaaaaugagcggacucuggauuaucaugacagcaacguaaagaaccucuacgagaaaguucgcucacagcugaagaauaacgcaaaggaaaucggcaauggauguuuugaguucuaucacaaaugcgauaacaccuguauggaaagugugaagaauggcacauacgacuauccuaaauacuccgaggaagccaaacuuaaccgagaggagauugauggggucaagcuggaaagcacuagaaucuaucaaauuuuggcuauauacucuaccguggcgucaagucucguccuggugguuagcuuaggagcaaucuccuuuuggaugugcucuaaugguucgcugcagugcaggauuuguaucuga

SEQ ID NO: 134876 - RNA, 1701 nt, Artificial Sequence
  derived and/or modified CDS sequence (opt3) from hemagglutinin__InfluenzaA__AEH59585
augaaggccauccuggugguccuccuuuacaccuucgcuacagcaaacgccgacacucugugcauuggcuaucacgcgaauaacagcacggauaccguugacacaguguuggagaagaauguaacugugacccauuccgucaacuuacuggaagauaagcacaaugggaaacuauguaagcucagaggaguggcuccccugcaucuugguaaaugcaacauagccggcuggauccuggggaauccugagugugaaucuuugucaacagcaaguagcugguccuacauuguugagaccucuucgucagacaacggaacuugcuauccaggcgauuuuaucgacuacgaggagcucagggagcagcugagcaguguguccucuuucgaacgguuugagauuuucccgaagacaagcuccuggcccaaucacgauccuaacaagggugucaccgccgcuuguccacaugcaggggccaaaucauuuuauaagaaucugaucuggcucgugaaaaagggaaacaguuaccccaaauuaagcaagucuuauauaaaugacaagggcaaagaaguacugguucuuuggggcauccaccacccuuccacgucagcugaucaacagagcuuguaccagaacgccgacgcguacguguucgucgggaccagucgcuauucuaagaaauuuaagccagagauugcaauccgacccaaagugcgugaucaggagggaagaaugaauuacuauuggacucugguggaaccuggugacaagauuacauucgaggccacuggcaaccuagucguuccaagguacgcuuuugccauggaacggaacgcaggguccggaaucauaauuagcgauaccccggugcaugacugcaauacaaccugucaaacgcccaaaggcgcuaucaacacuucgcucccuuuccagaauauucacccaaucacaaucgguaagugccccaaguauguaaaaucuaccaagcugcgccuugccacugggcugagaaacgugccuuccauucagucaaggggauuguuuggcgcgauagccggcuucaucgaagggggauggacagguauggucgacggcugguacggguaucaucaccagaaugaacaaggaaguggcuacgcagcugaucucaaaagcacccagaacgccauugacgagaucacgaauaaggugaacuccguuauagagaaaaugaauacccaguuuacaguggucgguaaggaguucaaccaccuggaaaagcggauugaaaauuuaaacaaaaagguggaugacggguuccuggauaucuggacuuacaaugcugagcuccuuguacuguuggaaaacgagcgcacccuagacuaucaugauucuaauguuaaaaaccuguacgagaaggugcgaagccagcucaaaaacaaugccaaggaaaucggcaacggauguuuugaguucuaucacaagugcgacaauacauguauggaaucagucaaaaacggcacuuacgauuauccaaaguacagugaggaagcaaaacugaauagagaggagauugacggggugaaacuugaauccaccaggaucuaucaaauucuggccauauacagcacagucgcuucuucauuggugcucguugugagucugggagcgaucagcuuuuggaugugcuccaacgguucuuuacagugccggauuuguaucuga

SEQ ID NO: 134877 - RNA, 1701 nt, Artificial Sequence
  derived and/or modified CDS sequence (opt3) from hemagglutinin__InfluenzaA__AEH59587
augaaggccauccuggugguccuccuuuacaccuucgcuacagcaaacgccgacacucugugcauuggcuaucacgcgaauaacagcacggauaccguugacacaguguuggagaaaaauguaacugugacccauuccgucaacuuacuggaagauaagcacaaugggaaacuauguaagcucagaggaguggcuccccugcaucuugguaaaugcaacauagccggcuggauccuggggaauccugagugugaaucuuugucaacagcaaguagcugguccuacauuguugagaccucuucgucagacaacggaacuugcuauccaggcgauuuuaucgacuacgaagaacucagggagcagcugagcaguguguccucuuucgaacgguuugagauuuucccgaagacaagcuccuggcccaaucacgaaucaaacaagggugucaccgccgcuuguccucaugcaggggccaaaaguuuuuauaagaaucugaucuggcucgugaaaaagggaaacagcuacccaaaauuaucuaaguccuauauaaaugauaagggcaaagagguacugguucuuuggggcauccaccaccccucaacgagcgcugaccaacagaguuuguaccagaacgccgaugcguacguguucgucgggacuucucgcuauuccaagaaauuuaagccugagauugcaauccgaccaaaagugcgugaccaggaaggaagaaugaauuacuauuggacccugguggagcccggugauaagauuacauucgaagccacuggcaaccuagucguuccuagguacgcuuuugccauggagcggaacgcagggagcggaaucauaauuucggacaccccagugcaugauugcaauacaaccugucaaacgccgaaaggcgcuaucaacacuucucuccccuuccagaauauucacccuaucacaaucgguaagugcccaaaguauguaaaauccaccaagcugcgccuugccacugggcugagaaacgugcccuuuauucagucaaggggauuguucggcgcgauagccggcuuuaucgaagggggauggacagguauggucgacggcugguacggguaucaucaccagaaugagcaaggaaguggcuacgcagcugaccucaaaagcacccagaacgccauugauaagaucacgaauaaagugaacuccguuauagagaagaugaauacccaguucacaguggucgguaaggaguucaacccucuggagaaacggauugaaaauuuaaacaagaaaguggacgauggguuucuggacaucuggacuuacaaugcugagcuccuuguacuguuggaaaacgagcgcacccuagauuaucacgacucuaauguuaagaaccuguacgagaaagugcgaagccagcucaagaacaaugccaaggaaaucggcaacggauguuucgaguuuuaucauaaaugcgauaauacauguauggaaucagucaagaacggcacuuacgacuauccaaaauacagugaggaagcaaagcugaauagagaggagauugauggggugaaacuugaauccaccaggaucuaucaaauucuggccauauacagcacagucgcuucuucauuggugcucguugugagucugggagcgaucagcuucuggaugugcuccaacgguucuuuacagugccggauuuguaucuga

SEQ ID NO: 134878 - RNA, 1701 nt, Artificial Sequence; identical to SEQ ID NO: 131881
  derived and/or modified CDS sequence (opt3) from hemagglutinin__InfluenzaA__AEH59589

SEQ ID NO: 134879 - RNA, 1701 nt, Artificial Sequence
  derived and/or modified CDS sequence (opt3) from hemagglutinin__InfluenzaA__AEH59591
augaaggccauccuggugguccuccuuuacaccuucgcuacagcaaacgccgacacucugugcauuggcuaucacgcgaauaacagcacggauaccguugacacaguguuggagaaaaauguaacugugacccauuccgucaacuuacuggaagauaagcacaaugggaaacuauguaagcucagaggaguggcuccccugcaucuugguaaaugcaacauagccggcuggauccuggggaauccugagugugaaucuuugucaacagcaaguagcugguccuacauuguugagaccucuucgucagacaacggaacuugcuauccaggcgauuuuaucgacuacgaggagcucagggagcagcugagcaguguguccucuuucgaacgguuugagauuuucccgaagacaagcuccuggcccaaucacgauucaaacaagggugucaccgccgcuuguccucaugcaggggccaaaaguuuuuauaagaaucugaucuggcucgugaaaaagggaaacagcuacccaaaauuaucuaaguccuauauaaaugacaagggcaaagaaguacugguucuuuggggcauccaccaccccucaacgagcgcugaucaacagaguuuguaccagaacgccgacgcguacguguucgucgggacuucucgcuauuccaagaaauuuaagccugagauugcaauccgaccaaaagugcgugaucaggagggaagaaugaauuacuauuggacccugguggaacccggugacaagauuacauucgaggccacuggcaaccuagucguuccuagguacgcuuuugccauggaacggaacgcagggagcggaaucauaauuucggauaccccagugcaugacugcaauacaaccugucaaacgccgaaaggcgcuaucaacacuucucuccccuuccagaauauucacccuaucacaaucgguaagugcccaaaguauguaaaauccaccaagcugcgccuugccacugggcugagaaacgugcccucaauucagaguaggggauuguuuggcgcgauagccggcuucaucgaagggggauggacagguauggucgacggcugguacggguaucaucaccagaaugaacaaggaagcggcuacgcagcugaucucaaauccacccagaacgccauugacaagaucacgaauaaagugaacucuguuauagagaagaugaauacccaguuuacaguggucgguaaggaguucaaccaccuggaaaaacggauugagaauuuaaacaagaaaguggaugacggguuccuggauaucuggacuuacaaugcugaacuccuuguacuguuggagaacgaacgcacccuagacuaucaugauagcaauguuaagaaccuguacgagaaagugcgaucacagcucaagaacaaugccaaggagaucggcaacggauguuuugaguucuaucacaaaugcgacaauacauguauggaaagugucaagaacggcacuuacgauuauccuaaauacuccgaagaggcaaagcugaauagagaagagauugacggggugaaacuugagagcaccaggaucuaucaaauucuggccauauacucuacagucgcuucaaguuuggugcucguugugagccugggagcgaucuccuuuuggaugugcucuaacgguucguuacagugccggauuuguaucuga

SEQ ID NO: 134880 - RNA, 1701 nt, Artificial Sequence
  derived and/or modified CDS sequence (opt3) from hemagglutinin__InfluenzaA__AEH59593
augaaggccauccuggugguccuccuuuacaccuucgcuacagcaaacgccgacacucugugcauuggcuaucacgcgaauaacagcacggauaccguugacacaguguuggagaaaaauguaacugugacccauuccgucaacuuacuggaagauaagcacaaugggaaacuauguaagcucagaggaguggcuccccugcaucuugguaaaugcaacauagccggcuggauccuggggaauccugagugugaaucuuugucaacagcaaguagcugguccuacauuguugagaccucuucgucagacaacggaacuugcuauccaggcgauuuuaucgacuacgaagaacucagggagcagcugagcaguguguccucuuucgaacgguuugagauuuucccgaagacaagcuccuggcccaaucacgaaucaaacaagggugucaccgccgcuuguccucaugcaggggccaaaaguuuuuauaagaaucugaucuggcucgugaaaaagggaaacagcuacccaaaauuaucuaaguccuauauaaaugauaagggcaaagagguacugguucuuuggggcauccaccaccccucaacgagcgcugaccaacagaguauuuaccagaacgccgaugcguacguguucgucgggacuucucgcuauuccaagaaauuuaagccugagaucgcaauucgaccaaaagugcgugaccaggaaggaagaaugaauuacuauuggaccuugguggagcccggugauaagaucacauucgaagccacuggcaaccuggucguuccuagguacgcuuuugccauggagcggaacgcagggagcggaauaauuaucucggacaccccagugcaugauugcaauacaaccugucaaacgccgaaaggcgcuauuaacacuucucuacccuuccagaauauccacccuaucacaauugguaagugcccaaaguauguaaaauccaccaagcuccgccuggccacugggcuuagaaacgugcccucaauacagaguaggggacuguuuggcgcgaucgccggcuucauugaagggggauggacagguauggucgacggcugguacggguaucaucaccagaaugagcaaggaagcggcuacgcagcugacuugaaauccacccagaacgccaucgauaagauaacgaauaaagugaacucuguuauugagaagaugaauacccaguuuacagcuguggguaaggaguucaaccaccucgagaaacggaucgaaaaucugaacaagaaagucgacgauggguucuuagacaucuggacuuacaaugccgagcugcucgugcuucuggaaaacgagcgcaccuuggauuaucaugacagcaauguaaagaaccuauacgagaaaguucgaucacagcugaagaacaaugcaaaggaaauuggcaacggauguuuugaguucuaucacaaaugcgauaauacauguauggaaagugugaagaacggcacuuacgacuauccuaaauacuccgaggaagccaagcucaauagagaggagaucgauggggucaaacuggaaagcaccaggauuuaucaaauacuugcuaucuacucuacaguggcgucaagucuggucuuggugguuagccucggagcaauuuccuuuuggaugugcucuaacgguucgcugcagugccggaucuguaucuga

SEQ ID NO: 134881 - RNA, 1701 nt, Artificial Sequence; identical to SEQ ID NO: 131515
  derived and/or modified CDS sequence (opt3) from hemagglutinin__InfluenzaA__AEH59595

SEQ ID NO: 134882 - RNA, 1701 nt, Artificial Sequence; identical to SEQ ID NO: 131881
  derived and/or modified CDS sequence (opt3) from hemagglutinin__InfluenzaA__AEH59597

SEQ ID NO: 134883 - RNA, 1701 nt, Artificial Sequence; identical to SEQ ID NO: 134876
  derived and/or modified CDS sequence (opt3) from hemagglutinin__InfluenzaA__AEH59599

SEQ ID NO: 134884 - RNA, 1701 nt, Artificial Sequence
  derived and/or modified CDS sequence (opt3) from hemagglutinin__InfluenzaA__AEH59601
augaaggccauccuggugguccuccuuuacaccuucgcuacagcaaacgccgacacucugugcauuggcuaucacgcgaauaacagcacggauaccguugacacaguguuggagaagaauguaacugugacccauuccgucaacuuacuggaagauaagcacaaugggaaacuauguaagcucagaggaguggcuccccugcaucuugguaacugcaauauagccggcuggauccuggggaacccugagugugaaucuuugucaacagcaaguagcugguccuacauuguugagaccucuucgucagacaauggaacuugcuauccaggcgauuuuaucgacuacgaggagcucagggagcagcugagcaguguguccucuuucgaacgguuugagauuuucccgaaaacaagcuccuggcccaaccacgauucaaauaagggugucaccgccgcuuguccucaugcaggggccaagaguuuuuauaaaaaccugaucuggcucgugaagaaaggaaauagcuacccaaaguuaucuaaauccuauauaaacgacaagggcaaggaaguacugguucuuuggggcauccaccaccccucaacgagcgcugaucaacagaguuuguaccagaaugccgacgcguacguguucgucgggacuucucgcuauuccaaaaaguuuaaaccugagauugcaauccgaccaaaggugcgugaucaggagggaagaaugaacuacuauuggacccugguggaacccggugacaaaauuacauucgaggccacuggcaaccuagucguuccuagguacgcuuuugccauggaacggaaugcagggagcggaaucauaauuucggauaccccagugcaugacugcaacacaaccugucaaacgccgaagggcgcuaucaauacuucucuccccuuccagaacauucacccuaucacaaucgguaaaugcccaaaguauguaaaguccaccaaacugcgccuugccacugggcugagaaaugugcccucaauucagaguaggggauuguuuggcgcgauagccggcuucaucgaagggggauggacagguauggucgacggcugguacggguaucaucaccagaacgaacaaggaagcggcuacgcagcugaucucaaguccacccagaaugccauugacaaaaucacgaacaagguuaauucugugauagagaaaaugaacacccaguuuacaguggucgguaaggaguucaaucaccuggaaaagcggauugagaacuuaaauaaaaagguggaugacggguuccuggauaucuggacuuacaacgcugaacuccuuguacuguuggagaaugaacgcacccuagacuaucaugauagcaacguuaaaaaccuguacgagaaggugcgaucacagcucaaaaauaacgccaaggagaucggcaauggauguuuugaguucuaucacaagugcgacaacacauguauggaaagugucaaaaauggcacuuacgauuauccuaaguacuccgaagaggcaaaacugaacagagaagagauugacggggugaaacuugagagcaccaggaucuaucaaauucuggccauauacucuacagucgcuucaaguuuggugcucguugugagccugggagcgaucuccuuuuggaugugcucuaaugguucguuacagugccggauuuguaucuga

SEQ ID NO: 134885 - RNA, 1701 nt, Artificial Sequence; identical to SEQ ID NO: 131515
  derived and/or modified CDS sequence (opt3) from hemagglutinin__InfluenzaA__AEH59604

SEQ ID NO: 134886 - RNA, 1701 nt, Artificial Sequence; identical to SEQ ID NO: 131515
  derived and/or modified CDS sequence (opt3) from hemagglutinin__InfluenzaA__AEH59614

SEQ ID NO: 134887 - RNA, 1701 nt, Artificial Sequence
  derived and/or modified CDS sequence (opt3) from hemagglutinin__InfluenzaA__AEH59624
augaaggccauccuggugguccuccuuuacaccuucgcuacagcaaacgccgacacucugugcauuggcuaucacgcgaauaacagcacggauaccguugacacaguguuggagaaaaauguaacugugacccauuccgucaacuuacuggaagauaagcacaaugggaaacuauguaagcucagaggaguggcuccccugcaucuugguaaaugcaacauagccggcuggauccuggggaauccugagugugaaucuuugucaacagcaaguagcugguccuacauuguugagaccucuucgucagacaacggaacuugcuauccaggcgauuuuaucgacuacgaggagcucagggagcagcugagcaguguguccucuuucgaacgguuugagauuuucccgaagacaagcuccuggcccaaucacgauccuaacaagggugucaccgccgcuuguccacaugcaggggccaaaucauuuuauaagaaucugaucuggcucgugaaaaagggaaacaguuaccccaaauuaagcaagucuuauauaaaugacaagggcaaagaaguacugguucuuuggggcauccaccacccuuccacgucagcugaucaacagagcuucuaccagaacgccgacgcguacguguuugucgggaccagucgcuauucuaagaaauucaagccagagauugcaauccgacccaaagugcgugaucaggagggaagaaugaauuacuauuggacuuugguggaaccuggugacaagauuacauuugaggccacuggcaaccuggucguuccaagguacgcuuucgccauggaacggaacgcaggguccggaaucauaauuagcgauaccccggugcaugacugcaauacaaccugucaaacgcccaaaggcgcuaucaacacuucgcuaccuuuucagaauauucacccaaucacaaucgguaagugccccaaguauguaaaaucuaccaagcuccgccuggccacugggcuuagaaacgugccuuccauucagucaaggggacuguucggcgcgauagccggcuuuaucgaagggggauggacagguauggucgacggcugguacggguaucaucaccagaaugaacaaggaaguggcuacgcagcugauuugaaaagcacccagaacgccauugacgagaucacgaauaaggugaacuccguuauagagaaaaugaauacccaguucacagcuguggguaaggaguucaaccaccucgaaaagcggauugaaaaucugaacaaaaaggucgaugacggguuuuuagauaucuggacuuacaaugccgagcugcucgugcuucuggaaaacgagcgcaccuuggacuaucaugauucuaauguuaaaaaccuauacgagaagguacgaagccagcugaaaaacaaugcaaaggaaaucggcaacggauguuucgaguuuuaucacaagugcgacaauacauguauggaaucagugaaaaacggcacuuacgauuauccaaaguacagugaggaagccaaacucaauagagaggagauugacggggucaagcuggaauccaccaggaucuaucaaauucuugcuauauacagcacaguggcgucuucacuggucuuggugguuagucucggagcaaucagcuucuggaugugcuccaacgguucucugcagugccggauuuguaucuga

SEQ ID NO: 134888 - RNA, 1698 nt, Artificial Sequence
  derived and/or modified CDS sequence (opt3) from hemagglutinin__InfluenzaA__AEH77259
augaaggugaaacugcucguccuucugugcaccuucacagccacuuacgcugacacgaucuguauuggcuaucacgcaaacaauagcaccgauacaguugacacuguguuggagaagaacguaaccgugacacauuccgucaauuuacuggaaaacucucacaaugggaaacuaugccuccugaagggaauagcgccccuucagcuggguaacuguucaguggccggcuggaucuuggggaauccugagugcgaacuccugauuaguaaagagagcugguccuacaucguugaaaagccaaacccggagaauggaaccuguuaucccggccauuuugcugauuacgaggaacugagagagcaacucucuucggugagcagcuucgaaagguuugagauguucccuaaggagaguuccuggccaaaccacacugucacaggugugucugccagcugcucccauaauggggaaucaaguuuuuaucggaacuuacuguggcuuaccgagaaaaauggauuguaccccaaccugagcaagucuuaugcaaauaacaaagaaaaggaggugcuaguucucuggggcgugcaccacccuccauccauuucagaccagaaaacgcuguaccauacugaaaacgccuacgucagcguggugaguucucacuauucccgcaaguucacccccgagaucgcuaagcgaccuaaaguccgugaucaggagggcagaauaaauuacuauuggacacuucuggaaccaggggacacuaucauuuuugaggcaaacggaaauuugaucgccccgagguacgcuuucgcccucagccgggguuuuggcucggggauuaucaacucuaaugcgcccauggauaagugugacgcaaaaugccagaccccucaaggagccauaaacuccucacugccauuccagaauguucaucccgugacaauuggcgaauguccuaaguauguacgcagugcuaaauuaagaauggugaccggucugaggaacaucccaagcauucagucccgggggcucuuuggagccaucgcaggcuucaucgagggcggguggacgggaauggucgaugguugguacggcuaucaccaccagaaugaacaagggucuggauacgcugccgaccagaagucaacucagaacgcgauuaauggcauaacaaacaaaguaaauucaguuaucgagaagaugaacacccaguuuacugccguggguaaggaguucaauaaacuugaacgccgaauggagaaccugaacaagaaagucgaugacggguucauugauaucuggacauacaaugcagaauugcuagugcugcucgagaacgaaagaacccuggacuuucaugacaguaauguaaagaaccuuuaugagaaaguuaagaaucaacugaagaacaaugcuaaagagauaggcaacggaugcuucgaauuuuaccacaaguguaaugaugagugcauggaauccgugaaaaacggcacguaugacuaccccaaguauagcgaggagucuaaauugaauagggaaaagauugauggggucaagcucgagucaaugggaguguaccagauccuggccaucuauaguaccgucgcuagcuccuuaguguuccugguuucucuaggugccauuucguuuuggaugugcagcaacggcucccuccagugucggaucugcauuuga

SEQ ID NO: 134889 - RNA, 1701 nt, Artificial Sequence; identical to SEQ ID NO: 130704
  derived and/or modified CDS sequence (opt3) from hemagglutinin__InfluenzaA__AEH77270

SEQ ID NO: 134890 - RNA, 1701 nt, Artificial Sequence; identical to SEQ ID NO: 128080
  derived and/or modified CDS sequence (opt3) from hemagglutinin__InfluenzaA__AEH77279

SEQ ID NO: 134891 - RNA, 1701 nt, Artificial Sequence; identical to SEQ ID NO: 131819
  derived and/or modified CDS sequence (opt3) from hemagglutinin__InfluenzaA__AEI29215

SEQ ID NO: 134892 - RNA, 1701 nt, Artificial Sequence; identical to SEQ ID NO: 130717
  derived and/or modified CDS sequence (opt3) from hemagglutinin__InfluenzaA__AEI29225

SEQ ID NO: 134893 - RNA, 1701 nt, Artificial Sequence
  derived and/or modified CDS sequence (opt3) from hemagglutinin__InfluenzaA__AEI29591
augaagaccaucauugcccugagcuacauauucugccucguguuugcucaggaccuucccggcaacgauaauuccacagcaacucuguguuuggggcaccaugccgucccuaacggaacguuaguuaaaaccaucacaaaugaccaaauugaggugacuaacgcgaccgaacugguacagucuucaaguacagguaagaucugcgauaauccacacagaauacuagacggcaucaacuguacccucauagaugcucugcuuggggacccgcauugcgauggauuccagaaugagaaaugggaccuguuuguggaaaggagcaaggccuucuccaacuguuaucccuacgaugucccugacuaugcaucuuugcggucgcucguggccucaagcggcacucuggaguuuaucaaugaagguuucaacuggacagggguuacccagaauggaggcaguuccgcuugcaaacgcggcccagauaacggguuuuucucucgacugaauuggcucuacaagagcggauccacguaucccgugcaaaacgucacuaugccuaauaacgacaacucagauaaguuauacauuuggggugugcaccauccaaguaccgacaaagagcagacaaaucuguauguacaggcaagcggcaagguuacugugucuaccaaacguucccagcaaacagucauccccaacguggggucaagaccuugggugaggggacuuagcagucgggucucuauuuacuggaccaucguuaagccaggcgacauauuggugauuaauuccaacgguaaucugaucgccccgcgcggguacuauaaaaugagaacgggaaagagcucgauuaugaggucugaugcucccaucggcacuuguuccucagagugcaucacaccuaacggcaguauuccaaaugacaagcccuuucagaacguaaauaaaauaaccuacggggccuguccuaaguaugugaaacagaacacucuaaagcucgcgacaggaaugcggaaugucccagaaaaacagacccgcgguaucuucggcgcaauugccggguuuaucgagaacggaugggaaggcaugauagaugguugguacggguuccgacaccaaaauagcgagggcacgggacaggcugccgaccugaaguccacccaggcagcuauugaucaaaucaacggcaaacuuaauagagugaucgagaagacaaacgaaaaguuucaccagauugagaaagaguucucugaaguugaagggaggauccaggaccuggagaaguauguggaggauacuaaaauugacuuguggagcuacaacgccgaacuccuggucgcguuagagaaucagcauaccauagaucugacagacucagaaaugaacaaacucuucgagaagacucggcgucaacuucgcgaaaaugccgaggauaugggaaacgguugcuuuaagaucuaucacaagugugacaaugcaugcauuggcaguaucagaaacgggaccuacgaccaugauguguacagggacgaggcucugaauaaccgguuccagaucaaaggaguagaauugaaguccggcuauaaagauuggauucuauggauuagcuuugccaucucuugcuuccugcucuguguugugcugcuugguuuuauuaugugggcuugccagaaggggaauauccgauguaacauuugcaucuga

SEQ ID NO: 134894 - RNA, 1701 nt, Artificial Sequence; identical to SEQ ID NO: 128080
  derived and/or modified CDS sequence (opt3) from hemagglutinin__InfluenzaA__AEI54347

SEQ ID NO: 134895 - RNA, 1701 nt, Artificial Sequence; identical to SEQ ID NO: 128166
  derived and/or modified CDS sequence (opt3) from hemagglutinin__InfluenzaA__AEI54358

SEQ ID NO: 134896 - RNA, 1701 nt, Artificial Sequence; identical to SEQ ID NO: 128681
  derived and/or modified CDS sequence (opt3) from hemagglutinin__InfluenzaA__AEI54369

SEQ ID NO: 134897 - RNA, 1701 nt, Artificial Sequence; identical to SEQ ID NO: 128564
  derived and/or modified CDS sequence (opt3) from hemagglutinin__InfluenzaA__AEI54380

SEQ ID NO: 134898 - RNA, 1701 nt, Artificial Sequence; identical to SEQ ID NO: 134827
  derived and/or modified CDS sequence (opt3) from hemagglutinin__InfluenzaA__AEI54391

SEQ ID NO: 134899 - RNA, 1701 nt, Artificial Sequence
  derived and/or modified CDS sequence (opt3) from hemagglutinin__InfluenzaA__AEI54402
augaagaccaucauugcccugagcuacauacucugccuuguguucgcucagaaacugcccggcaacgacaauuccacagcaacuuuguguuuagggcaccaugccgucccuaacggaacgaucguuaagaccauuacaaaugaucaaaucgaggugacuaacgcgaccgaacugguacagucuucaaguacaggugagauuugcuauagcccacaccagauccuagacggcgaaaauuguacccucauagaugcucugcuuggggacccgcagugcgauggauuucaaaacaaaaagugggaccuguucguggagagauccaaagccuacucuaauuguuaucccuacgaugucccugacuaugcaucguugaggucacucguggccagcaguggcacucuggaauuuaacaaugaguccuucaacuggacagguguuacccagaaugggacgucuagcgcuugcauccggcgcuccaacaauucauuuuucagucgacugaacuggcucacucauuuaaaguuuaaguacccagcacugaaugugaccaugcccaacaacgagaaauucgauaaacuuuauauuuggggaguccaccauccuggcacagacaaugaucagaucuuuuuguacgcccaggcuagcggccguauuacugugucuaccaagagaucccaacagacaguaaucccaaacauagggucaaggccccggguucgcaauauuccuagcagaaucaguauuuacuggaccaucgugaagccaggagacauccugcuaauuaacucuacggguaaucucauagccccgaggggcuauuucaaaauccgguccggaaagagcucgauuaugcgcucugaugcgcccaucgggaaguguaacuccgaaugcauaacuccuaauggcucaauuccaaacgacaaacccuuucagaaugucaaccgaaucacauacggugcauguccuagauaugugaagcagaauacccugaaacuugccacugggaugaggaacgugccagagaagcaaacacggggaaucuucggcgcuauugccggcuuuaucgaaaaugggugggagggaauggucgacgguugguacggcuuccgucaccagaacagugaggggauuggacaggcagcugaucugaaaagcacccaagccgcgauagaccagaucaauggcaaguugaaccgccucauugguaaaacgaacgaaaaguuccaccagaucgagaaggaauuuuccgagguugaagggagaauccaggaucuggagaaauauguggaggacaccaagauugauuuauggucuuacaaugccgaacugcucguagcacuugagaaccaacauacaauagaccugacugauagcgaaaugaauaaauuguucgagaagaccaaaaagcagcuaagggaaaacgcugaggacaugggcaauggaugcuuuaagaucuaucacaaaugugauaacgccugcauuggcucaauccggaaugggacauacgaccaugauguguaccgagacgaggcucugaacaaucgcuuccagauuaagggagucgaacucaaaagugguuauaaggacuggauccuguggauauccuuugccaucagcugcuuccuucuguguguggcauugcucggcuuuauuaugugggccugccagaaagggaacaucagauguaauauuugcaucuga

SEQ ID NO: 134900 - RNA, 1701 nt, Artificial Sequence; identical to SEQ ID NO: 129976
  derived and/or modified CDS sequence (opt3) from hemagglutinin__InfluenzaA__AEI54413

SEQ ID NO: 134901 - RNA, 1701 nt, Artificial Sequence; identical to SEQ ID NO: 128329
  derived and/or modified CDS sequence (opt3) from hemagglutinin__InfluenzaA__AEI54424

SEQ ID NO: 134902 - RNA, 1701 nt, Artificial Sequence
  derived and/or modified CDS sequence (opt3) from hemagglutinin__InfluenzaA__AEI54446
augaagaccaucauugcccugagcuacauacucugccuuguguucgcucagaaacugcccgagaacgacaauuccacagcaacuuuguguuuaggccaccaugccgucccuaacgggacgaucguuaagaccauuacaaaugaucaaaucgaagugacuaacgcgaccgagcugguacagucuucaaguacaggagaaauuugcaauagcccacaccagauccuagacggugagaacuguacccucauagaugcucugcuuggcgacccgcagugcgauggguuucaaaauaaaaagugggaccuguucguggaaagauccaaagcccauucuaacuguuaucccuacgaugucccugacuaugcaucguugaggucacucguggccagcaguggaacucuggaguuuaauaacgaguccuucaauuggacaggcguuacccagaacgguacgucuagcgcuugcauccggcgcuccaauaacucauuuuucagucgacugaauuggcucacucacuuaaacuuuaaguacccagcacugaacgugaccaugcccaauaacgaacaguucgauaaacuuuauauuuggggaguccaucacccugggacagacaaggaucagaucuuuuuguacgcccaagcugccggccguauuacugugagcaccaagagaucucagcaggcgguaaucccaaauauaggcuccaggccccggguucgcaacauuccuucaagagugagcaucuauuggacaauugucaaaccaggggacauccugcuaaucaauaguaccggaaaccucauugcaccgagggguuacuucaagauacggucuggcaaauccagcaucaugcgcucggaugcccccauugggaaguguaauucugcuugcaucacgccuaacggauccauaccaaaugacaagcccuuucagaacgugaaucgaauuacuuacggcgccuguccuagauaugugaaacaaaacacacugaaacuugcaaccgguaugaggaaugucccagagaagcagacucgggggaucuucggagcuaucgccggcuuuauugaaaacggcugggaggggaugguugacggaugguacgguuuccgucaccaaaauucagagggccgcgggcaggcggccgaucugaagaguacacaggcagcuaucgaccagauuaacggaaaauugaacagacucauaggcaagaccaaugaaaaauuccaucagaucgagaaggaauuuagcgagguggaagguaggauucaagaucuggagaaguauguagaggacacgaaaaucgauuuaugguccuacaacgccgaacugcucguggcucuugagaaucagcacaccaucgaccugacagauucugaaaugaacaaguuguucgagaaaacuaagaaacagcuacgggaaaaugccgaggacauggggaacggcugcuuuaagauuuaucauaagugugauaaugcaugcauaggaagcauccgaaacggcaccuacgaccacgaugucuaucgcgacgaggcccugaauaacagauuccagauuaaagggguggaacucaagucaggauacaaagacuggauccuguggauuaguuuugcuaucuccugcuuccuucuguguguugcguugcucgguuuuauaaugugggcaugccaaaagggcaauaucagguguaacauuugcaucuga

SEQ ID NO: 134903 - RNA, 1701 nt, Artificial Sequence
  derived and/or modified CDS sequence (opt3) from hemagglutinin__InfluenzaA__AEI54457
augaagaccaucauugcccugagcuacauacucugccuuguguucgcucagaaacugcccggcaacgacaauuccacagcaacuuuguguuuagggcaccaugccgucccuaacggaacgaucguuaagaccauuacaaaugaucaaaucgaggugacuaacgcgaccgaacugguacagucuucaaguacaggugagauuugcaauagcccacaccagauccuagacggcgaaaacuguacccucauagaugcucugcuuggggacccgcagugcgauggauuucaaaauaaaaagugggaccuguucguggagagauccaaagcccauucuaacuguuaucccuacgaugucccugacuaugcaucguugaggucacucguggccagcaguggcacucuggaauuuaauaacgaguccuucaauuggacagguguuacccagaacgggacgucuagcgcuugcauccggcgcuccaauaacucauuuuucagucgacugaauuggcucacucacuuaaacuuuaaguacccagcacugaacgugaccaugcccaauaacgagcaguucgauaaacuuuauauuuggggaguccaucacccuggcacagacaaagaucagaucuuuuuguacgcccaagcugccggccguauuacugugagcaccaagagaucucagcaggcgguaaucccaaauauaggguccaggccccggguucgcaacauuccuucaagagugagcaucuauuggacaauugucaaaccaggagacauccugcuaaucaauaguaccgguaaccucauugcaccgaggggcuacuucaagauacggucugggaaauccagcaucaugcgcucggaugcccccauuggaaaguguaauucugcuugcaucacgccuaacggcuccauaccaaaugacaagcccuuucagaacgugaaucgaauuacuuacggugccuguccuagauaugugaaacaaaacacacugaaacuugcaaccgggaugaggaaugucccagaaaagcagacucggggaaucuucggcgcuaucgccggcuuuauugagaacgggugggaaggaaugguugacgguugguacggcuuccgucaccaaaauucagaggggcgcggacaggcggccgaucugaagaguacacaggcagcuaucgaccagauuaacggcaaauugaacagacucauagguaagaccaaugagaaauuccaucagaucgaaaaggaguuuagcgaaguggaggggaggauucaagaucuggaaaaguauguagaggacacgaaaaucgauuuaugguccuacaacgccgagcugcucguggcucuugaaaaucagcacaccaucgaccugacagauucugagaugaacaaguuguucgaaaagacuaagaaacagcuacgggagaaugccgaagacaugggcaacggaugcuuuaagauuuaucauaagugugauaaugcaugcauaggcagcauccgaaacgggaccuacgaccacgaugucuaucgcgacgaggcccugaauaacagauuccagauuaaaggaguggagcucaagucagguuacaaagacuggauccuguggauuaguuuugcuaucuccugcuuccuucuguguguugcguugcucggcuuuauaaugugggcaugccaaaaggggaauaucagguguaacauuugcaucuga

SEQ ID NO: 134904 - RNA, 1701 nt, Artificial Sequence; identical to SEQ ID NO: 133581
  derived and/or modified CDS sequence (opt3) from hemagglutinin__InfluenzaA__AEI54468

SEQ ID NO: 134905 - RNA, 1701 nt, Artificial Sequence; identical to SEQ ID NO: 133581
  derived and/or modified CDS sequence (opt3) from hemagglutinin__InfluenzaA__AEI54479

SEQ ID NO: 134906 - RNA, 1701 nt, Artificial Sequence; identical to SEQ ID NO: 134903
  derived and/or modified CDS sequence (opt3) from hemagglutinin__InfluenzaA__AEI54490

SEQ ID NO: 134907 - RNA, 1701 nt, Artificial Sequence; identical to SEQ ID NO: 134902
  derived and/or modified CDS sequence (opt3) from hemagglutinin__InfluenzaA__AEI54501

SEQ ID NO: 134908 - RNA, 1701 nt, Artificial Sequence
  derived and/or modified CDS sequence (opt3) from hemagglutinin__InfluenzaA__AEI59979
augaagaccaucauugcccugagcuacauacucugccuuguguucgcucagaaacugcccggcaacgacaauuccacagcaacuuuguguuuagggcaccaugccgucccuaacggaacgaucguuaagaccauuacaaaugaucaaaucgaggugacuaacgcgaccgaacugguacagauuucuucaacaggugagaucugcgacaguccacaccagauacuagauggcgaaaauuguacccucaucgacgcucugcuuggggauccgcagugcgacggauuucaaaacaaaaagugggaucuguucguggagagaagcaaagccuauuccaauuguuaccccuaugacgucccugauuacgcaucuuugaggucgcucguggccucaagcggcacucuggaauuuaacaaugagaguuucaacuggacagguguuacccagaaugggacguccucugcuugcauucggcgcagcaacaauuccuuuuucucacgacugaacuggcucacucauuuaaaguuuaaguauccagcacugaaugugaccaugcccaacaacgagcaguucgacaaacuuuacaucuggggaguccaccauccuggcacagauaaugaccagaucuuuuuguaugcccaagcuaguggccguauuacugugagcaccaagagaucucagcagacaguaauaccaaacauuggguccaggccccggguucgcaauaucccuucaagaauuagcaucuacuggaccaucgugaaaccaggagauauucugcuaauaaacaguacggguaaucucaucgccccgaggggcuacuucaagauucggucugggaaauccagcaucaugcgcucggacgcgcccauaggaaaguguaacucugaaugcauuacuccuaauggcuccaucccaaacgacaagcccuuucagaaugucaaccgaaucacauauggugcauguccuagauacgugaaacaaaauacccugaaacuugccacugggaugaggaacgugccagagaaacagacacggggaauuuucggcgcuaucgccggcuuuauugaaaaugggugggagggaauggucgaugguugguauggcuuccgucaccagaacucagaggggcgcggacaagcagcugaccugaagaguacccaggccgcgauagaucagaucaauggcaaauugaacagacucauugaaaagacgaacgagaaauuccaccagaucgaaaaggaguuuagcgaaguugaggguaggauccaagaccuggagaaguacguggaagauaccaaaauugacuuaugguccuauaaugccgagcugcucguagcacuugaaaaccagcauacaauagaucugacugacucugagaugaauaaguuguucgaaaagaccaagaaacagcuacgggagaacgcugaggauauggggaauggcugcuuuaagaucuaccacaagugugacaacgccugcauuggaagcauccgaaauggcacauaugaucaugacguguaccgcgacgaagcucugaacaauagauuccagauuaaaggggucgagcucaagucaggauacaaagauuggauccuguggauaaguuuugccaucuccugcuuccuucuguguguggcauugcucgguuuuauuaugugggccugccaaaagggcaacaucagguguaauauuugcaucuga

SEQ ID NO: 134909 - RNA, 1698 nt, Artificial Sequence; identical to SEQ ID NO: 134005
  derived and/or modified CDS sequence (opt3) from hemagglutinin__InfluenzaA__AEI59990

SEQ ID NO: 134910 - RNA, 1698 nt, Artificial Sequence; identical to SEQ ID NO: 134007
  derived and/or modified CDS sequence (opt3) from hemagglutinin__InfluenzaA__AEI60001

SEQ ID NO: 134911 - RNA, 1701 nt, Artificial Sequence
  derived and/or modified CDS sequence (opt3) from hemagglutinin__InfluenzaA__AEI60012
augaagaccaucauugcccugagcuacauacucugccuuguguucgcucagaaacugcccggcaacgacaauuccacagcaacuuuguguuuagggcaccaugccgucccuaacggaacgaucguuaagaccauuacaaaugaucaaaucgaggugacuaacgcgaccgaacugguacagucuucaaguacaggugagauuugcgacagcccacaccagauccuagauggcgaaaauuguacccucauagacgcucugcuuggggauccgcagugcgacggauuucaaaacaaaaagugggaucuguucguggagagauccaaagccuauucuaauuguuaccccuaugacgucccugauuacgcaucguugaggucacucguggccagcaguggcacucuggaauuuaacaaugaguccuucaacuggacagguguuacccagaaugggacgucuagcgcuugcauccgguccucaaacaauagcuuuuucagucgccugaacuggcucacucauuuaaaguuuaaguauccagcacugaaugugaccaugcccaacaacgagcaguucgacaaacuuuacauuuggggaguccaccauccuggcacagauaaugaccagaucuuuuuguaugcccaggcuucuggccgaauuacuguguccaccaagcguucacaacagacaguaaucccaaacauagggagcagacccaggguucggaauauuccuagucgcaucucuauuuacuggaccaucgugaaaccaggagauauccugcuaauuaacuccacggguaaucucauagccccgagaggcuacuucaagaucaggagcgggaaaucgucuauuaugcgguccgacgcgcccaucggaaaguguaacucagaaugcauaacuccuaauggcaguauuccaaacgacaagcccuuucagaaugucaaccgcaucacauauggugcauguccucgauacgugaaacaaaauacccugaaacuugccacugggaugagaaacgugccagagaagcagacaaggggaaucuucggcgcuauugccggcuuuaucgaaaaugggugggagggaauggucgaugguugguauggcuuccggcaccagaacagcgaggggcguggacaagcagcugaccugaaguccacccaggccgcgauugaucagauaaauggcaaauugaaccgccucaucgguaagacgaacgaaaaauuccaccagauugagaaggaauuuucugagguugaagggaagauccaagaccuggagaaauacguggaggauaccaagaucgacuuauggagcuauaaugccgaacugcucguagcacuugagaaccagcauacaauugaucugacugacucagaaaugaauaaauuguucgagaagaccaaaaagcagcuaagagaaaacgcugaggauaugggcaauggaugcuuuaagauauaccacaaaugugacaacgccugcaucggcaguauuaggaaugggacauauaaccaugauguguaccgggacgaggcucugaauaaccgauuccagaucaagggagucgaacucaaauccgguuacaaggacuggauucuguggaucagcuuugccauaucuugcuuccuucuguguguggcauugcucggcuuuaucaugugggccugccaaaaagggaauauucgcuguaacaucugcauuuga

SEQ ID NO: 134912 - RNA, 1701 nt, Artificial Sequence; identical to SEQ ID NO: 130482
  derived and/or modified CDS sequence (opt3) from hemagglutinin__InfluenzaA__AEI60023

SEQ ID NO: 134913 - RNA, 1701 nt, Artificial Sequence
  derived and/or modified CDS sequence (opt3) from hemagglutinin__InfluenzaA__AEI60034
augaagaccaucauugcccugagcuacauacucugccuuguguucgcucagaaacugcccggcaacgacaauuccacagcaacuuuguguuuagggcaccaugccgucccuaacggaacgaucguuaagaccauuacaaaugaucaaaucgaggugacuaacgcgaccgaacugguacagucuucaaguacaggugagauuugcgacagcccacaccagauccuagauggcaaaaauuguacccucauagacgcucugcuuggggauccgcagugcgacggauuucaaaacaagaaaugggaucuguucguggaaagauccaaggccuauucuaauuguuaccccuaugacgucccugauuacgcaucguugaggucacucguggccagcaguggcacucuggaguuuaacaaugaauccuucaacuggacagguguuacccagaaugggacgucuagcgcuugcauccggcgcuccaacaauucauuuuucagucgacugaacuggcucacucauuuaaaguuuaaauauccagcacugaaugugaccaugcccaacaacgagcaguucgacaagcuguacauuuggggaguccaccauccuggcacagauaaagaccagaucuuuuuguaugcccaagcuagcggccguauuacugugucuaccaagagaucccagcagacaguaaucccaaauauagggucaaggccccggguucgcaacauuccuagcagaaucaguauuuacuggaccaucgugaaaccaggagauauccugcuaauuaauucuacggguaaccucauagccccgaggggcuacuucaagauccgguccggaaagagcucgauuaugcgcucugacgcgcccaucgggaaauguaauuccgagugcauaacuccuaacggcucaauuccaaaugacaagcccuuucagaacgucaaucgaaucacauauggugcauguccuagauacgugaaacaaaacacccugaaacuugccacugggaugaggaaugugccagaaaaacagacacggggaaucuucggcgcuauugccggcuuuaucgagaacgggugggaaggaauggucgaugguugguauggcuuccgucaccagaauagugaggggcgcggacaagcagcugaccuuaagagcacccaggccgcgauugaucagauaaacggcaaauugaauagacucaucgguaagacgaacgagaaguuccaccagauugaaaaagaguuuuccgaaguugaggggaggauccaagaccuggaaaaguacguggaggauaccaaaaucgacuuauggucuuauaacgccgagcugcucguagcacuugaaaaucagcauacaauugaucugacugacagcgagaugaacaaguuguucgaaaagaccaagaagcagcuacgggagaaugcugaagauaugggcaacggaugcuuuaaaauauaccacaagugugacaaugccugcaucggcucaauucgaaacgggacauaugaucaugacguguaccgcgacgaggcucugaauaacagauuccagaucaaaggagucgagcucaagagugguuacaaagauuggauucuguggaucuccuuugccauaagcugcuuccuucuguguguggcauugcucggcuuuaucaugugggccugccaaaaggggaauauuagguguaacaucugcauuuga

SEQ ID NO: 134914 - RNA, 1701 nt, Artificial Sequence
  derived and/or modified CDS sequence (opt3) from hemagglutinin__InfluenzaA__AEI60045
augaagaccaucauugcccugagcuacauacucugccuuguguucgcucagaaacugcccggcaacgacaauuccacagcaacuuuguguuuagggcaccaugccgucccuaacggaacgaucguuaagaccauuaugaaugaucaaaucgaggugacaaacgcgacugaacugguacagucuucaaguaccggugagauuugcgacagcccacaccagauccuagauggcaaaaauuguacacucauagacgcucugcuuggggauccgcagugcgacggauuucaaaacaagaaaugggaucuguucguggaaagauccaaggccuauucuaauuguuaccccuaugacgucccugauuacgcaucguugaggucacucguggccagcaguggcacccuggaguuuaacaaugaauccuucaacuggacugguguuacacagaaugggaccucuagcgcuugcauccggcgcuccaagaacucauuuuucagucgacugaauuggcucacgcauuuaaacuuuaaauauccagcacugaaugugacuaugcccaacaacgagcaguucgacaaacuuuacauuuggggaguccaccauccuggcaccgauaaagaccagaucuuuuuguaugcccaagcuagcggccguauuacagugucuacuaagagaucccagcagaccgccaucccaaauauaggguacaggccccggguacgcaacauuccuucaagaaucagcauuuacuggacaaucguuaaaccaggagauauccugcuaauuaauaguaccgguaaccucauagcgccgaggggcuauuucaagauccggucugggaaguccagcauuaugcgcucggacgcacccaucggaaaauguaauucugagugcauaacgccuaacggcuccauuccaaaugacaagcccuuucagaacgugaaucgaaucacuuacggugccuguccuagauaugucaaacaaaacacacugaaacuugcuaccgggaugaggaaugugccagaaaagcagacucggggaaucuucggcgccauugcaggcuuuaucgagaacgggugggaaggaaugguggaugguugguacggcuuccgucaccaaaauucagaggggcgcggacaggcugccgaccugaagaguacacaggcggccauugaucagauaaacggcaaauugaauagacucaucgguaagaccaacgagaaguuccaccagauugaaaaagaguuuagcgaagucgaggggaggauccaagaccuggaaaaguauguugaggauacgaaaaucgacuuaugguccuacaacgcagagcugcucguggcucuugaaaaucagcauaccauugaucugacagacucugagaugaacaaguuguucgaaaagacuaagaagcagcuacgggagaaugccgaagauaugggcaacggaugcuuuaaaauauaucacaagugugacaaugcuugcaucggcagcauucgaaacgggaccuacgaucaugacguauaccgcgacgaggcccugaauaacagauuccagaucaaaggaguggagcucaagucagguuauaaagauuggauucuguggaucaguuuugcaauauccugcuuccuucugugugucgccuugcucggcuuuaucaugugggcuugccaaaaggggaauauuagguguaacaucugcauuuga

SEQ ID NO: 134915 - RNA, 1701 nt, Artificial Sequence
  derived and/or modified CDS sequence (opt3) from hemagglutinin__InfluenzaA__AEI60086
augaaggccauccuggugguccuccuuuacaccuucgcuacagcaaacgccgacacucugugcauuggcuaucacgcgaauaacagcacggauaccguugacacaguguuggagaaaaauguaacugugacccauuccgucaacuuacuggaagauaagcacaaugggaaacuauguaagcucagaggaguggcuccccugcaucuugguaaaugcaacauagccggcuggauccuggggaauccugagugugaaucuuugucaacagcaaguagcugguccuacauuguugagaccucuucgucagacaacggaacuugcuauccaggcgauuuuaucaauuacgaggagcucagggagcagcugagcaguguguccucuuucgaacgguuugagauuuucccgaagacaagcuccuggcccaaccacgacucaaauaagggugucaccgccgcuuguccucaugcaggggccaaaaguuuuuauaagaaccugaucuggcucgugaaaaagggaaauagcuacccaaaauuaucuaaguccuauauaaacgauaagggcaaagaaguacugguucuuuggggcauccaccaccccucaacgacugcugaccaacagagcuuguaccagaaugccgaugcguacguguucgucgggaccagucgcuauucuaagaaauuuaagccugagauugcaauccgaccaaaagugcgugaccaggagggaagaaugaacuacuauuggacacugguggaacccggugauaagauuacuuucgaggccaccggcaaccuagucguuccuagguacgcuuuugccauggaacggaaugcaggguccggaaucauaauuagcgacacaccagugcaugauugcaacaccacgugucaaacuccgaaaggcgcuaucaauacaucgcuccccuuccagaacauucacccuaucaccaucgguaagugcccaaaguauguaaaaucuacuaagcugcgccuugccacagggcugagaaaugugcccuccauucagucaaggggauuguuuggcgcgauagccggcuucaucgaagggggauggaccgguauggucgacggcugguacggguaucaucaccagaacgaacaaggaaguggcuacgcagcugaccucaaaagcacgcagaaugccauugauaagaucaccaacaaaguuaauuccgugauagagaagaugaacacacaguuuacugcuguggguaaggaguucaaucaccuggaaaaacggauugagaacuuaaauaagaaagucgacgauggguuccuggacaucuggaccuacaacgccgaacuccuugugcuguuggagaaugaacgcacacuagauuaucaugacucuaacguaaagaaccuguacgagaaaguucgaaaucagcucaagaacaaugcaaaggagaucggcaacggauguuuugaguucuaucacaaaugcgauaauacuuguauggaaagcgugaagaacggcaccuacgacuauccuaaauacucagaagaggccaagcugaauagagaagagauugauggggucaaacuugagaguacaaggaucuaucaaauucuggcuauauacuccaccguggcgagcucuuugguccucgugguuucacugggagcaaucaguuuuuggaugugcagcaacgguuccuuacagugccggauuuguaucuga

SEQ ID NO: 134916 - RNA, 1701 nt, Artificial Sequence
  derived and/or modified CDS sequence (opt3) from hemagglutinin__InfluenzaA__AEI60109
augaagaccacaaucgcccugagcuacauucucugccuuguguucgcucagaaacugcccggcaacgacaauuccacugcaacguuguguuuagggcaccaugccgucccuaacggaacccugguuaagacaauaacuaaugaucaaaucgaggugaccaacgcgacagaacuuguacaaaauucuucaaccgguagaauuugcgacaguccacaccagauccucgauggcgagaacuguacucugauugacgcucuacugggggauccgcauugcgacggauuucagaauaaagaaugggauuuguucguggagaggagcaaggccuauuccaacuguuaccccuauaaugucccugacuacgugucucuccggucgcugguugcaucaagcggcacacuggaauuuaacaaugagaguuucaacuggaccgguguggcccaggauggguccucuuaugcuugcaaacgccgaagcaauaaguccuuuuucucacgucucaacugguuacaccagcugaauuacaaguauccagcacuuaacgucacgaugcccaacaaugagaacuuugacaaauuguacaucuggggagugcaucacccuggcacugauagugaccagauaagccuguacgcccaggcuucuggcagaguaaccguuuccacaaagaggucacaacagacugugaucccaaauauuggguaucggcccuggguccgcggagugagcaguaucauuucuaucuacuggaccauagugaaaccuggugauauucuacucaucaacuccacaggcaaucugauugccccaagaggguauuucaagaucaggagcggaaaaucgucuaucaugcgguccgacgcgccgauuggcaaguguaacucagaaugcauaacccccaaugguaguaucccuaacgacaagccauuucagaaugucaaccgcauuacguacgggcccuguccucgauauguuaaacagaauacucuuaagcuggcaacaggaaugagaaacgugccagagaaacaaaccaggggcaucuucggcgccauagcuggguuuauugaaaauggaugggaggguaugaaggauggcugguacggguuccggcaccagaacagcgagggaacuggccaggccgcagacaucaaauccacacaagcugccaucaaucagauuaacgguaaguugaaccgucucaucgagaaaaccaaugaaaaguuucaucagauugaaaaggaguucucugaaguagaggggcgcauacaggaucuggagaaauauguggaagacacgaagaucgauuuauggagcuacaacgcggagcugcucgucgcccuugaaaaucaacacaccauugaccugacagauucagagaugaacaaauuguucgaaagaacuaagaaacagcuaagggagaaugcagaggacaugggcaacggaugcuuuaagaucuaccauaagugugauaauaccugcaucggcaguauucggaacgggacauaugaccacgauguguaccgagacgaagcucugaauaaccgcuuccacauaaaaggaguugagcucaaguccgguuauaaagacuggauccuguggauuagcuuugccacuucuugcuuccuucuguguaucguguugcucggcuuuauuaugugggcuugccagaaggggaauaucagauguaacauaugcaucuga

SEQ ID NO: 134917 - RNA, 1701 nt, Artificial Sequence
  derived and/or modified CDS sequence (opt3) from hemagglutinin__InfluenzaA__AEI86734
augaaggccauccuggugguccuccuuuacaccuucgcuacagcaaacgccgacacucugugcguuggcuaucacgcgaauaacagcacggauaccguggacacaguauuggagaaaaaugugacugucacccauuccgugaacuuacuggaagauaagcacaaugggaaacuauguaagcucagaggaguugcuccccugcaucuugguaaaugcaacauugccggcuggauacuggggaauccugagugugaaucuuugucaacagcaaguagcugguccuacaucguggagaccucuaacucggacaauggaacuugcuauccaggcgauuuuauugacuacgaggagcucagggagcagcugucaagcgucaguuccuucgaacgguuugagaucuucccgaagacaucuagcuggcccaaccacgauuccaauaagggugugaccgccgcuuguccucaugcaggggccaaaucauuuuaucgcaaccugauuuggcucguaaagaaaggaaauaguuacccaaaguuaagcaaaucuuauaucaacgacaagggcaaggaaguucuggugcuuuggggcauacaccaccccuccacgucagcugaucaacagagcuuguaccagaaugccgacacuuacgucuucguggggaccagucgauauucuaaaaaguuuaaaccugagaucgcgauucguccaaaggugagagaucaggagggaaggaugaacuacuauuggacacuggucgaacccggugacaaaaucacuuucgaggcaaccggcaaccuaguugugccucgguacgccuuugcuauggaacgcaaugccggguccggaauuaucauaagcgauacaccaguacaugacugcaacaccacgugucaaacuccgaagggcgcaauuaauacaucgcuccccuuccagaacauccacccuauuaccaucgguaaaugcccaaaguaugugaagucuacuaaacugagacuugcuacagggcugaggaauguccccuccauccagucacggggauuguuuggcgccauugcgggcuucauagaagggggauggaccgguaugguggacggcugguacggguaucaucaccagaacgaacaaggaaguggcuacgccgcagaucucaagagcacgcagaaugcuaucgacgagauuaccaacaaaguuaauuccgugaucgagaagaugaacacacaguuuacugccgucgguaaagaguucaaucaccuggaaaagcgcauagaaaacuuaaauaagaaaguggaugacggguuccuggauauuuggaccuacaacgcugagcuccuuguacuguuggaaaaugagcgaacacuagacuaucaugauucuaacguuaagaaccuguacgagaaagugagaagccagcucaagaauaacgccaaagaaaucggcaauggauguuuugaguucuaucacaagugcgacaacacuuguauggaaucagucaagaauggcaccuacgauuauccuaaauacagugaggaagcaaagcugaacagggaggagaucgacggggugaaacuugaauccacacggauuuaucaaauccuggccauuuacagcaccgucgcuucuucauuggugcucguugugagucugggagcgaucagcuuuuggaugugcuccaaugguucuuuacagugccguauauguauuuga

SEQ ID NO: 134918 - RNA, 1701 nt, Artificial Sequence
  derived and/or modified CDS sequence (opt3) from hemagglutinin__InfluenzaA__AEI86764
augaaggccauccuggugguccuccuuuacaccuucgcuacagcaaacgccgacacucugugcauuggcuaucacgcgaauaacagcacggauaccguugacacaguguuggagaaaaauguaacugugacccauuccgucaacuuacuggaagauaagcacaaugggaaacuauguaagcucagaggaguggcuccccugcaucuugguaaaugcaacauagccggcuggauccuggggaauccugagugugaaucuuugucaacagcaaguagcugguccuacauuguugagaccucuucgucagacaacggaacuugcuauccaggcgauuuuaucgacuacgaggagcucagggagcagcugagcaguguguccucuuucgaacgguuugagauuuucccgaagacaagcuccuggcccgaucacgacucaaauaagggugucaccgccgcuuguccucaugcaggggccaaaaguuuuuauaagaaccugaucuggcucgugaaaaagggaaauagcuacccaaaauuaucuaaguccuauauaaacgauaagggcaaagaaguacugguucuuuggggcauccaccaccccucaacgagcgcugaccaacagaguuuguaccagaaugccgaugcguacguguucgucgggacuucucgcuauuccaagaaauuuaagccugagauugcaauccgaccaaaagugcgugaccaggagggaagaaugaacuacuauuggacccugguggaacccggugauaagauuacauucgaggccacuggcaaucuagucguuccuagguacgcuuuugccauggaacggaacgcagggagcggaaucauaauuucggacaccccagugcaugacugcaacacaaccugucaaacgccgaaaggcgcuaucaauacuucucuccccuuccagaacauucacccuaucacaaucgguaagugcccaaaguauguaaaauccaccaagcugcgccuugccacugggcugagaaaugugcccucaauucagaguaggggauuguuuggcgcgauagccggcuucaucgaagggggauggacagguauggucgauggcugguacggguaucaucaccagaacgaacaaggaagcggcuacgcagcugaccucaaauccacccagaaugccauugauaagaucacgaacaaaguuaauucugugauagagaagaugaacacccaguuuacagcuguggguaaggaguucaaucaccuggaaaaacggauugagaacuuaaauaagaaagucgacgauggguuccuggacaucuggacuuacaacgccgaacuccuugugcuguuggagaaugaacgcacccuagauuaucaugacagcaacguaaagaaucuguacgagaaaguucgaucacagcucaagaacaacgcaaaggagaucggcaauggauguuuugaguucuaucacaaaugcgauaacacauguauggaaagugugaagaauggcacuuacgacuauccuaaauacuccgaagaggccaagcugaacagagaaaagauugauggggucaaacuugagagcaccaggaucuaucaaauucuggcuauauacucuacaguggcgucaaguuugguccucgugguuagccugggagcaaucuccuuuuggaugugcucuaaugguucguuacagugccggauuuguaucuga

SEQ ID NO: 134919 - RNA, 1701 nt, Artificial Sequence; identical to SEQ ID NO: 134918
  derived and/or modified CDS sequence (opt3) from hemagglutinin__InfluenzaA__AEI86774

SEQ ID NO: 134920 - RNA, 1701 nt, Artificial Sequence
  derived and/or modified CDS sequence (opt3) from hemagglutinin__InfluenzaA__AEI86784
augaaggugauccuggucguucuccuuuacaccuucgccacagcuaacgcagacacucugugcauuggcuaucacgccaauaacagcacggauaccguggacacaguauuggagaagaaugugacugucacccauuccgugaacuuacuggaagauaagcacaaugggaaacuauguaagcucagaggaguugcgccccugcaucuugguaaaugcaacauagcuggcuggauccuggggaauccugagugugaaucuuugucaacagccaguagcugguccuacauuguggagaccucuucgucagacaacggaacuugcuauccaggcgauuuuaucgacuacgaggaacucagggagcagcugagcagugucuccucuuucaagcgguuugaaauuuucccgaagacaagcuccuggcccaaucacgauucaaacaaaggugugaccgcagccuguccucaugcuggggcaaagaguuuuuauaaaaaucugaucuggcucguaaagaaaggaaacagcuacccaaaguuaucuaaguccuauauaaaugacaaaggcaaggagguucuggugcuuuggggcauccaccaccccucaacgagcgccgaucaacagaguuuguaccagaacgcugacgccuacgucuucguggggacuucucgcuauuccaaaaaguuuaaaccugaaauugcgauccgaccaaaggugcgugaucaggagggaagaaugaauuacuauuggacccuggucgagcccggugacaaaauuacauucgaagcaacuggcaaccuaguugugccuagguacgccuuugcuauggagcggaacgccgggagcggaaucauaauuucggauaccccaguacaugacugcaauacaaccugucaaacgccgaagggcgcaaucaacacuucucuccccuuccagaauauucacccuaucacaaucgguaagugcccaaaauaugugaaguccaccaaacugcgccuugcuacugggcugagaaacguccccucaauucagaguaggggauuguuuggcgccauagcgggcuucaucgaagggggauggacagguaugguggacggcugguacggguaucaucaccagaaugagcaaggaagcggcuacgccgcagaucucaaguccacccagaacgcuauugacaaaaucacgaauaagguuaacucugugauagaaaagaugaauacccaguuuacagccgucgguaaagaguucaaccaccuggagaagcggauugaaaauuuaaacaaaaagguggaugacggguuccuggauaucuggacuuacaaugcugagcuccuuguacuguuggaaaacgagcgcacccuagacuaucaugauagcaauguuaaaaaccuguacgaaaaggugcgaucacagcucaagaacaaugccaaagagaucggcaacggauguuuugaguucuaucacaagugcgacaauacauguauggaaagugucaaaaacggcacuuacgauuauccuaaguacuccgaggaagcaaaacugaauagagaggaaauugacggggugaaacuugagagcaccaggaucuaucaaauucuggccauauacucuacagucgcuucaaguuuggugcucguugugagccugggagcgaucuccuuuuggaugugcucuaacgguucguuacagugccggauuuguaucuga

SEQ ID NO: 134921 - RNA, 1701 nt, Artificial Sequence
  derived and/or modified CDS sequence (opt3) from hemagglutinin__InfluenzaA__AEI86794
augaagaccauccuggugguccuccuuuacacauucgccacugcuaacgcagacacgcugugcauuggcuaucacgccaauaacagcaccgauacaguugacacuguguuggagaagaauguaaccgugacacauuccgucaacuuacuggaagauaagcacaaugggaaacuauguaagcucagaggaguggcgccccugcaucuugguaaaugcaacauagcuggcuggauccuggggaauccugagugugaaucuuugucaaccgccaguagcugguccuacauuguugagacuucuucgucagacaacggaacaugcuauccaggcaauuuuaucgauuacgaggagcucagggagcagcugagcaguguguccucuuucgaacgguuugagauuuucccgaagaccagcuccuggcccgaccacgauucaaacaagggugucacggcagccuguccucaugcuggggcaaaaaguuuuuauaagaaucugaucuggcucgugaaaaagggaaacagcuacccaaaauuaucuaaguccuauauaaaugacaagggcaaagaaguacugguucuuuggggcauccaccaccccucaacuagcgccgaucaacagaguuuguaccagaacgcugacgccuacguguucgucgggaccucuaaguauuccaaaaaguuuaaaccugagauugcgauccgcccaaaggugcgagaucaggagggacguaugaauuacuauuggacacugguggaacccggugacaaaauuacuuucgaggcaaccggcaaccuagucgccccuagauacgcuuuugccauggaaaggaacgcagggagcggaaucauaauuucggauacaccaguucaugacugcaauaccacgugucaaacuccgaagggcgcuaucaacacaucucuccccuuccagaauauucacccuaucaccaucgguaagugcccaaaauaugugaaguccacuaaacugcggcuugccacagggcugcgcaacguacccucaauucagaguagaggauuguuuggcgcgauagccggcuucaucgaagggggauggaccgguaugguggacggcugguacggguaucaucaccagaaugaacaaggaagcggcuacgcagcugaucucaaguccacgcagaacgccauugacaaaaucaccaauaaggucaacucugugauagagaagaugaauacacaguuuacugcuguugguaaagaguucaaccaccuggaaaagaggauugagaauuuaaacaaaaagguggaugacggguuccuggauaucuggaccuacaaugccgaacuccuuguccuguuggagaacgaacggacacuagacuaucaugauagcaaugugaaaaaccuguacgagaagguacgcucacagcucaagaacaaugcaaaagagaucggcaacggauguuuugaguucuaucacaagugcgacaauacuuguauggaaaguguuaaaaacggcaccuacgauuauccuaaguacuccgaagaggccaaacugaaucgagaagagauugacggggugaaacuugagagcacaagaaucuaucaaauucuggcuauauacucuaccgucgcgucaaguuuggugcucgucgugagccugggagcaaucuccuuuuggaugugcucuaacgguucguuacagugcaggauuuguaucuga

SEQ ID NO: 134922 - RNA, 1701 nt, Artificial Sequence
  derived and/or modified CDS sequence (opt3) from hemagglutinin__InfluenzaA__AEI86804
augaaggccauccuggugguccuccuuuacaccuucgcuacagcaaacgccgacacucugugcauuggcuaucacgcgaauaacagcacggauaccguugacacaguguuggagaaaaauguaacugugacccauuccgucaacuuacuggaagauaagcacaaugggaaacuauguaagcucagaggaguggcuccccugcaucuugguaaaugcaacauagccggcuggauccuggggaauccugagugugaaucuuugucaacagcaaguagcugguccuacauuguugagaccucuucgucagacaacggaacuugcuauccaggcgauuuuaucaauuacgaggagcucagggagcagcugagcaguguguccucuuucgaacgguuugagauuuucccgaagacaagcuccuggcccgaccacgauucaaacaagggugucaccgccgcuuguccucaugcaggggccaaaaguuuuuauaagaaucugauguggcucgugaaaaagggaaacagcuacccaaaauuaucuaaguccuauaucaaugacaagggcaaagaaguacugguucuuuggggcauacaccaccccucaacgagcgcugaucaacagaguuuguaccagaacgccgacgcguacguguucgucgggacuucucgcuauuccaagaaauuuaagccugagaucgcaauucgaccaaaagugcgugaucaggagggaagaaugaauuacuauuggacccugguggaacccggugacaagaucacauucgaggccacuggcaaccuagucguuccuagguacgcuuuugccauggaacggaacgcagggagcggaauuaucauaucggauaccccagugcaugacugcaauacaaccugucaaacgccgaaaggcgcuauuaacacuucucuccccuuccagaauauccacccuauuacaaucgguaagugcccaaaguauguaaaauccaccaagcugcgccuugccacugggcugagaaacgugcccucaauccagaguaggggauuguuuggcgcgauugccggcuucauagaagggggauggacagguauggucgacggcugguacggguaucaucaccagaaugaacaaggaagcggcuacgcagcugaucucaaauccacccagaacgccaucgacaagauuacgaauaaagugaacucuguuaucgagaagaugaauacccaguuuacagcuguggguaaggaguucaaccaccuggaaaaacggauagagaauuuaaacaagaaagucgaugacggguuccuggauauuuggacuuacaaugccgaacuccuugugcuguuggagaacgaacgcacccuagacuaucaugauagcaauguaaagaaccuguacgagaaaguucgaucacagcucaagaacaaugcaaaggagaucggcaacggauguuuugaguucuaucacaaaugcgacaauacauguauggaaagugugaagaacggcacuuacgauuauccuaaauacuccgaagaggccaagcugaauagagaagagaucgacggggucaaacuugagagcaccaggauuuaucaaauccuggcuauuuacucugcgguggcaucaaguuugguccucgugguuagccugggagccauauccuuuuggaugugcucuaacgguucguuacagugccggaucuguauuuga

SEQ ID NO: 134923 - RNA, 1701 nt, Artificial Sequence; identical to SEQ ID NO: 134918
  derived and/or modified CDS sequence (opt3) from hemagglutinin__InfluenzaA__AEI86814

SEQ ID NO: 134924 - RNA, 1701 nt, Artificial Sequence
  derived and/or modified CDS sequence (opt3) from hemagglutinin__InfluenzaA__AEI86824
augaaggccauccuggugguccuccuuuacaccuucgcuacagcaaacgccgacacucugugcauuggcuaucacgcgaauaacagcacggauaccguugacacaguguuggagaaaaauguaacugugacccauuccgucaacuuacuggaagauaagcacaaugggaaacuauguaagcucagaggaguggcuccccugcaucuugguaaaugcaacauagccggcuggauccuggggaauccugagugugaaucuuugucaacagcaaguagcugguccuacauuguugagaccucuucgucagacaacggaacuugcuauccaggcgauuuuaucgacuacgaggagcucagggagcagcugagcaguguguccucuuucgaacgguuugagauuuucccgaagacaagcuccuggcccgaucacgacucaaauaagggugucaccgccgcuuguccucaugcaggggccaaaaguuuuuauaagaaccugaucuggcucgugaaaaagggaaauagcuacccaaaauuaucuaaguccuauauaaacgauaagggcaaagaaguacugguucuuuggggcauccaccaccccucaacgagcgcugaccaacagaguuuguaccagaaugccgaugcguacguguucgucgggacuucucgcuauuccaagaaauuuaagccugagauugcaauccgaccaaaagugcgugaccaggagggaagaaugaacuacuauuggacccugguggaacccggugauaagauuacauucgaggccacuggcaaucuagucguuccuagguacgcuuuugccauggaacggaacgcagggagcggaaucauaauuucggacaccccagugcaugacugcaacacaaccugucaaacgccgaaaggcgcuaucaauacuucucuccccuuccagaacauucacccuaucacaaucgguaagugcccaaaguauguaaaauccaccaagcugcgccuugccacugggcugagaaaugugcccucaauucagaguaggggauuguuuggcgcgauagccggcuucaucgaagggggauggacagguauggucgauggcugguacggguaucaucaccagaacgaacaaggaagcggcuacgcagcugaccucaaauccacccaggaugccauugacaagaucacgaauaaagugaacucuguuauagagaagaugaauacccaguuuacagcuguggguaaggaguucaaccaccuggaaaaacggauugagaauuuaaacaagaaagucgaugacggguuccuggauaucuggacuuacaaugccgaacuccuugugcuguuggagaacgaacgcacccuagacuaucaugauagcaauguaaagaaccuguacgagaaaguucgaucacagcucaagaauaacgcaaaggagaucggcaacggauguuuugaguucuaucacaaaugcgacaauacauguauggaaagugugaagaacggcacuuacgauuauccuaaauacuccgaagaggccaagcugaauagagaaaagauugacggggucaaacuugagagcaccaggaucuaucaaauucuggcuauauacucuacaguggcgucaaguuugguccucgugguuagccugggagcaaucuccuuuuggaugugcucuaacgguucguuacagugccggauuuguaucuga

SEQ ID NO: 134925 - RNA, 1701 nt, Artificial Sequence
  derived and/or modified CDS sequence (opt3) from hemagglutinin__InfluenzaA__AEI86834
augaaggccauccuggugguccuccuuuacaccuucgcuacagcaaacgccgacacucugugcauuggcuaucacgcgaauaacagcacggauaccguugacacaguguuggagaagaauguaacugugacccauuccgucaacuuacuggaagauaagcacaaugggaaacuauguaagcucagaggaguggcuccccugcaucuugguaaaugcaacauagccggcuggauccuggggaauccugagugugaaucuuugucaacagcaaguagcugguccuacauuguugagaccucuucgucagacaacggaacuugcuauccaggcaauuuuaucgauuacgaggagcucagggagcagcugagcaguguguccucuuucgaacgguuugagauuuucccgaagacaagcuccuggcccgaccacgauucaaacaagggugucaccgccgcuuguccucaugcaggggccaaaaguuuuuauaagaaucugaucuggcucgugaaaaagggaaacagcuacccaaaauuaucuaaguccuauauaaaugacaagggcaaagaaguacugguucuuuggggcauccaccaccccucaacgagcgcugaucaacagaguuuguaccagaacgccgacgcguacguguucgucgggacuucucgcuauucccgaaaguuuaaaccugagauugcaauccguccaaaggugagagaucaggagggaaggaugaauuacuauuggacccugguggaacccggugacaaaauuacauucgaggccacuggcaaccuagucgcuccucgguacgccuuugcaauggaacgcaacgcugggagcggaaucauaauuucggauaccccaguucaugacugcaauacaaccugucaaacgccgaagggcgccaucaacacuucucuccccuuccagaauauucacccuaucacaaucgguaaaugcccaaaguaugugaaguccaccaaacugagacuugcgacugggcugaggaacguacccucaauucagagucggggauuguuuggcgccauagcaggcuucaucgaagggggauggacagguaugguggacggcugguacggguaucaucaccagaaugaacaaggaagcggcuacgcugccgaucucaaguccacccagaacgcuauugacaaaaucacgaauaaggucaacucugugauagagaaaaugaauacccaguuuacagccguugguaaggaguucaaccaccuggaaaagcgcauugagaauuuaaacaaaaagguggaugacggguuccuggauaucuggacuuacaaugcagaacuccuuguccuguuggagaacgaacgaacccuagacuaucaugauagcaaugugaaaaaccuguacgagaagguaagaucacagcucaaaaacaaugccaaggagaucggcaacggauguuuugaguucuaucacaagugcgacaauacauguauggaaaguguuaaaaacggcacuuacgauuauccuaaguacuccgaagaggcuaaacugaauagggaagagauugacggggugaaacuugagagcacccggaucuaucaaauucuggcgauauacucuacagucgcaucaaguuuggugcucgucgugagccugggagccaucuccuuuuggaugugcucuaacgguucguuacagugccguauuuguaucuga

SEQ ID NO: 134926 - RNA, 1701 nt, Artificial Sequence; identical to SEQ ID NO: 133632
  derived and/or modified CDS sequence (opt3) from hemagglutinin__InfluenzaA__AEI86854

SEQ ID NO: 134927 - RNA, 1701 nt, Artificial Sequence
  derived and/or modified CDS sequence (opt3) from hemagglutinin__InfluenzaA__AEI86864
augaaggccauccugguggcucuccuuuacaccuucgcaacagccaacgcggacacucugugcauuggcuaucacgcuaauaacagcacggauaccgucgacacaguuuuggagaaaaaugugacuguaacccauuccgugaacuuacuggaagauaagcacaaugggaaacuauguaagcucagaggagucgcaccccugcaucuugguaaaugcaacauagccggcuggauccuggggaauccugagugugaaucuuugucaacagccaguagcugguccuacauuguggagaccucuucgucagacaacggaacuugcuauccaggcgauuuuaucaauuacgaggagcucagggagcagcugagcaguguuuccucuuucgaacgguuugagauuuucccgaagacaagcuccuggcccaaccacgacucaaauaagggugugaccgcugcauguccucaugccggggcuaaaaguuuuuauaagaaccugaucuggcucgucaaaaagggaaauagcuacccaaaauuaucuaaguccuauauaaacgauaagggcaaagaagugcugguacuuuggggcauccaccaccccucaacgacugccgaccaacagagcuuguaccagaaugcggaugcauacguuuucguggggaccagucgcuauucuaagaaauuuaagccugagauugccauccgaccaaaaguccgugaccaggagggaagaaugaacuacuauuggacacugguggaacccggugauaagauuacuuucgaggcuaccggcaaccuaguggucccuagguacgccuuugcaauggaacggaaugcuggguccggaaucauaauuagcgacacaccaguucaugauugcaacaccacgugucaaacuccgaaaggcgccaucaauacaucgcuccccuuccagaacauucacccuaucaccaucgguaagugcccaaaguaugugaaaucuacuaagcugcgccuugcgacagggcugagaaauguacccuccauucagucaaggggauuguuuggcgccauagcaggcuucaucgaagggggauggaccgguaugguggacggcugguacggguaucaucaccagaacgaacaaggaaguggcuacgcugccgaccucaaaagcacgcagaaugcuauugauaagaucaccaacaaagucaauuccgugauagagaagaugaacacacaguuuacugccguugguaaggaguucaaucaccuggaaaaacggauugagaacuuaaauaagaaaguggacgauggguuccuggacaucuggaccuacaacgcagaacuccuuguccuguuggagaaugaacgcacacuagauuaucaugacucuaacgugaagaaccuguacgagaaaguacgaaaucagcucaagaacaaugccaaggagaucggcaacggauguuuugaguucuaucacaaaugcgauaauacuuguauggaaagcguuaagaacggcaccuacgacuauccuaaauacucagaagaggcuaagcugaauagagaagagauugauggggugaaacuugagaguacaaggaucuaucaaauucuggcgauauacuccaccgucgcaagcucuuuggugcucgucgugucacugggagccaucaguuuuuggaugugcagcaacgguuccuuacagugccggauuuguaucuga

SEQ ID NO: 134928 - RNA, 1701 nt, Artificial Sequence; identical to SEQ ID NO: 134918
  derived and/or modified CDS sequence (opt3) from hemagglutinin__InfluenzaA__AEI86874

SEQ ID NO: 134929 - RNA, 1701 nt, Artificial Sequence
  derived and/or modified CDS sequence (opt3) from hemagglutinin__InfluenzaA__AEI86894
augaaggccauccuggugguccuccuuuacaccuucgcuacagcaaacgccgacacucugugcauuggcuaucacgcgaauaacagcacggauaccguugacacaguguuggagaaaaauguaacugugacccauuccgucaacuuacuggaagauaagcacaaugggaaacuauguaagcucagaggaguggcuccccugcaucuugguaaaugcaacauagccggcuggauccuggggaauccugagugugaaucuuugucaacagcaaguagcugguccuacauuguugagaccucuucgucagacaacggaacuugcuauccaggcaauuuuaucgauuacgaggagcucagggagcagcugagcaguguguccucuuucgaacgguuugagauuuucccgaagacaagcuccuggcccgaccacgauucaaacaagggugucaccgccgcuuguccucaugcaggggccaaaaguuuuuauaagaaucugaucuggcucgugaaaaagggaaacagcuacccaaaauuaucuaaguccuauauaaaugacaagggcaaagaaguacugguucuuuggggcauccaccaccccucaacgagcgcugaucaacagaguuuguaccagaacgccgacgcguacguguucgucgggacuucucgcuauuccaagaaauuuaagccugagauugcaauccgaccaaaagugcgugaucaggagggaagaaugaauuacuauuggacccugguggaacccggugacaagauuacauucgaggccacuggcaaccuagucgcuccuagguacgccuuugcaauggaacggaacgcugggagcggaaucauaauuucggauaccccaguucaugacugcaauacaaccugucaaacgccgaaaggcgccaucaacacuucucuccccuuccagaauauucacccuaucacaaucgguaagugcccaaaguaugugaaauccaccaagcugcgccuugcgacugggcugagaaacguacccucaauucagaguaggggauuguuuggcgccauagcaggcuucaucgaagggggauggacagguaugguggacggcugguacggguaucaucaccagaaugaacaaggaagcggcuacgcugccgaucucaaauccacccagaacgcuauugacaagaucacgaauaaagucaacucugugauagagaagaugaauacccaguuuacagccguugguaaggaguucaaccaccuggaaaaacggauugagaauuuaaacaagaaaguggaugacggguuccuggauaucuggacuuacaaugcagaacuccuuguccuguuggagaacgaacgcacccuagacuaucaugauagcaaugugaagaaccuguacgagaaaguacgaucacagcucaagaacaaugccaaggagaucggcaacggauguuuugaguucuaucacaaaugcgacaauacauguauggaaaguguuaagaacggcacuuacgauuauccuaaauacuccgaagaggcuaagcugaauagagaagagauugacggggugaaacuugagagcaccaggaucuaucaaauucuggcgauauacucuacagucgcaucaaguuuggugcucgucgugagccugggagccaucuccuuuuggaugugcucuaacgguucguuacagugccggauuuguaucuga

SEQ ID NO: 134930 - RNA, 1701 nt, Artificial Sequence
  derived and/or modified CDS sequence (opt3) from hemagglutinin__InfluenzaA__AEI86904
augaaggccauccuggugguccuccuuuacaccuucacaacugcuaacgcagacacgcugugcauuggcuaucacgccaauaacagcaccgauacaguugacacuguguuggagaaaaauguaaccgugacacauuccgucaacuuacuggaagauaagcacaaugggaaacuauguaagcucagaggaguggcgccccugcaucuugguaaaugcaacauagcuggcuggauccuggggaauccugagugugaaucuuugucaaccgccaguagcugguccuacauuguugagacuucuucgucagacaacggaacaugcuauccaggcgauuuuaucgacuacgaggagcucagggagcagcugagcaguguguccucuuucgaacgguuugagauuuucccgaagaccagcuccuggcccaaucacgauucaaacaagggugucacggcagccuguccucaugcuggggcaaaaaguuuuuauaagaaucugaucuggcucgugaaaaagggaaacagcuacccaaaauuaucuaaguccuauauaaaugacaagggcaaagaaguacugguucuuuggggcauccaccaccccucaacuaccgccgaucaacagagcuuguaccagaacgcugacgccuacguguucgucgggacaagucgcuauucuaagaaauuuaagccugagauugcgauccgaccaaaagugcgugaucaggagggaagaaugaauuacuauuggacucugguggaacccggugacaagauuaccuucgaggcaacaggcaaccuagucguuccuagguacgccuuugcuauggaacggaacgccggguccggaaucauaauuagcgauaccccagugcaugacugcaauacgacuugucaaacaccgaaaggcgcaaucaacaccucgcuccccuuccagaauauucacccuaucacuaucgguaagugcccaaaguauguaaaaucuacaaagcugcgccuugcuaccgggcugagaaacgugcccuccauucagucaaggggauuguuuggcgccauagcgggcuucaucgaagggggauggacggguauggucgacggcugguacggguaucaucaccagaaugaacaaggaaguggcuacgccgcagaucucaaaagcacccagaacgcuauugacaagaucacaaauaaagugaacuccguuauagagaagaugaauacucaguuuaccgccguggguaaggaguucaaccaccuggaaaaacggauugagaauuuaaacaagaaagucgaugacggguuccuggauaucuggacauacaaugcugaacuccuugugcuguuggagaacgaacgcacucuagacuaucaugauucuaauguaaagaaccuguacgagaaaguucgaaaccagcucaagaauaacgccaaggagaucggcaauggauguuuugaguucuaucacaaaugcgacaacaccuguauggaaagcgugaagaauggcacauacgauuauccuaaauacucagaagaggcaaagcugaacagagaagagauugacggggucaaacuugagaguaccaggaucuaucaaauucuggccauauacuccacuguggcuagcucuuugguccucgugguuucacugggagcgaucaguuuuuggaugugcagcaaugguuccuuacagugccggauuuguaucuga

SEQ ID NO: 134931 - RNA, 1701 nt, Artificial Sequence
  derived and/or modified CDS sequence (opt3) from hemagglutinin__InfluenzaA__AEI86914
augaaggccauccuggugguccuccuuuacaccuucgcuacagcaaacgccgacacucugugcauuggcuaucacgcgaauaacagcacggauaccguugacacaguguuggagaagaauguaacugugacccauuccgucaacuuacuggaagauaagcacaaugggaaacuauguaagcucagaggaguggcuccccugcaucuugguaaaugcaacauagccggcuggauccuggggaauccugagugugaaucuuugucaacagcaaguagcugguccuacauuguugagaccucuucgucagacaacggaacuugcuauccaggcgauuuuaucaauuacgaggagcucagggagcagcugagcaguguguccucuuucgaacgguuugagauuuucccgaagacaagcuccuggcccaaccacgacucaaauaagggugucaccgccgcuuguccucaugcaggggccaaaaguuuuuauaagaaccugaucuggcucgugaaaaagggaaauagcuacccacgcuuaucuaaauccuauauaaacgauaagggcaaggaaguacugguucuuuggggcauccaccaccccucaacgacugcugaccaacagagcuuguaccagaaugccgaugcguacguguucgucgggaccagucgauauucuaaaaaguuuaaaccugagauugcaauccguccaaaggugagagaccaggagggaaggaugaacuacuauuggacacugguggaacccggugauaaaauuacuuucgaggccaccggcaaccuagucguuccucgguacgcuuuugccauggaacgcaaugcaggguccggaaucauaauuagcgacacaccagugcaugauugcaacaccacgugucaaacuccgaagggcgcuaucaauacaucgcuccccuuccagaacauucacccuaucaccaucgguaaaugcccaaaguauguaaagucuacuaaacugagacuugccacagggcugaggaaugugcccuccauucagucacggggauuguuuggcgcgauagccggcuucaucgaagggggauggaccgguauggucgacggcugguacggguaucaucaccagaacgaacaaggaaguggcuacgcagcugaccucaagagcacgcagaaugccauugauaaaaucaccaacaagguaaauuccguuauagagaaaaugaacacacaguuuacugcuguggguaaggaguucaaucaccuggaaaagcgcauugagaacuuaaauaaaaaggucgacgauggguuccuggacaucuggaccuacaacgccgaacuccuugugcuguuggagaaugaacgaacacuagauuaucaugacucuaacgugaaaaaccuguacgagaagguuagaaaucagcucaaaaacaaugcaaaggagaucggcaacggauguuuugaguucuaucacaagugcgauaauacuuguauggaaagcgugaaaaacggcaccuacgacuauccuaaguacucagaagaggccaaacugaauagggaagagauugauggggucaaacuugagaguacacggaucuaucaaauucuggcuauauacuccaccguggcgagcucuuugguccucgugguuucacugggagcaaucaguuuuuggaugugcagcaacgguuccuuacagugccguauuuguaucuga

SEQ ID NO: 134932 - RNA, 1701 nt, Artificial Sequence
  derived and/or modified CDS sequence (opt3) from hemagglutinin__InfluenzaA__AEI86924
augaaggccauccuggugguccuccuuuacaccuucgcuacagcaaacgccgacacucugugcauuggcuaucacgcgaauaacagcacggauaccguugacacaguguuggagaaaaauguaacugugacccauuccgucaacuuacuggaagauaagcacaaugggaaacuauguaagcucagaggaguggcuccccugcaucuugguaaaugcaacauagccggcuggauccuggggaauccugagugugaaucuuugucaacagcaaguagcugguccuacauuguugagaccucuucgucagacaacggaacuugcuauccaggcguguuuaucgauuacgaggagcucagggagcagcugagcagugucuccucuuucgaacgguuugagauuuucccgaagacaagcuccuggcccaaucacgacucaaacaagggugugaccgccgcuuguccucaugcaggggccaaaaguuuuuauaagaaucugaucuggcucaucaaaaagggaaacagcuacccaaaauuaucuaaguccuauauaaaugauaagggcaaagaaguacugguucuuuggggcauucaccaccccucaacgacugcugaccaacagagcuuguaccagaacgccgaugcguacguguucgucgggaccagucgcuauucuaagaaauuuaagccugagaucgcagugcgaccaaaagugcgugaccaggagggaagaaugaauuacuauuggacacuggucgaacccggugauaagauuacuuucgaggccaccggcaaccuaguugugccuagguacgcuuuugccauggaacggaacgcaggguccggaaucauaauuagcgacacaccaguacaugauugcaauaccacgugucaaacuccgaaaggcgcuaucaacacaucgcuccccuuccagaauauucacccuaucaccaucgguaagugcccaaaguaugugaaaucuacuaagcugcgccuugccacagggcugagaaacguccccuccauucagucaaggggauuguuuggcgcgauagccggcuucaucgaagggggauggaccgguaugguggacggcugguacggguaucaucaccagaaugaacaaggaaguggcuacgcagcugaccucaaaagcacgcagaacgccauugauaagaucaccaauaaaguuaacuccgugauagagaagaugaauacacaguuuacugcugucgguaaggaguucaaccaccuggaaaaacggauugagaauuuaaacaagaaaguggacgauggguuccuggacaucuggaccuacaaugccgaacuccuuguacuguuggagaacgaacgcacacuagauuaucaugacucuaauguuaagaaccuguacgagaaagugcgaaaccagcucaagaauaacgcaaaggagaucggcaauggauguuuugaguucuaucacaaaugcgauaacacuuguauggaaagcgucaagaauggcaccuacgacuauccuaaauacucagaagaggccaagcugaacagagaagagauugauggggugaaacuugagaguacaaggaucuaucaaauucuggcuauauacuccaccgucgcgagcucuuuggugcucguugugucacugggagcaaucaguuuuuggaugugcagcaaugguuccuuacagugccggauuuguaucuga

SEQ ID NO: 134933 - RNA, 1701 nt, Artificial Sequence; identical to SEQ ID NO: 134918
  derived and/or modified CDS sequence (opt3) from hemagglutinin__InfluenzaA__AEI86934

SEQ ID NO: 134934 - RNA, 1701 nt, Artificial Sequence; identical to SEQ ID NO: 133632
  derived and/or modified CDS sequence (opt3) from hemagglutinin__InfluenzaA__AEI86944

SEQ ID NO: 134935 - RNA, 1701 nt, Artificial Sequence
  derived and/or modified CDS sequence (opt3) from hemagglutinin__InfluenzaA__AEI86964
augaaggccauccuggugguccuccuuuacaccuucgcuacagcaaacgccgacacucugugcauuggcuaucacgcgaauaacagcacggauaccguugacacaguguuggagaaaaauguaacugugacccauuccgucaacuuacuggaagauaagcacaaugggaaacuauguaagcucagaggaguggcuccccugcaucuugguaaaugcaacauagccggcuggauccuggggaauccugagugugaaucuuugucaacagcaaguagcugguccuacauuguugagaccucuucgucagacaacggaacuugcuauccaggcguguuuaucgauuacgaggagcucagggagcagcugagcagugucuccucuuucgaacgguuugagauuuucccgaagacaagcuccuggcccaaucacgacucaaacaagggugugaccgccgcuuguccucaugcaggggccaaaaguuuuuauaagaaucugaucuggcucguuaaaaagggaaacagcuacccaaaauuaucuaaguccuauauaaaugauaagggcaaagaaguacuggugcuuuggggcauccaccaccccucaacgacugcugaccaacagagcuuguaccagaacgccgaugcguacgucuucguggggaccagucgcuauucuaagaaauuuaagccugagauugcagugcgaccaaaaguccgugaccaggagggaagaaugaauuacuauuggacacugguugaacccggugauaagaucacuuucgaggccaccggcaaccuagugguaccuagguacgcuuuugccauggaacggaacgcaggguccggaauuaucauaagcgacacaccagugcaugauugcaauaccacgugucaaacuccgaaaggcgcuauuaacacaucgcuccccuuccagaauauccacccuauuaccaucgguaagugcccaaaguaugucaaaucuacuaagcugcgccuugccacagggcugagaaacgugcccuccauccagucaaggggauuguuuggcgcgauugccggcuucauagaagggggauggaccgguaugguugacggcugguacggguaucaucaccagaaugaacaaggaaguggcuacgcagcugaccucaaaagcacgcagaacgccaucgauaagauuaccaauaaagugaacuccgucaucgagaagaugaauacacaguuuacugcuguggguaaggaguucaaccaccuggaaaaacggauagagaauuuaaacaagaaaguagacgauggguuccuggacauuuggaccuacaaugccgaacuccuuguucuguuggagaacgaacgcacacuagauuaucaugacucuaaugugaagaaccuguacgagaaaguccgaaaccagcucaagaauaacgcaaaggagaucggcaauggauguuuugaguucuaucacaaaugcgauaacauguguauggaaagcgugaagaauggcacuuacgacuauccuaaauacucagaagaggccaagcugaacagagaagagaucgauggggucaaacuugagaguaccaggauuuaucaaauccuggcuauuuacuccacaguggcgagcucuuugguucucgugguaucacugggagcaauaaguuuuuggaugugcagcaaugguuccuuacagugccggaucuguauuuga

SEQ ID NO: 134936 - RNA, 1701 nt, Artificial Sequence; identical to SEQ ID NO: 133874
  derived and/or modified CDS sequence (opt3) from hemagglutinin__InfluenzaA__AEI86974

SEQ ID NO: 134937 - RNA, 1701 nt, Artificial Sequence; identical to SEQ ID NO: 133632
  derived and/or modified CDS sequence (opt3) from hemagglutinin__InfluenzaA__AEI86984

SEQ ID NO: 134938 - RNA, 1701 nt, Artificial Sequence; identical to SEQ ID NO: 133632
  derived and/or modified CDS sequence (opt3) from hemagglutinin__InfluenzaA__AEI86994

SEQ ID NO: 134939 - RNA, 1701 nt, Artificial Sequence
  derived and/or modified CDS sequence (opt3) from hemagglutinin__InfluenzaA__AEI87004
augaaggccauccuggugguccuccuuuacaccuucgcuacagcaaacgccgacacucugugcauuggcuaucacgcgaauaacagcacggauaccguugacacaguguuggagaagaauguaacugugacccauuccgucaacuuacuggaagauaagcacaaugggaaacuauguaagcucaaaggaguggcuccccugcaucuugguaagugcaacauagccggcuggauccuggggaauccugagugugaaucuuugucaacagcaaguagcugguccuacauuguugagaccucuucgucagacaacggaacuugcuauccaggcaauuuuaucgauuacgaagaacucagagagcagcugagcaguguguccucuuucgaaagguuugagauuuucccgaagacaagcuccuggcccgaccacgauucaaacaaaggugucaccgccgcuuguccucaugcaggggccaagaguuuuuauaaaaaucugaucuggcucgugaagaaaggaaacagcuacccaaaguuaucuaaguccuauauaaaugacaaaggcaaggaaguacugguucuuuggggcauccaccaccccucaacgagcgcugaucaacagggguuguaccagaacgccgacgcguacguguucgucggaaccagucgguauucuaaaaaguuuaaaccugagauugcaauccgcccaaaggugcgagaucaggagggucguaugaauuacuauuggacucugguggaacccggcgacaaaauuacauucgaggccacugggaaccuagucgcuccuagauacgccuuugcaauggaaaggaacgcuggauccggcaucauaauuagcgauaccccaguucaugacugcaauacaaccugucaaacgccgaagggugccaucaacacuucgcuccccuuccagaauauucacccuaucacaaucgggaagugcccaaaauaugugaagucuaccaaacugcggcuugcgacuggacugcgcaacguacccuccauucagucaagaggcuuguuuggcgccauagcaggguucaucgagggagguuggacaggcaugguggacgggugguacggauaucaucaccagaaugaacaaggcagugguuacgcugccgaucucaagagcacccagaacgcuauugacaaaaucacgaauaaggucaacuccgugauagagaagaugaauacccaguuuacagccguugggaaagaguucaaccaccuggaaaagaggauugagaauuuaaacaaaaagguggaugacggcuuccuggauaucuggacuuacaaugcagaacuccuuguccuguuggagaacgaacggacccuagacuaucaugauucuaaugugaaaaaccuguacgagaagguacgcagccagcucaagaacaaugccaaagagaucggaaacggcuguuuugaguucuaucacaagugcgacaauacauguauggagucaguuaaaaacgggacuuacgauuauccuaaguacagugaagaggcuaaacugaaucgagaagagauugacggagugaaacuugaguccaccagaaucuaucaaauucuggcgauauacagcacagucgcaucuucauuggugcucgucgugagucugggugccaucagcuuuuggaugugcuccaacggcucuuuacagugcaggauuuguaucuga

SEQ ID NO: 134940 - RNA, 1701 nt, Artificial Sequence
  derived and/or modified CDS sequence (opt3) from hemagglutinin__InfluenzaA__AEI87014
augaaggccauccuggugguccuccuuuacaccuucgcuacagcaaacgccgacacucugugcauuggcuaucacgcgaauaacagcacggauaccguugacacaguguuggagaaaaauguaacugugacccauuccgucaacuuacuggaagauaagcacaaugggaaacuauguaagcucagaggaguggcuccccugcaucuugguaaaugcaacauagccggcuggauccuggggaauccugagugugaaucuuugucaacagcaaguagcugguccuacauuguugagaccucuucgucagacaacggaacuugcuauccaggcgauuuuaucgacuacgaggagcucagggagcagcugagcaguguguccucuuucgaacgguuugagauuuucccgaagacaagcuccuggcccaaucacgauucaaacaagggugucaccgccgcuuguccucaugcaggggccaaaaguuuuuauaagaaucugaucuggcucgugaaaaagggaaacagcuacccaaaauuaucuaaguccuauauaaaugacaagggcaaagaaguacugguucuuuggggcauccaccaccccucaacgagcgcugaucaacagaguuuguaccagaacgccgacgcguacguguucgucgggacuucucgcuauuccaagaaauuuaagccugagauugcaauccgaccaaaagugcgugaucaggagggaagaaugaauuacuauuggacccugguggaacccggugacaagauuacauucgaggccacuggcaaccuagucguuccuagguacgcuuuugccauggaacggaacgcagggagcggaaucauaauuucggauaccccagugcaugacugcaauacaaccugucaaacgccgaaaggcgcuaucaacacuucucuccccuuccagaauauucacccuaucacaaucgguaagugcccaaaguauguaaaauccaccaagcugcgccuugccacugggcugagaaacgugcccucaauucagaguaggggauuguuuggcgcgauagccggcuucaucgaagggggauggacagguauggucgacggcugguacggguaucaucaccagaaugaacaaggaagcggcuacgcagcugaucucaaauccacccagaacgccauugacaagaucacgaauaaagugaacucuguuauagagaagaugaauacccaguuuacagcuguggguaaggaguucaaccaccuggaaaaacggauugagaauuuaaacaagaaagucgaugacggguuccuggauaucuggacuuacaaugccgaacuccuugugcuguuggagaacgaacgcacccuagacuaucaugauagcaauguaaagaaccuguacgagaaaguucgaucacagcucaagaacaaugcaaaggagaucggcaacggauguuuugaguucuaucacaaaugcgacaauacauguauggaaagugugaagaacggcacuuacgauuauccuaaauacuccggggaagccaagcugaauagagaggaaauugacggagucaaacuugagagcaccaggaucuaucaaauucuggcuauauacucuacaguggcgucaaguuugguccucgugguuagccugggugcaaucuccuuuuggaugugcucuaacggcucguuacagugccggauuuguaucuga

SEQ ID NO: 134941 - RNA, 1701 nt, Artificial Sequence
  derived and/or modified CDS sequence (opt3) from hemagglutinin__InfluenzaA__AEI87034
augaaggccauccuggugguccuccuuuacaccuucgcuacagcaaacgccgacacucugugcauuggcuaucacgcgaauaacagcacggauaccguugacacaguguuggagaaaaauguaacugugacccauuccgucaacuuacuggaagauaagcacaaugggaaacuauguaagcucagaggaguggcuccccugcaucuugguaaaugcaacauagccggcuggauccuggggaauccugagugugaaucuuugucaacagcaaguagcugguccuacauuguugagaccucuucgucagacaacggaacuugcuauccaggcgauuuuaucgacuacgaggagcucagggagcagcugagcaguguguccucuuucgaacgguuugagauuuucccgaagacaagcuccuggcccgaucacgacucaaauaagggugucaccgccgcuuguccucaugcaggggccaaaaguuuuuauaagaaccugaucuggcucgugaaaaagggaaauagcuacccaaaauuaucuaaguccuauauaaacgauaagggcaaagaaguacugguucuuuggggcauccaccaccccucaacgagcgcugaccaacagaguuuguaccagaaugccgaugcguacguguucgucgggacuucucgcuauuccaagaaauuuaagccugagauugcaauccgaccaaaagugcgugaccaggagggaagaaugaacuacuauuggacccugguggaacccggugauaagauuacauucgaggccacuggcaaucuagucguuccuagguacgcuuuugccauggaacggaacgcagggagcggaaucauaauuucggacaccccagugcaugacugcaacacaaccugucaaacgccgaaaggcgcuaucaauacuucucuccccuuccagaacauucacccuaucacaaucgguaagugcccaaaguauguaaaauccaccaagcugcgccuugccacugggcugagaaaugugcccucaauucagaguaggggauuguuuggcgcgauagccggcuucaucgaagggggauggacagguauggucgauggcugguacggguaucaucaccagaacgaacaaggaagcggcuacgcagcugaccucaaauccacccagaaugccauugauaagaucacgaacaaaguuaauucugugauagagaagaugaacacccaguuuacagcuauugguaaggaguucaaucaccuggaaaaacggaucgagaacuuaaauaagaaaguggacgauggguuccuggacaucuggacuuacaacgccgaacuccuuguccuguuggagaaugaacgcacccuagauuaucaugacagcaacgugaagaaucuguacgagaaaguacgaucacagcucaagaacaacgcaaaggagauuggcaauggauguuuugaguucuaucacaaaugcgauaacacauguauggaaaguguuaagaauggcacuuacgacuauccuaaauacuccgaagaggccaagcugaacagagaagagaucgauggggugaaacuugagagcaccaggauuuaucaaauacuggcuaucuacucuacagucgcgucaaguuuggugcucgucgugagccugggagcaauuuccuuuuggaugugcucuaaugguucguuacagugccggaucuguaucuga

SEQ ID NO: 134942 - RNA, 1701 nt, Artificial Sequence; identical to SEQ ID NO: 133632
  derived and/or modified CDS sequence (opt3) from hemagglutinin__InfluenzaA__AEI87044

SEQ ID NO: 134943 - RNA, 1701 nt, Artificial Sequence; identical to SEQ ID NO: 131881
  derived and/or modified CDS sequence (opt3) from hemagglutinin__InfluenzaA__AEI87054

SEQ ID NO: 134944 - RNA, 1701 nt, Artificial Sequence
  derived and/or modified CDS sequence (opt3) from hemagglutinin__InfluenzaA__AEI87064
augaaggccauccuggugguccuccuuuacaccuucgcuacagcaaacgccgacacucugugcauuggcuaucacgcgaauaacagcacggauaccguugacacaguguuggagaaaaauguaacugugacccauuccgucaacuuacuggaagauaagcacaaugggaaacuauguaagcucagaggaguggcuccccugcaucuugguaaaugcaacauagccggcuggauccuggggaauccugagugugaaucuuugucaacagcaaguagcugguccuacauuguugagaccucuucgucagacaacggaacuugcuauccaggcgauuuuaucgacuacgaggagcucagggagcagcugagcaguguguccucuuucgaacgguuugagauuuucccgaagacaagcuccuggcccaaucacgauucaaacaagggugucaccgccgcuuguccucaugcaggggccaaaaguuuuuauaagaaucugaucuggcucgugaaaaagggaaacagcuacccaaaauuaucuaaguccuauauaaaugacaagggcaaagaaguacugguucuuuggggcauccaccaccccucaacgacugcugaucaacagagcuuguaccagaacgccgacaccuacguguucgucgggacaagucgcuauucuaagaaauuuaagccugagauugcgauccgaccaaaagugcgugaucaggagggaagaaugaauuacuauuggacucugguggaacccggugacaagauuaccuucgaggcaacaggcaaccuagucguuccuagguacgccuuugcuauggaacggaacgccggguccggaaucauaauuagcgauaccccagugcaugacugcaauacgacuugucaaacaccgaaaggcgcaaucaacaccucgcuccccuuccagaauauucacccuaucacuaucgguaagugcccaaaguauguaaaaucuacaaagcugcgccuugcuaccgggcugagaaacgugcccuccauucagucaaggggauuguuuggcgccauagcgggcuucaucgaagggggauggacggguauggucgacggcugguacggguaucaucaccagaaugaacaaggaaguggcuacgccgcagaucucaaaagcacccagaacgcuauugacaagaucacaaauaaagugaacuccguuauagagaagaugaauacucaguuuaccgccguggguaaggaguucaaccaccuggaaaaacggauugagaauuuaaacaagaaagucgaugacggguuccuggauaucuggacauacaaugcugaacuccuugugcuguuggagaacgaacgcacucuagacuaucaugauucuaauguaaagaaccuguacgagaaaguucgaaaccagcucaagaauaacgccaaggagaucggcaauggauguuuugaguucuaucacaaaugcgacaacaccuguauggaaagcgugaagaauggcacauacgauuauccuaaauacucagaagaggcaaagcugaacagagaagagauugacggggucaaacuugagaguaccaggaucuaucaaauucuggccauauacuccacugcugcgagcucuuuggugcucgucgugucacugggagcaaucaguuuuuggaugugcagcaaugguuccuuacagugccggauuuguaucuga

SEQ ID NO: 134945 - RNA, 1701 nt, Artificial Sequence
  derived and/or modified CDS sequence (opt3) from hemagglutinin__InfluenzaA__AEI87074
augaaggccacccuggugguccuccuuuacacauucgcuacugcaaacgccgacacgcugugcaucggcuaucacgcgaauaacagcaccgauacaguugacacuguguuggagaaaaauguaaccgugacacauuccgucaacuuacuggaagauaagcacaaugggaaacuauguaagcucagaggaguggcuccccugcaucuugguaaaugcaacauugccggcuggauacuggggaauccugagugugaaucuuugucaaccgcaaguagcugguccuacaucguugagacuucuucgucagacaacggaacaugcuauccaggcgauuuuauuaauuacgaggagcucagggagcagcugagcaguguguccucuuucgaacgguuugagaucuucccgaagaccagcuccuggcccaaccacgacucaaauaagggugucacggccgcuuguccucaugcaggggccaaaaguuuuuauaagaaccugauuuggcucgugaaaaagggaaauagcuacccaaaauuaucuaaguccuauaucaacgauaagggcaaagaaguacugguucuuuggggcauacaccaccccucaacuaccgcugaccaacagagcuuguaccagaaugccgaugcguacguguucgucgggacaagucgcuauucuaagaaauuuaagccugagaucgcaauucgaccaaaagugcgugaccaggagggaagaaugaacuacuauuggacucugguggaacccggugauaagaucaccuucgaggccacaggcaaccuagucguuccuagguacgcuuuugccauggaacggaaugcaggguccggaauuaucauaagcgacaccccagugcaugauugcaacacgacuugucaaacaccgaaaggcgcuauuaauaccucgcuccccuuccagaacauccacccuauuacuaucgguaagugcccaaaguauguaaaaucuacaaagcugcgccuugccaccgggcugagaaaugugcccuccauccagucaaggggauuguuuggcgcgauugccggcuucauagaagggggauggacggguauggucgacggcugguacggguaucaucaccagaacgaacaaggaaguggcuacgcagcugaccucaaaagcacccagaaugccaucgauaagauuacaaacaaaguuaauuccgugaucgagaagaugaacacucaguuuaccgcuguggguaaggaguucaaucaccuggaaaaacggauagagaacuuaaauaagaaagucgacgauggguuccuggacauuuggacauacaacgccgaacuccuugugcuguuggagaaugaacgcacucuagauuaucaugacucuaacguaaagaaccuguacgagaaaguucgaaaucagcucaagaacaaugcaaaggagaucggcaacggauguuuugaguucuaucacaaaugcgauaauaccuguauggaaagcgugaagaacggcacauacgacuauccuaaauacucagaagaggccaagcugaauagagaagagaucgauggggucaaacuugagaguaccaggauuuaucaaauccuggcuauuuacuccacuguggcgagcucuuugguccucgugguuucacugggagcaauaaguuuuuggaugugcagcaacgguuccuuacagugccggaucuguauuuga

SEQ ID NO: 134946 - RNA, 1701 nt, Artificial Sequence
  derived and/or modified CDS sequence (opt3) from hemagglutinin__InfluenzaA__AEI87094
augaaggccauccuggugguccuccuuuacaccuucgcuacagcaaacgccgacacucugugcauuggcuaucacgcgaauaacagcacggauaccguugacacaguguuggagaaaaauguaacugugacccauuccgucaacuuacuggaagauaagcacaaugggaaacuauguaagcucagaggaguggcuccccugcaucuugguaaaugcaacauagccggcuggauccuggggaauccugagugugaaucuuugucaacagcaaguagcugguccuacauuguugagaccucuucgucagacaacggaacuugcuauccaggcgauuuuaucgacuacgaggagcucagggagcagcugagcaguguguccucuuucgaacgguuugagauuuucccgaagacaagcuccuggcccgaucacgacucaaauaagggugucaccgccgcuuguccucaugcaggggccaaaaguuuuuauaagaaccugaucuggcucgugaaaaagggaaauagcuacccaaaauuaucuaaguccuauauaaacgauaagggcaaagaaguacugguucuuuggggcauccaccaccccucaacgagcgcugaccaacagaguuuguaccagaaugccgaugcguacguguucgucgggacuucucgcuauuccaagaaauuuaagccugagauugcaauccgaccaaaagugcgugaccaggagggaagaaugaacuacuauuggacccugguggaacccggugauaagauuacauucgaggccacuggcaaucuagucguuccuagguacgcuuuugccauggaacggaacaccgggagcggaaucauaauuucggacacaccagugcaugacugcaacaccacgugucaaacuccgaaaggcgcaaucaauacaucucuccccuuccagaacauucacccuaucaccaucgguaagugcccaaaguauguaaaauccacuaagcugcgccuugcuacagggcugagaaaugugcccucaauucagaguaggggauuguuuggcgccauagcgggcuucaucgaagggggauggaccgguauggucgauggcugguacggguaucaucaccagaacgaacaaggaagcggcuacgccgcagaccucaaauccacgcagaaugcuauugauaagaucaccaacaaaguuaauucugugauagagaagaugaacacacaguuuacugccguggguaaggaguucaaucaccuggaaaaacggauugagaacuuaaauaagaaagucgacgauggguuccuggacaucuggaccuacaacgcugaacuccuugugcuguuggagaaugaacgcacacuagauuaucaugacagcaacguaaagaaucuguacgagaaaguucgaucacagcucaagaacaacgccaaggagaucggcaauggauguuuugaguucuaucacaaaugcgauaacacuuguauggaaagugugaagaauggcaccuacgacuauccuaaauacuccgaagaggcaaagcugaacagagaaaagauugaugggaucaaacuugagagcacaaggauuuaucaaauacuggccaucuacucuaccgucgcuucaaguuuggugcucgucgugagccugggagcgauuuccuuuuggaugugcucuaaugguucguuacagugccggaucuguaucuga

SEQ ID NO: 134947 - RNA, 1701 nt, Artificial Sequence; identical to SEQ ID NO: 134946
  derived and/or modified CDS sequence (opt3) from hemagglutinin__InfluenzaA__AEI87104

SEQ ID NO: 134948 - RNA, 1698 nt, Artificial Sequence; identical to SEQ ID NO: 131674
  derived and/or modified CDS sequence (opt3) from hemagglutinin__InfluenzaA__AEI91963

SEQ ID NO: 134949 - RNA, 1701 nt, Artificial Sequence; identical to SEQ ID NO: 131881
  derived and/or modified CDS sequence (opt3) from hemagglutinin__InfluenzaA__AEI91977

SEQ ID NO: 134950 - RNA, 1701 nt, Artificial Sequence; identical to SEQ ID NO: 133405
  derived and/or modified CDS sequence (opt3) from hemagglutinin__InfluenzaA__AEI91978

SEQ ID NO: 134951 - RNA, 1701 nt, Artificial Sequence; identical to SEQ ID NO: 132347
  derived and/or modified CDS sequence (opt3) from hemagglutinin__InfluenzaA__AEI91998

SEQ ID NO: 134952 - RNA, 1701 nt, Artificial Sequence
  derived and/or modified CDS sequence (opt3) from hemagglutinin__InfluenzaA__AEI91999
augaagaccaucauugcccugagcuacauacucugccuuguguucgcucagaaacugcccggcaacgacaauuccacagcaacuuuguguuuagggcaccaugccgucccuaacggaacgaucguuaagaccauuacaaaugaucaaaucgaggugacuaacgcgaccgaacugguacagucuucaaguacaggugagauuugcaauagcccacaccagauccuagacggcgaaaacuguacccucauagaugcucugcuuggggacccgcagugcgauggauuucaaaauaaaaagugggaccuguucguggagagauccaaagccuauucuaacuguuaccccuaugaugucccugacuacgcaucguugaggucacucguggccagcaguggcacucuggaauuuaauaacgaguccuucaauuggacagguguuacccagaacgggacgucuagcgcuugcauccggcgcuccaauaacucauuuuucagucgacugaauuggcucacucauuuaaacuuuaaguauccagcacugaacgugaccaugcccaauaacgagcaguucgauaaguuguacauuuggggaguccaccauccuggcacagacaaagaucagaucuuuuuguaugcccaagcuagcggccguauuacugugucuaccaagagaucccagcaggccguaaucccaaauauagggucaaggccccggguucgcaacauuccuagcagaaucaguauuuacuggacaaucgugaaaccaggagacauccugcuaauuaauucuaccgguaaccucauagcgccgaggggcuacuucaagauccgguccgggaaaagcucgauuaugcgcucugaugcacccaucggaaaguguaauuccgaaugcauaacgccuaacggcucaauucugaaugacaagccauuucagaacgucaaucgaaucacuuauggugccugucccagauacgugaaacaaaacacacuuaagcuggcuaccgggaugaggaaugugccugagaaacagacucggggaaucuucggcgccauugcaggcuuuaucgaaaacgggugggagggaauggucgacgguugguauggcuuccgucaccagaauagugaggggcgcggacaagcugccgaucuuaagagcacacaggcggccauugaccagauaaacggcaaacucaacagacugaucgguaagaccaaugaaaaauuccaccagauugagaaggaauuuuccgagguugaagggaggauccaagauuuagagaaguacguggaggacacgaaaaucgaucuguggucuuauaacgcagaacuccuuguagcucuggagaaucagcauaccauugacuugacagauagcgaaaugaacaagcuauucgagaaaacuaagaaacagcugcgggaaaaugccgaggacaugggcaacggaugcuuuaagauauaccacaagugugauaaugcuugcaucggcucaauucgaaacgggaccuaugaccaugauguguaccgcgacgaggcccucaauaacagauuccagaucaaaggagucgaacugaagagugguuacaaagacuggauucuuuggaucuccuuugcaauaagcugcuuccuguuguguguggcccuccugggcuuuaucaugugggcuugccaaaaggggaauauuagguguaacaucugcauuuga

SEQ ID NO: 134953 - RNA, 1698 nt, Artificial Sequence
  derived and/or modified CDS sequence (opt3) from hemagglutinin__InfluenzaA__AEI92018
augaaggugaaacugcucguccuucugugcaccuucacagccacuuacgcugacacgaucuguauuggcuaucacgcaaacaauagcaccgauacaguugacacuguguuggagaagaacguaaccgugacacauuccgucaauuuacuggaaaacucucacaaugggaaacuaugccuccugaagggaauagcgccccuucagcuggguaacuguucaguggccggcuggaucuuggggaauccugagugcgaacuccugauuaguaaagagagcugguccuacaucguugaaaagccaaacccggagaauggaaccuguuaucccggccauuuugcugauuacgaggaacugagagagcaacucucuucggugagcucauucgaaagguuugagauuuucccuaaggagaguuccuggccaaaccacacugucacaggugugucugccagcugcucccauaauggggaaucaaguuuuuaucggaacuuacuguggcuuaccggcaaaaauggauuguaccccaaccugagcaagucuuaugcaaauaacaaagagaaggaaguucuaguacucuggggcgugcaccacccuccaaacaucgccgaccagaaaacgcuguaccauacugagaaugcuuacgucuccguggugucaagccacuauagucgcaaguucacccccgaaauagcaaagcgaccuaaaguccgugaucaggaggggagaaucaacuacuauuggacacuucuggagccaggagacacuauuaucuuugaagccaaugguaacuugauugcuccgagguacgccuucgcgcucucucggggcuuuggguccggaaucauaaauagcaacgcacccauggauaagugugacgccaaaugccagaccccucaaggcgcuauuaauucgucucugccauuccagaacguucaucccgugacaaucggugaguguccuaaguauguacgcuccgccaaauuaagaauggugaccgggcugaggaauauuccaucaauccagagucggggacucuuuggcgcaaucgcuggcuucauugaagggggauggacggguauggucgauggcugguacggguaucaccaccagaacgagcaaggaagcggcuacgccgcggaccagaaguccacucagaaugccauaaacgguaucacaaauaaagugaacucuguuauugaaaagaugaauacccaguuuacugcaguggggaaggaguucaacaaacuugagcgccgaauggaaaaccugaauaagaaagucgaugacggcuucaucgauauauggacauacaacgcugaguugcuagugcugcucgaaaaugagagaacccuggacuuucaugacagcaacguaaagaaucuuuaugaaaaaguuaagucacaacugaagaacaaugccaaagagauuggaaacggcugcuucgaguuuuaccacaaguguaaugaugaaugcauggagagugugaaaaacgggacguaugacuaccccaaguauuccgaagagagcaaauugaauagggagaagaucgauggagucaagcucgaaucuauggguguguaccagauccuggcuauuuauucaaccgucgccaguagcuuagugcugcuaguuucccucggcgcaaucucuuucuggaugugcucgaacgggagccugcagugucggauuugcauauga

SEQ ID NO: 134954 - RNA, 1701 nt, Artificial Sequence; identical to SEQ ID NO: 134929
  derived and/or modified CDS sequence (opt3) from hemagglutinin__InfluenzaA__AEJ10400

SEQ ID NO: 134955 - RNA, 1701 nt, Artificial Sequence
  derived and/or modified CDS sequence (opt3) from hemagglutinin__InfluenzaA__AEJ10410
augaagaccauccuggugguccuccuuuacacauucgccacugcuaacgcagacacgcugugcauuggcuaucacgccaauaacagcaccgauacaauagacacuguuuuggagaaaaaugugaccguaacacauuccgugaacuuacuggaagauaagcacaaugggaaacuauguaagcucagaggagucgcgccccugcaucuugguaaaugcaacaucgcuggcuggauucuggggaauccugagugugaaucuuugucaaccgccaguagcugguccuacaucguggagacuucuucgucagacaacggaacaugcuauccaggcaauuuuauugauuacgaggagcucagggagcagcugagcaguguuuccucuuucgaacgguuugagaucuucccgaagaccagcuccuggucagaccacgauaguaacaagggugugacggcagccuguccccaugcuggggcaaaaaguuuuuauaagaaucugauauggcucgucaaaaagggaaacucuuacccuaaauuauccaagucauauaucaaugacaagggcaaagaagugcugguacuuuggggcauucaccacccaagcacuagcgccgaucaacagucuuuguaccagaacgcugacgccuacguuuucguggggaccucccgcuauagcaagaaauuuaagcccgagaucgcgauucgaccuaaaguccgugaucaggagggaagaaugaauuacuauuggacacugguggaaccaggugacaagaucacuuucgaggcaaccggcaaccuaguggcccccagguacgcuuuugccauggaacggaacgcagggucgggaauaauuaucucugauacaccuguccaugacugcaauaccacgugucaaacuccaaaaggcgcuauuaacacaucccucccguuccagaauauccaccccaucaccauugguaagugcccuaaguauguuaaaucaacuaagcugcgccuugccacagggcugagaaacgugccaaguauacagagcaggggauuguuuggcgcgaucgccggcuucauugaagggggauggaccgguaugguagacggcugguacggguaucaucaccagaaugaacaaggauccggcuacgcagcugaucucaaaucuacgcagaacgccaucgacaagauaaccaauaaagugaacagcgucauugagaagaugaauacacaguuuacugcuguggguaaggaguucaaccaccuggaaaaacggaucgagaauuuaaacaagaaaguugaugacggguuccuggauaucuggaccuacaaugccgaacuccuugugcuguuggagaacgaacgcacacuagacuaucaugauucaaaugucaagaaccuguacgagaaagugcgaagucagcucaagaacaaugcaaaggagauuggcaacggauguuuugaguucuaucacaaaugcgacaauacuuguauggaauccguaaagaacggcaccuacgauuaucccaaauacagcgaagaggccaagcugaauagagaagagaucgacgggguuaaacuugagucuacaaggauuuaucaaauacuggcuaucuacucaaccguggcgaguagcuugguccucguggucucccugggagcaauuucuuuuuggaugugcucgaacgguagcuuacagugccggaucuguaucuga

SEQ ID NO: 134956 - RNA, 1701 nt, Artificial Sequence
  derived and/or modified CDS sequence (opt3) from hemagglutinin__InfluenzaA__AEJ10420
augaaggccauccuggugguccuccuuuacaccuucgcuacagcaaacgccgacacucugugcauuggcuaucacgcgaauaacagcacggauaccguugacacaguguuggagaagaauguaacugugacccauuccgucaacuuacuggaagauagacacaaugggaagcuauguaaacucaggggaguggcuccccugcaucuugguaagugcaacauagccggcuggauccuggggaauccugagugugaaucuuugucaacagcaaguagcugguccuacauuguugagaccucuucgucagacaacggaacuugcuauccaggcgauuuuaucgacuacgaggagcuccgggagcagcugagcaguguguccucuuucgaacgcuuugagauuuucccgaaaacaagcuccuggcccgaucacgacucaaauaagggugucaccgccgcuuguccucaugcaggggccaagaguuuuuauaaaaaccugaucuggcucgugaagaaaggaaauagcuacccaaaguuaucuaaauccuauauaaacgauaagggcaaggaaguacugguucuuuggggcauccaccaccccucaacgagcgcugaccaacagaguuuguaccagaaugccgaugcguacguguucgucgggacuucucgauauuccaaaaaguuuaaaccugagauugcaauccguccaaaggugagagaccaggagggaaggaugaacuacuauuggacccugguggaacccggugauaaaauuacauucgaggccacuggcaaucuagucguuccucgguacgcuuuugccauggaacgcaacgcagggagcggaaucauaauuucggacaccccagugcaugacugcaacacaaccugucaaacgccgaagggcgcuaucaauacuucucuccccuuccagaacauucacccuaucacaaucgguaaaugcccaaaguauguaaaguccaccaaacugagacuugccacugggcugaggaaugugcccucaauucagagucggggauuguuuggcgcgauagccggcuucaucgaagggggauggacagguauggucgauggcugguacggguaucaucaccagaacgaacaaggaagcggcuacgcagcugaccucaaguccacccagaaugccauugauaaaaucacgaacaagguaaauucuguuauagagaaaaugaacacccaguuuacagcuguggguaaggaguucaaucaccuggaaaagcgcauugagaacuuaaauaaaaaggucgacgauggguuccuggacaucuggacuuacaacgccgaacuccuugugcuguuggagaaugaacgaacccuagauuaucaugacagcaacgugaaaaaucuguacgagaagguuagaucacagcucaaaaacaacgcaaaggagaucggcaauggauguuuugaguucuaucacaagugcgauaacacauguauggaaagugugaaaaauggcacuuacgacuauccuaaguacuccgaagaggccaaacugaacagggaagagauugauggggucaaacuugagagcacccggaucuaucaaauucuggcuauauacucuacaguggcgucaaguuugguccucgugguuagccugggagcaaucuccuuuuggaugugcucuaaugguucguuacagugccguauuuguaucuga

SEQ ID NO: 134957 - RNA, 1701 nt, Artificial Sequence
  derived and/or modified CDS sequence (opt3) from hemagglutinin__InfluenzaA__AEJ10430
augaaggccauccuggugguccuccuuuacaccuucgcuacagcaaacgccgacacucugugcauuggcuaucacgcgaauaacagcacggauaccguugacacaguguuggagaaaaauguaacugugacccauuccgucaacuuacuggaagauaagcacaaugggaaacuauguaagcucagaggaguggcuccccugcaucuugguaaaugcaacauagccggcuggauccuggggaauccugagugugaaucuuugucaacagcaaguagcugguccuacauuguugagaccucuucgucagacaacggaacuugcuauccaggcgauuuuaucgacuacgaggagcucagggagcagcugagcaguguguccucuuucgaacgguuugagauuuucccgaagacaagcuccuggcccaaucacgauucaaacaagggugucaccacggccuguccucaugcuggggcaaaaaguuuuuauaagaaucugaucuggcucgugaaaaagggaaacagcuacccaaaauuaucuaaguccuauauaaaugacaagggcaaagaaguacugguucuuuggggcauccaccaucccccuacuucagccgaucaacagagcuuguaccagaacgcugacgccuacguguucgucgggaccagucgcuauucuaagaaauuuaagccagagauugcgauccgacccaaagugcgugaucaggagggaagaaugaauuacuauuggacacugguggaaccuggugacaagauuacuuucgaggcaaccggcaaccuagucguuccaagguacgccuuugcuauggaacggaacgccggguccggaaucauaauuagcgauacaccggugcacgacugcaauaccacgugucaaacucccaaaggcgcaaucaacacaucgcucccuuuccagaauauucacccaaucaccaucgguaagugccccaaguauguaaaaucuacuaagcugcgccuugcuacagggcugagaaacgugccuuccauucagucaaggggauuguuuggcgccauagcgggcuucaucgaagggggauggaccgguauggucgacggcugguacggguaucaucaccagaaugaacaaggaaguggcuacgccgcagaucucaaaagcacgcagaacgcuauugacgagaucaccaauaaggugaacuccguuauagagaaaaugaauacacaguuuacugccguggguaaggaguucaaccaccuggaaaagcggauugaaaauuuaaacaaaaaggucgaugacggguuccuggauaucuggaccuacaaugcugagcuccuugugcuguuggaaaacgagcgcacacuagacuaucaugauucuaauguaaagaaccuguacgagaagguucgaagccagcucaaaaacaaugccaaggaaaucggcaacggauguuuugaguucuaucacaagugcgacaauacuuguauggaaucagugaaaaacggcaccuacgauuauccaaaguacagugaggaagcaaaacugaauagagaggagauugacggggucaaacuugaauccacaaggaucuaucaaauucuggccauauacagcaccguggcuucuucauugguccucgugguuagucugggagcgaucagcuuuuggaugugcuccaacgguucuuuacagugccggauuuguaucuga

SEQ ID NO: 134958 - RNA, 1701 nt, Artificial Sequence
  derived and/or modified CDS sequence (opt3) from hemagglutinin__InfluenzaA__AEJ10440
augaaggccauccuggugguccuccuuuacaccuucgcuacagcaaacgccgacacucugugcauuggcuaucacgcgaauaacagcacggauaccguugacacaguguuggagaaaaauguaacugugacccauuccgucaacuuacuggaagauaagcacaaugggaaacuauguaagcucagaggaguggcuccccugcaucuugguaaaugcaacauagccggcuggauccuggggaauccugagugugaaucuuugucaacagcaaguagcugguccuacauuguugagaccucuucgucagacaacggaacuugcuauccaggcgauuuuaucgacuacgaggagcucagggagcagcugagcaguguguccucuuucgaacgguuugagauuuucccgaagacaagcuccuggcccaaucacgauucaaacaagggugucaccgccgcuuguccucaugcaggggccaaaaguuuuuauaagaaucugaucuggcucgugaaaaagggaaacagcuacccaaaauuaucuaaguccuauauaaaugacaagggcaaagaaguacugguucuuuggggcauccaccaccccucaacgacugcugaucaacagauuuuguaccagaacgccgacaccuacguguucgucgggacaagccgcuauaguaagaaauuuaagccugagaucgcgauucgaccaaaagugcgugaucaggagggaagaaugaauuacuauuggacucugguggaacccggugacaagaucaccuucgaggcaacaggcaaccuagucguuccuagguacgccuuugcuauggaacggaacgccgggucuggaauaauuaucuccgauaccccagugcaugacugcaauacgacuugucaaacaccgaaaggcgcaauuaacaccagccuccccuuccagaauauccacccuaucacuauugguaagugcccaaaguauguaaaaucgacaaagcugcgccuugcuaccgggcugagaaacgugcccucuauacaguccaggggauuguuuggcgccaucgcgggcuucauugaagggggauggacggguauggucgacggcugguacggguaucaucaccagaaugaacaaggaucaggcuacgccgcagaucucaaaaguacccagaacgcuaucgacaagauaacaaauaaagugaacagcguuauugagaagaugaauacucaguuuaccgccguggguaaggaguucaaccaccuggaaaaacggaucgagaauuuaaacaagaaagucgaugacggguuccuggauaucuggacauacaaugcugaacuccuugugcuguuggagaacgaacgcacucuagacuaucaugauuccaauguaaagaaccuguacgagaaaguucgaaaccagcucaagaauaacgccaaggagauuggcaauggauguuuugaguucuaucacaaaugcgacaacaccuguauggaaucugugaagaauggcacauacgauuauccuaaauacagcgaagaggcaaagcugaacagagaagagaucgacggggucaaacuugagucaaccaggauuuaucaaauacuggccaucuacaguacuguggcuuccagcuugguccucgugguuucucugggagcgauuucauuuuggaugugcaguaaugguagcuuacagugccggaucuguaucuga

SEQ ID NO: 134959 - RNA, 1701 nt, Artificial Sequence; identical to SEQ ID NO: 134872
  derived and/or modified CDS sequence (opt3) from hemagglutinin__InfluenzaA__AEJ10450

SEQ ID NO: 134960 - RNA, 1701 nt, Artificial Sequence
  derived and/or modified CDS sequence (opt3) from hemagglutinin__InfluenzaA__AEJ10480
augaaggccauccuggugguccuccuuuacaccuucgcuacagcaaacgccgacacucugugcauuggcuaucacgcgaauaacagcacggauaccguugacacaguguuggagaaaaauguaacugugacccauuccgucaacuuacuggaagauaagcacaaugggaaacuauguaagcucagaggaguggcuccccugcaucuugguaaaugcaacauagccggcuggauccuggggaauccugagugugaaucuuugucaacagcaaguagcugguccuacauuguugagaccucuucgucagacaacggaacuugcuauccaggcgauuuuaucaauuacgaggagcucagggagcagcugagcaguguguccucuuucgaacgguuugagauuuucccgaagacaagcuccuggcccaaccacgacucaaauaagggugucaccgccgcuuguccucaagcaggggccaaaaguuuuuauaagaaccugaucuggcucgugaaaaagggaaauagcuacccaaaauuaucuaaguccuauauaaacgauaagggcaaagaaguacugguucuuuggggcauccaucaccccucaacgagcgcugaccagcagaguuuguaccagucugccgaugcguacguguucgucgggacuuccaaguauagcaaaaaguuuaaaccugagauugcagugcgcccaaaggugcgagaccaagagggacguaugaauuacuauuggacccuggucgaacccggugauaaaaucacauucgaggccacuggcaaccuacucguuccuagauacgcuuuugccauggaaaggaacgcagggucgggaauuaucauaucugacaccccagugcacgauugcaauacaaccugucagacgccgaagggcgcuauuaacacuucccugcccuuccagaauauccauccuauuacaaucgguaagugcccaaaauauguaaagucaaccaaacuucggcuggccacuggguugcgcaacgugcccaguauccagagcagaggacucuuuggcgcgauugccggcuucauagaagggggauggacagguauggucgacggcugguacggguaucaccaucaaaaugcacagggauccggcuacgcugccgaccugaagucuacccagaacgcuaucgauaaaauuacgaauaaggugaacagcguuaucgaaaagaugaauacccaguuuacagccguggguaaagaguucaaccacuuagagaagaggauagaaaaucugaacaaaaaggucgacgauggguuccucgacauuuggacuuacaaugcagagcuucugguguugcuagaaaacgagcggacccuggauuaucacgacucaaauguuaaaaaccucuacgaaaagguacgcagucaacugaagaacaaugccaaagagaucggcaacggauguuuugaguucuaucauaagugcgauaauacauguauggaauccgugaaaaacggcacuuacgacuauccuaaguacagcgaggaagcuaaacuuaaucgagaggaaaucgauggggucaagcuggagucuaccagaauuuaucagaucuuggcgauuuacucaacaguggcaaguagccucguccuggugguuuccuuaggagccauaucuuuuuggaugugcucgaacgguagccugcagugcaggaucuguauuuga

SEQ ID NO: 134961 - RNA, 1701 nt, Artificial Sequence
  derived and/or modified CDS sequence (opt3) from hemagglutinin__InfluenzaA__AEJ10490
augaaggccauccuggugguccuccuuuacaccuucgcuacagcaaacgccgacacucugugcauuggcuaucacgcgaauaacagcacggauaccguugacacaguguuggagaaaaauguaacugugacccauuccgucaacuuacuggaagauaagcacaaugggaaacuauguaagcucagaggaguggcuccccugcaucuugguaaaugcaacauagccggcuggauccuggggaauccugagugugaaucuuugucaacagcaaguagcugguccuacauuguugagaccucuucgucagacaacggaacuugcuauccaggcgauuuuaucgacuacgaggagcucagggagcagcugagcaguguguccucuuucgaacgguuugagauuuucccgaagacaagcuccuggcccaaucacgauucaaacaagggugucaccacggccuguccucaugcuggggcaaaaaguuuuuauaagaaucugaucuggcucgugaaaaagggaaacagcuacccaaaauuaucuaaguccuauauaaaugacaagggcaaagaaguacugguucuuuggggcauccaccaucccccuacuucagccgaucaacagagcuuguaccagaacgcugacgccuacguguucgucgggaccagucgcuauucuaagaaauuuaagccagagauugcgauccgacccaaagugcgugaucaggagggaagaaugaauuacuauuggacacugguggaaccuggugacaagauuacuuucgaggcaaccggcaaccuagucguuccaagguacgccuuugcuauggaacggaacgccggguccggaaucauaauuagcgauacaccggugcacgacugcaauaccacgugucaaacucccaaaggcgcaaucaacacaucgcucccuuuccagaauauucacccaaucaccaucggucgcugccccaaguauguaaagucuacuaaacugagacuugcuacagggcugaggaacgugccuuccauucagucacggggauuguuuggcgccauagcgggcuucaucgaagggggauggaccgguauggucgacggcugguacggguaucaucaccagaaugaacaaggaaguggcuacgccgcagaucucaagagcacgcagaacgcuauugacgguaucaccaauaaagugaacuccguuauagagaagaugaauacacaguuuacugccguggggaaagaguucaaccaccuggaaaagcgcauugagaauuuaaacaagaaagucgaugacggcuuccuggauaucuggaccuacaaugcugaacuccuugugcuguuggagaacgaacgaacacuagacuaucaugauucuaauguaaagaaccuguacgagaaaguuagaagccagcucaagaacaaugccaaagagaucggaaacggcuguuuugaguucuaucacaagugcgacaauacuuguauggaaucagugaagaacgggaccuacgauuauccaaaauacagugaagaggcaaagcugaauagggaagagauugacggagucaaacuugaguccacaaugaucuaucaaauucuggccauauacagcaccguggcuucuucauugguccucaucgugagucugggugcgauuagcuuuuggaugugcuccaacggcucuuuacagugccggaucuguaucuga

SEQ ID NO: 134962 - RNA, 1701 nt, Artificial Sequence
  derived and/or modified CDS sequence (opt3) from hemagglutinin__InfluenzaA__AEJ10500
augaaggccauccuggugguccuccuuuacaccuucgcuacagcaaacgccgacacucugugcauuggcuaucacgcgaauaacagcacggauaccguugacacaguguuggagaaaaauguaacugugacccauuccgucaacuuacuggaagggaagcacaauggaaaacuauguaagcucagagguguggcuccccugcaucuuggcaaaugcaacauagccggguggauccugggaaauccugagugugaaucuuugucaacagcaaguagcugguccuacauuguugagaccucuucgucagauaacggcacuugcuauccaggugacuuuaucgauuacgaagaacucagggagcagcugagcaguguguccucuuucgaacgguuugagauuuucccgaagacaagcuccuggcccaaucacgacucaaacaagggggucaccgccgcuuguccucaugcaggagccaaaggcuuuuauaagaaucugaucuggcucgugaaaaagggcaacaguuacccaaaauuaaauaagagcuauauaaacgauaaggggaaagaaguacugguucuuuggggaauccaccaccccucuacgacugcugaccaacaguccuuguaccagaaugccgauaccuacguguucgucgguacaucacgcuauagcaagaaauuuaagccugagauugcgauccgaccaaaagugcgugaccaggagggcagaaugaacuacuauuggacucugguggaacccggggauaagauuaccuucgaggcaacaggaaaccuagucguuccuagguacgccuuugcuauggaacggaaugccggcagugguaucauaauuucugacaccccagugcaugauugcaacacgacuugucaaacaccgaaaggggcaaucaauaccucccuccccuuccagaacauucacccuaucacuaucggaaagugcccaaaguauguaaaaagcacaaagcugcgccuugcuaccggccugagaaaugugcccucgauucagucuaggggcuuguuuggggccauagcgggauucaucgaggguggcuggacggggauggucgacggaugguacggcuaucaucaccagaacgaacaagguuccggguacgccgcagaccucaaaucaacccagaaugcuauugauaagaucacaaacaaagugaauaguguuauagagaagaugaacacucaguuuaccgccgugggcaaggaguucaaucaccuggaaaaacggauugagaacuuaaauaagaaagucgacgauggauuccuggacaucuggacauacaacgcugaacuccuugugcuguuggagaaugaacgcacucuagauuaucaugacagcaacguaaagaaccuguacgagaaaguucgaaaucagcucaagaacaaugccaaggagaucggcaacggguguuuugaguucuaucacaaaugcgauaauaccuguauggaguccgugaagaacggaacauacgacuauccuaaauacucugaagaggcaaagcugaauagagaagagauugauggugucaaacuugagagcaccaggaucuaucaaauucuggccauauacucaacuguggcuaguuccuugguccucgugguuagccugggcgcgaucucuuuuuggaugugcucaaacgggaguuuacagugccggauuuguaucuga

SEQ ID NO: 134963 - RNA, 1701 nt, Artificial Sequence; identical to SEQ ID NO: 134915
  derived and/or modified CDS sequence (opt3) from hemagglutinin__InfluenzaA__AEJ10510

SEQ ID NO: 134964 - RNA, 1701 nt, Artificial Sequence
  derived and/or modified CDS sequence (opt3) from hemagglutinin__InfluenzaA__AEJ10520
augaaggccauccuggugguccuccuuuacaccuucgcuacagcaaacgccgacacucugugcauuggcuaucacgcgaauaacagcacggauaccguugacacaguguuggagaaaaauguaacugugacccauuccgucaacuuacuggaagauaagcacaaugggaaacuauguaagcucagaggaguggcuccccugcaucuugguaaaugcaacauagccggcuggauccuggggaauccugagugugaaucuuugucaacagcaaguagcugguccuacauuguugagaccucuucgucagacaacggaacuugcuauccaggcgauuuuaucgacuacgaggagcucagggagcagcugagcaguguguccucuuucgaacgguuugagauuuucccgaagacaagcuccuggcccaauuaugauucaaacaagggugucaccgccgcuuguccucacgcaggggccaaaaguuuuuacaagaaucugaucuggcucgugaaaaagggaaacagcuauccaaaauuaucuaaguccuacauaaaugacaagggcaaagaaguacugguucuuuggggcauccaucaccccucaacgagcgcugaucaacagaguuuguaccagaacgccgacgcguauguguucgucgggacuucucgcuacuccaagaaauuuaagccugagauugcaauccgaccaaaagugcgugaucaggagggaagaaugaauuauuacuggacccugguggaacccggugacaagauuacauucgaggccacuggcaaccuagucguuccuagguaugcuuuugccauggaacggaacgcagggagcggaaucauaauuucggauaccccagugcacgacugcaauacaaccugucaaacgccgaaaggcgcuaucaacacuucucuccccuuccagaauauucauccuaucacaaucgguaagugcuccaaguacguaaaaucaaccaagcugcgccuugccacugggcugagaaacgugccaaguauucagagcaggggauuguuuggcgcgauagccggcuucaucgaagggggauggacagguauggucgacggcugguauggguaccaccaucagaaugaacaaggauccggcuacgcagcugaucucaaaucuacccagaacgccauugacgagaucacgaauaaggugaacagcguuauagagaaaaugaauacccaguuuacagcuguggguaaggaguucaaccaccuggaaaagcggauugaaaauuuaaacaaaaaggucgaugacggguuccuggauaucuggacuuauaaugccgagcuccuugugcuguuggaaaacgagcgcacccuagacuaccacgauucaaauguaaagaaccuguaugagaagguucgaagucagcucaaaaacaaugcaaaggaaaucggcaacggauguuuugaguucuaccauaagugcgacaauacauguauggaauccgugaaaaacggcacuuaugauuaccccaaguauagcgaggaagccaaacugaauagagaggagauugacggggucaaacuugaaucuaccaggaucuaccaaauucuggcuauauacucaacaguggcgaguagcuugguccucgugguuucccugggagcaaucucuuuuuggaugugcucgaacgguagcuuacagugccggauuuguaucuga

SEQ ID NO: 134965 - RNA, 1701 nt, Artificial Sequence; identical to SEQ ID NO: 130717
  derived and/or modified CDS sequence (opt3) from hemagglutinin__InfluenzaA__AEJ10530

SEQ ID NO: 134966 - RNA, 1701 nt, Artificial Sequence; identical to SEQ ID NO: 130717
  derived and/or modified CDS sequence (opt3) from hemagglutinin__InfluenzaA__AEJ10540

SEQ ID NO: 134967 - RNA, 1701 nt, Artificial Sequence; identical to SEQ ID NO: 130717
  derived and/or modified CDS sequence (opt3) from hemagglutinin__InfluenzaA__AEJ10550

SEQ ID NO: 134968 - RNA, 1701 nt, Artificial Sequence
  derived and/or modified CDS sequence (opt3) from hemagglutinin__InfluenzaA__AEJ10570
augaaggccauccuggugguccuccuuuacacccuggcuacagcaaacgccgacacuuugugcauuggcuaucacgcgaauaacagcacggauaccguugacacaguguuagagaaaaauguaacugugacccauuccgucaaccugcuagaagauaagcacgacgggaaacucuguaagcugagaggaguggcuccccuucaucuggguaaaugcaauauagccggcuggaucuuggggaacccugagugugaaucucucucaacagcaaguagcugguccuacauuguugagaccucuucgucagauaauggaacuugcuauccaggcgacuucaucgauuacgaggagcugagggagcagcugagcaguguguccucuuuugaacgguucgagauuuuuccgaagacaagcuccuggcccaaccacgacucaaauaagggugucaccgccgcuuguccucaugcaggggccaaaaguuucuauaagaaccucaucugguuagugaaaaagggaaauagcuacccaaaacugucuaaguccuauauaaacgauaagggcaaagaaguacuuguuuuguggggcauccaccaccccucaacgagcgcugaccaacagagucuguaccagaaugccgaugcguacguguuugucgggacuucucgcuauuccaagaaauucaagccugagauugcaauccgaccaaaagugcgugaccaggagggaagaaugaacuacuauuggacccuaguggaacccggugauaagauuacauuugaggccacuggcaaucucgucguuccuagguacgcuuucgccauggaacggaacgcagggagcggaaucauaauuucggacaccccagugcaugacugcaacgcuacaugucaaaccccgaaaggcgccaucaauacgucucugcccuuucagaacauucacccuaucacuaucgguaagugcccaaaguauguaaaauccacaaaacuucgccuggcgaccggguugagaaaugugcccucaauucagaguaggggacucuucggcgccauagcaggcuuuaucgaagggggauggacugguauggucgauggcugguacggguaucaucaccagaacgaacaaggaagcggcuacgcugccgaccugaaguccacacagaaugcuauugauaagaucaccaacaaaguuaauucugugauagagaagaugaacacgcaguucaccgccguggguaaggaguuuaaucacuuagaaaaacggauugagaaccugaauaagaaagucgacgauggguuccucgacaucuggacauacaacgcagaacuucugguguugcuagagaaugaacgcacucuggauuaucaugacagcaacguaaagaaucucuacgagaaaguucgaucacagcugaagaacaacgccaaggagaucggcaauggauguuucgaauuuuaucacaaaugcgauaacaccuguauggagagugugaagaauggcacauacgacuauccuaaauacuccgaagaggcuaaacuuaacagagaagagauugauggggucaagcuggagagcacuaggaucuaucaaauuuuggcgauauacucuaccguggcaucaagucucguccuggugguuagcuuaggagccaucuccuucuggaugugcucuaaugguucgcugcagugccggauuuguaucuga

SEQ ID NO: 134969 - RNA, 1701 nt, Artificial Sequence; identical to SEQ ID NO: 134968
  derived and/or modified CDS sequence (opt3) from hemagglutinin__InfluenzaA__AEJ10580

SEQ ID NO: 134970 - RNA, 1701 nt, Artificial Sequence
  derived and/or modified CDS sequence (opt3) from hemagglutinin__InfluenzaA__AEJ36302
augaaggccauccuggugguccuccuuuacaccuucgcuacagcaaacgccgacacucugugcauuggcuaucacgcgaauaacagcacggauaccguugacacaguguuggagaagaauguaacugugacccauuccgucaacuuacuggaagauaagcacaaugggaaacuauguaagcucagaggaguggcuccccugcaucuugguaaaugcaacauagccggcuggauccuggggaauccugagugugaaucuuugucaacagcaaguagcugguccuacauuguugagaccucuucgucauauaacggaacuugcuacccaggcgacuuuaucgauuaugaggagcucagggagcagcugagcaguguguccucuuucgaacgguuugagauuuucccgaagacaagcuccuggcccaaucacgacccuaacaagggugucaccgccgcuuguccacaugcaggggccaaaucauuuuacaagaaucugaucuggcucgugaaaaagggaaacaguuaucccaaauuaagcaagucuuacauaaaugauaagggcaaagaaguacugguucuuuggggcauccaccacccuuccacgucagcugaccaacagcgcuuguaccagaacgccgaugcguaugcauucguggggacuagccgauacaguaagaaauuuaagccagagauugccauccgucccaaagucagagaccaggagggaaggaugaauuauuacuggacccugguggaaccuggugauaagauuacauucgaggcuacuggcaaccuaguggucccacgguaugccuuugcaauggaacgcaacgcugggucuggaaucauaauuuccgacaccccggcccaugauugcaauacaaccugucaaacgcccaaaggcgcgaucaacacuagccucccuuuccagaauguucacccaauuacaaucgguaagugccccaaguacgugaaaucgaccaagcugagacuugccacugggcugaggaacguaccuucuauccagucccggggauuguuuggcgcaauugcuggcuucauagaagggggauggacagguaugguggacggcugguauggguaccaucaccagaaugaacaaggaucaggcuacgccgcugaccucaaaaguacccagaacgccuuugaugagaucacgaauaaggucaacagcgugauugagaaaaugaauacccaguucacagcaguugguaaggaguucaaccaccuggaaaagcgcaucgaaaauuuaaacaaaaagguggacgauggguuucuggacauauggacuuauaaugccgagcuccuuguccuguuggaaaacgagcgaacccuagauuaccaugacuccaaugugaaaaaccuguaugagaagguaagaucucagcucaaaaacaaugcuaaggaaacaggcaacggauguuucgaguuuuaccacaagugcgauaauacuuguauggaaagcguuaaaaacggcaccuaugacuacccaaaguauucagaggaagcgaaacugaauagggaggagauugauggggugaaacuugaaaguacacggaucuaccaaauccuggcaauuuacuccaccgucgccagcucuuuggugcucgucgugucacugggagcuaucaguuucuggaugugcagcaacgguuccuuacagugccguauuuguauauga

SEQ ID NO: 134971 - RNA, 1701 nt, Artificial Sequence
  derived and/or modified CDS sequence (opt3) from hemagglutinin__InfluenzaA__AEJ36312
augaaggccauccuggugguccuccuuuacaccuucgcuacagcaaacgccgacacucugugcauuggcuaucacgcgaauaacagcacggauaccguugacacaguguuggagaaaaauguaacugugacccauuccgucaacuuacuggaagauaagcacaaugggaaacuauguaagcucagaggaguggcuccccugcaucuugguaaaugcaacauagccggcuggauccuggggaauccugagugugaaucuuugucaacagcaaguagcugguccuacauuguugagaccucuucgucagacaacggaacuugcuauccaggcgauuuuaucgacuacgaggagcucagggagcagcugagcaguguguccucuuucgaacgguuugagauuuucccgaagacaagcuccuggcccgaucacgacucaaauaagggugucaccgccgcuuguccucaugcaggggccaaaaguuuuuauaagaaccugaucuggcucgugaaaaagggaaauagcuacccaaaauuaucuaaguccuauauaaacgauaagggcaaagaaguacugguucuuuggggcauccaccaccccucaacgagcgcugaccaacagaguuuguaccagaaugccgaugcguacguguucgucgggacuucucgcuauuccaagaaauuuaagccugagauugcaauccgaccaaaagugcgugaccaggagggaagaaugaacuacuauuggacccugguggaacccggugauaagauuacauucgaggccacuggcaaucuagucguuccuagguacgcuuuugccauggaacggaacgcagggagcggaaucauaauuucggacaccccagugcaugacugcaacacaaccugucaaacgccgaaaggcgcuaucaauacuucucuccccuuccagaacauucacccuaucacaaucgguaagugcccaaaguauguaaaauccaccaagcugcgccuugccacugggcugagaaaugugcccucaauucagaguaggggauuguuuggcgcgauagccggcuucaucgaagggggauggacagguauggucgauggcugguacggguaucaucaccagaacgaacaaggaagcggcuacgcagcugaccucaaauccacccagaaugccauugauaagaucacgaacaaaguuaauucugugauagagaagaugaacauucaguuuaccgcuguggguaaggaguucaaucaccuggaaaaacggaucgagaacuuaaauaagaaagucgacgauggguuccuggacaucuggacauacaacgccgaacuccuugugcuguuggagaaugaacgcacucuagauuaucaugacagcaacguaaagaaucuguacgagaaaguucgaucacagcucaagaacaacgcaaaggagauuggcaauggauguuuugaguucuaucacaaaugcgauaacaccuguauggaaagugugaagaauggcacauacgacuauccuaaauacuccgaagaggccaagcugaacagagaagagaucgauggggucaaacuugagagcacuaggauuuaucaaauacuggcuaucuacucuaccguggcgucaaguuugguccucgugguuagccugggagcaauuuccuuuuggaugugcucuaaugguucguuacagugccggaucuguaucuga

SEQ ID NO: 134972 - RNA, 1701 nt, Artificial Sequence
  derived and/or modified CDS sequence (opt3) from hemagglutinin__InfluenzaA__AEJ37853
augaaggccauccuggugguccuccuuuacaccuucgcuacagcaaacgccgacacucugugcauuggcuaucacgcgaauaacagcacggauaccguugacacaguguuggagaaaaauguaacugugacccauuccgucaacuuacuggaagauaagcacaaugggaaacuauguaagcucagaggaguggcuccccugcaucuugguaaaugcaacauagccggcuggauccuggggaauccugagugugaaucuuugucaacagcaaguagcugguccuacauuguugaggccucuucgucagacaacggaaccugcuauccaggcgauuuuaucgacuacgaggagcucagggagcagcugagcaguguguccucuuucgaacgguuugagauuuucccgaagacuagcuccuggcccaaucacgauucaaacaagggugucacagcugcauguccucaugccggggcuaaaaguuuuuauaagaaucugaucuggcucgugaaaaagggaaacagcuacccaaaauuaucuaaguccuauauaaaugacaagggcaaagaaguacugguucuuuggggcauccaccaccccucaaccagcgccgaucaacagaguuuguaccagaacgcggacgcauacguguucgucgggacgucucgcuauuccaagaaauuuaagccugagauugccauccgaccaaaagugcgugaucaggagggaagaaugaauuacuauuggacucugguggaacccggugacaagauuaccuucgaggcuacaggcaaccuagucguuccuagguacgccuuugcaauggaacggaacgcugggagcggaaucauaauuucggauacuccagugcaugacugcaauaccacaugucaaaccccgaaaggcgccaucaacacgucucuccccuuccagaauauucacccuaucacuaucgguaagugcccaaaguauguaaaauccacaaagcugcgccuugcgaccgggcugagaaacgugcccucaauucagaguaggggauuguuuggcgccauagcaggcuucaucgaagggggauggacugguauggucgacggcugguacggguaucaucaccagaaugaacaaggaagcggcuacgcugccgaucucaaauccacacagaacgcuauugacaagaucaccaauaaagugaacucuguuauagagaagaugaauacgcaguuuaccgccguggguaaggaguucaaccaccuggaaaaacggauugagaauuuaaacaagaaagucgaugacggguuccuggauaucuggacauacaaugcagaacuccuugugcuguuggagaacgaacgcacucuagacuaucaugauagcaauguaaagaaccuguacgagaaaguucgaucacagcucaagaacaaugccaaggagaucggcaacggauguuuugaguucuaucacaaaugcgacaauauguguauggaaagugugaagaacggcaccuacgauuauccuaaauacuccgaagaggcuaagcugaauagagaagagauugacggggucaaacuugagagcacaaggaucuaucaaauucuggcgauauacucuacuguggcaucaaguuugguccucgugguuagccugggagccaucuccuuuuggaugugcucuaacgguucguuacagugccggauuuguaucuga

SEQ ID NO: 134973 - RNA, 1701 nt, Artificial Sequence
  derived and/or modified CDS sequence (opt3) from hemagglutinin__InfluenzaA__AEJ37863
augaaggccauccuggugguccuccuuuacaccuucgcuacagcaaacgccgacacucugugcauuggcuaucacgcgaauaacagcacggauaccguugacacaguguuggagaaaaauguaacugugacccauuccgucaacuuacuggaagauaagcacaaugggaaacuauguaagcucagaggaguggcuccccugcaucuugguaaaugcaacauagccggcuggauccuggggaauccugagugugaaucuuugucaacagcaaguagcugguccuacauuguugagaccucuucgucagacaacggaacuugcuauccaggcgauuuuaucgacuacgaggagcucagggagcagcugagcaguguguccucuuucgaacgguuugagauuuucccgaagacaagcuccuggcccaaucacgauucaaacaagggugucaccgccgcuuguccucaugcaggggccaaaaguuuuuauaagaaucugaucuggcucgugaaaaagggaaacagcuacccaaaauuaucuaaguccuauauaaaugacaagggcaaagaaguacugguucuuuggggcauccaccaccccucaacgagcgcugaucaacagaguuuguaccagaacgccgacgcguacguguucgucgggacuucucgcuauuccaagaaauuuaagccugagauugcaauccgaccaaaacugcgugaucaggagggaagaaugaauuacuauuggacccuaguggaacccggugacaagauuacauucgaggccacuggcaaccucguggucccuagguacgcuuuugccauggaacggaacgcagggagcggaaucauaauuucggauaccccaguucaugacugcaauacaaccugucaaacgccgaaaggcgcuaucaacacuucucugcccuuccagaauauucacccuaucacaaucgguaagugcccaaaguaugugaaauccaccaaacuucgccuggccacuggguugagaaacguacccucaauucagaguaggggacucuuuggcgcgauagccggcuucaucgaagggggauggacagguaugguggacggcugguacggguaucaucaccagaaugaacaaggaagcggcuacgcagcugaucugaaguccacccagaacgccauugacaagaucacgaauaaagucaacucugugauagagaagaugaauacccaguuuacagcuguugguaaggaguucaaccacuuagaaaaacggauugagaaucugaacaagaaaguggaugacggguuccucgauaucuggacuuacaaugccgaacuucuggucuugcuagagaacgaacgcacccuggacuaucaugauagcaaugugaagaaccucuacgagaaaguacgaucacagcugaagaacaaugcaaaggagaucggcaacggauguuuugaguucuaucacaaaugcgacaauacauguauggaaaguguuaagaacggcacuuacgauuauccuaaauacuccgaagaggccaaacuuaauagagaagagauugacggggugaagcuggagagcaccaggaucuaucaaauuuuggcuauauacucuacagucgcgucaagucucgugcuggucgugagcuuaggagcaaucuccuuuuggaugugcucuaacgguucgcugcagugccggauuuguaucuga

SEQ ID NO: 134974 - RNA, 1701 nt, Artificial Sequence; identical to SEQ ID NO: 131881
  derived and/or modified CDS sequence (opt3) from hemagglutinin__InfluenzaA__AEJ37873

SEQ ID NO: 134975 - RNA, 1701 nt, Artificial Sequence; identical to SEQ ID NO: 134929
  derived and/or modified CDS sequence (opt3) from hemagglutinin__InfluenzaA__AEJ37883

SEQ ID NO: 134976 - RNA, 1701 nt, Artificial Sequence
  derived and/or modified CDS sequence (opt3) from hemagglutinin__InfluenzaA__AEJ37893
augaaggccauccuggugguccuccuuuacaccuucgcuacaacuaacgcagacacgcugugcauuggcuaucacgccaauaacagcaccgauacaguugacacuguguuggagaagaauguaaccgugacacauuccgucaacuuacuggaagauaagcacaaugggaaacuauguaagcucagaggaguggcgccccugcaucuugguaaaugcaacauagcuggcuggauccuggggaauccugagugugaaucuuugucaaccgccaguagcugguccuacauuguugagacuucuucgucagacaacggaacaugcuauccaggcaauuuuaucgauuacgaggagcucagggagcagcugagcaguguguccucuuucgaacgguuugagauuuucccgaagaccagcuccuggcccgaccacgauucaaacaagggugucacggcagccuguccucaugcuggggcaaaaaguuuuuauaagaaucugaucuggcucgugaaaaagggaaacagcuacccaaaauuaucuaaguccuauauaaaugacaagggcaaagaaguacugguucuuuggggcauccaccaccccucaacuagcgccgaucaacagaguuuguaccagaacgcugacgccuacguguucgucgggaccucucgcuauuccaagaaauuuaagccugagauugcgauccgaccaaaagugcgugaucaggagggaagaaugaauuacuauuggacacugguggaacccggugacaagauuacuuucgaggcaaccggcaaccuagucgccccuagguacgcuuuugccauggaacggaacgcagggagcggaaucauaauuucggauaaaccaguucaugacugcaauacaaccugucaaacgccgaagggcgcuaucaacacuucucuccccuuccagaauauucacccuaucacaaucgguaagugcccaaaauaugugaaguccaccaaacugcgccuugccacugggcugagaaacguacccucaauucagaguaggggauuguuuggcgcgauagccggcuucaucgaagggggauggacagguaugguggacggcugguacggguaucaucaccagaaugaacaaggaagcggcuacgcagcugaucucaaguccacccagaacgccauugacaaaaucacgaauaaggucaacucugugauagagaagaugaauacccaguuuacagcuguugguaaagaguucaaccaccuggaaaagcggauugagaauuuaaacaaaaagguggaugacggguuccuggauaucuggacuuacaaugccgaacuccuuguccuguuggagaacgaacgcacccuagacuaucaugauagcaaugugaaaaaccuguacgagaagguacgaucacagcucaagaacaaugcaaaagagaucggcaacggauguuuugaguucuaucacaagugcgacaauacauguauggaaaguguuaaaaacggcacuuacgauuauccuaaguacuccgaagaggccaaacugaauagagaagagauugacggggugaaacuugagagcaccaggaucuaucaaauucuggcuauauacucuacagucgcgucaaguuuggugcucgucgugagccugggagcaaucuccuuuuggaugugcucuaacgguucguuacagugccggauuuguaucuga

SEQ ID NO: 134977 - RNA, 1701 nt, Artificial Sequence; identical to SEQ ID NO: 134929
  derived and/or modified CDS sequence (opt3) from hemagglutinin__InfluenzaA__AEJ37903

SEQ ID NO: 134978 - RNA, 1701 nt, Artificial Sequence
  derived and/or modified CDS sequence (opt3) from hemagglutinin__InfluenzaA__AEJ37923
augaaggccauccuggugguccuccuuuacaccuucgcuacagcaaacgccgacacucugugcauuggcuaucacgcgaauaacagcacggauaccguugacacaguguuggagaaaaauguaacugugacccauuccgucaacuuacuggaagauaagcacaaugggaaacuauguaagcucagaggaguggcuccccugcaucuugguaaaugcaacauagccggcuggauccuggggaauccugagugugaaucuuugucaacagcaaguagcugguccuacauuguugagaccucuucgucagacaacggaacuugcuauccaggcaauuuuaucgauuacgaggagcucagggagcagcugagcaguguguccucuuucgaacgguuugagauuuucccgaagacaagcuccuggcccgaccacgauucaaacaagggugucaccgccgcuuguccucaugcaggggccaaaaguuuuuauaagaaucugaucuggcucgugaaaaagggaaacagcuacccaaaauuaucuaaguccuauauaaaugacaagggcaaagaaguacugguucuuuggggcauccaccaccccucaacgagcgcugaucaacagaguuuguaccagaacgccgacgcguacguguucgucgggacuucucgcuauuccaagaaauuuaagccugagauugcaauccgaccaaaagugcgugaucaggagggaagaaugaauuacuauuggacccugguggaacccggugacaagauuacauucgaggccacuggcaaccuagucgcuccuagguacgccuuugcaaucgaacggauggcugggagcggaauaauuaucucggauaccccaguucaugacugcaacacaaccugucaaacgccgaaaggcgccauuaauacuucucuccccuuccagaacauccacccuaucacaauugguaagugcccaaaguaugugaaauccaccaagcugcgccuugcgacugggcugagaaauguacccucaauacagaguaggggauuguuuggcgccaucgcaggcuucauugaagggggauggacagguaugguggacggcugguacggguaucaucaccagaacgaacaaggaagcggcuacgcugccgaucucaaauccacccagaaugcuaucgacaagauaacgaacaaagucaauucugugauugagaagaugaacacccaguuuacagccguugguaaggaguucaaucaccuggaaaaacggaucgagaacuuaaauaagaaaguggaugacggguuccuggauaucuggacuuacaacgcagaacuccuuguccuguuggagaaugaacgcacccuagacuaucaugauagcaacgugaagaaucuguacgagaaaguacgaucacagcucaagaacaacgccaaggagauuggcaauggauguuuugaguucuaucacaaaugcgacaacacauguauggaaaguguuaagaauggcacuuacgauuauccuaaauacuccgaagaggcuaagcugaacagagaagagaucgacggggugaaacuugagagcaccaggauuuaucaaauacuggcgaucuacucuacagucgcaucaaguuuggugcucgucgugagccugggagccauuuccuuuuggaugugcucuaaugguucguuacagugccggaucuguaucuga

SEQ ID NO: 134979 - RNA, 1701 nt, Artificial Sequence
  derived and/or modified CDS sequence (opt3) from hemagglutinin__InfluenzaA__AEJ37943
augaaggccauccuggugguccuccuuuacaccuucgcuacagcaaacgccgacacucugugcauuggcuaucacgcgaauaacagcacggauaccguugacacaguguuggagaaaaauguaacugugacccauuccgucaacuuacuggaagauaagcacaaugggaaacuauguaagcucagaggaguggcuccccugcaucuugguaaaugcaacauagccggcuggauccuggggaauccugagugugaaucuuugucaacagcaaguagcugguccuacauuguugagaccucuucgucagacaacggaacuugcuauccaggcgauuuuaucgacuacgaggagcucagggagcagcugagcaguguguccucuuucgaacgguuugagauuuucccgaagacaagcuccuggcccaaucacgauucaaacaagggugucaccgccgcuuguccucaugcaggggccaaaaguuuuuauaagaaucugaucuggcucgugaaaaagggaaacagcuacccaaaauuaucuaaguccuauauaaaugacaagggcaaagaaguacugguucuuuggggcauccaccaccccucaacgagcgcugaucaacagaguuuguaccagaacgccgacgcguacguguucgucgggacuucucgcuauuccaagaaauuuaagccugagauugcaauccgaccaaaagugcgugaucaggagggaagaaugaauuaccauuggacccugguggaacccggugacaagauuacauucgaggccacuggcaaccuagucguuccuagguaugcuuuugccauggaacggaacgcagggagcggaaucauaauuucggauaccccagugcacgacugcaauacaaccugucaaacgccgaaaggcgcuaucaacacuucucuccccuuccagaauauucauccuaucacaaucgguaagugcccaaaguacguaaaauccaccaagcugcgccuugccacugggcugagaaacgugcccucaauucagaguaggggauuguuuggcgcgauagccggcuucaucgaagggggauggacagguauggucgacggcugguauggguaccaccaccagaaugaacaaggaagcggcuaugcagcugaucucaaauccacccagaacgccauugacaagaucacgaauaaagugaacucuguuauagagaagaugaauacccaguuuacagcuguggguaaggaguucaaccaucuggaaaaacggauugagaauuuaaacaagaaagucgaugacggguuccuggauaucuggacuuacaaugccgaacuccuugugcuguuggagaacgaacgcacccuagacuaccacgauagcaauguaaagaaccuguaugagaaaguucgaucacagcucaagaacaaugcaaaggagaucggcaacggauguuuugaguucuaccauaaaugcgacaauacauguauggaaagugugaagaacggcacuuaugauuacccuaaauauuccgaagaggccaagcugaauagagaagagauugacggggucaaacuugagagcaccaggaucuaccaaauucuggcuauauauucuacaguggcgucaaguuugguccucgugguuagccugggagcaaucuccuuuuggaugugcucuaacgguucguuacagugccggauuuguaucuga

SEQ ID NO: 134980 - RNA, 1701 nt, Artificial Sequence; identical to SEQ ID NO: 134929
  derived and/or modified CDS sequence (opt3) from hemagglutinin__InfluenzaA__AEJ37953

SEQ ID NO: 134981 - RNA, 1701 nt, Artificial Sequence
  derived and/or modified CDS sequence (opt3) from hemagglutinin__InfluenzaA__AEJ37963
augaaggccauccuggugguccuccuuuacaccuucgcuacagcaaacgccgacacucugugcauuggcuaucacgcgaauaacagcacggauaccguugacacaguguuggagaaaaauguaacugugacccauuccgucaacuuacuggaagauaagcacaaugggaaacuauguaagcucagaggaguggcuccccugcaucuugguaaaugcaacauagccggcuggauccuggggaauccugagugugaaucuuugucaacagcaaguagcugguccuacauuguugagaccucuucgucagacaacggaacuugcuauccaggcaauuuuaucgauuacgaggagcucagggagcagcugagcaguguguccucuuucgaacgguuugagauuuucccgaagacaagcuccuggcccgaccacgauucaaacaagggugucaccgccgcuuguccucaugcaggggccaaaaguuuuuauaagaaucugaucuggcucgugaaaaagggaaacagcuacccaaaauuaucuaaguccuauauaaaugacaagggcaaagaaguacugguucuuuggggcauccaccaccccucaacgagcgcugaucaacagaguuuguaccagaacgccgacgcguacguguucgucgggacuucucgcuauuccaagaaauuuaagccugagauugcaauccgaccaaaagugcgugaucaggagggaagaaugaauuacuauuggacccugguggaacccggugacaagauuacauucgaggccacuggcaaccuagucgcuccuagguacgccuuugcaauggaacggaacgcugggagcggaaucauaauuucggauaccccaguucaugacugcaauacaaccugucaaacgccgaaaggcgccacuaacacaucucuccccuuccagaauauccacccuauuaccaucgguaagugcccaaaguaugugaaauccacuaagcugcgccuugcgacagggcugagaaacguacccucaauccagaguaggggauuguuuggcgccauugcaggcuucauagaagggggauggaccgguaugguggacggcugguacggguaucaucaccagaaugaacaaggaagcggcuacgcugccgaucucaaauccacgcagaacgcuaucgacaagauuaccaauaaagucaacucugugaucgagaagaugaauacacaguuuacugccguugguaaggaguucaaccaccuggaaaaacggauagagaauuuaaacaagaaaguggaugacggguuccuggauauuuggaccuacaaugcagaacuccuuguccuguuggagaacgaacgcacacuagacuaucaugauagcaaugugaagaaccuguacgagaaaguacgaucacagcucaagaacaaugccaaggagaucggcaacggauguuuugaguucuaucacaaaugcgacaauacuuguauggaaaguguuaagaacggcaccuacgauuauccuaaauacuccgaagaggcuaagcugaauagagaagagaucgacggggugaaacuugagagcacaaggauuuaucaaauccuggcgauuuacucuaccgucgcaucaaguuuggugcucgucgugagccugggagccauauccuuuuggaugugcucuaacgguucguuacagugccggaucuguauuuga

SEQ ID NO: 134982 - RNA, 1701 nt, Artificial Sequence; identical to SEQ ID NO: 131881
  derived and/or modified CDS sequence (opt3) from hemagglutinin__InfluenzaA__AEJ37973

SEQ ID NO: 134983 - RNA, 1701 nt, Artificial Sequence; identical to SEQ ID NO: 134929
  derived and/or modified CDS sequence (opt3) from hemagglutinin__InfluenzaA__AEJ37983

SEQ ID NO: 134984 - RNA, 1701 nt, Artificial Sequence; identical to SEQ ID NO: 133581
  derived and/or modified CDS sequence (opt3) from hemagglutinin__InfluenzaA__AEK21369

SEQ ID NO: 134985 - RNA, 1698 nt, Artificial Sequence; identical to SEQ ID NO: 131664
  derived and/or modified CDS sequence (opt3) from hemagglutinin__InfluenzaA__AEK21380

SEQ ID NO: 134986 - RNA, 1701 nt, Artificial Sequence
  derived and/or modified CDS sequence (opt3) from hemagglutinin__InfluenzaA__AEK21396
augaaggccauccuggugguccuccuuuacaccuucgcuacagcaaacgccgacacucugugcauuggcuaucacgcgaauaacagcacggauaccguugacacaguguuggagaaaaauguaacugugacccauuccgucgauuuacuggaagacaagcacaacgggaaacuauguaagcucagaggaguggcuccccugcaucuugguaaaugcaauauagccggcuggauccuggggaacccugagugugaaucuuugucaacagcaaguagcugguccuacauuguugagaccucuucgucagauaauggaacuugcuauccaggcgacuuuaucgauuacgaagaacucagggagcagcugagcaguguguccucuuucgaacgguuugagauuuucccgaagacaagcuccuggcccaaccacgacucaaauaagggugucaccgccgcuuguccucaugcaggggccaaaaguuuuuauaagaaccugaucuggcucgugaaaaagggaaauagcuacccaaaauuaucuaaguccuauauaaacgauaagggcaaagaaguacugguucuuuggggcauccaccaccccucaacgagcgcugaccaacagaguuuguaccagaaugccgaugcguacguguucgucgggacuucuaaguauuccaaaaaguuuaaaccugagauugcaauccgcccaaaggugcgagaccaggagggacguaugaacuacuauuggacccugguggaacccggugauaaaauuacauucgaggccacuggcaaucuacucgucccuagauacgcuuuugaaauggagaggaaaagcgggucgggaaucauaauuucugacaccccaguucaugacugcaacacaaccugucaaacgccgaagggcgccaucaacacuucccugcccuuccagaauauucacccuaucacaaucgguaagugcccaaaguaugugaaaucaaccaaacuucggcuggcaacuggguugcgcaacguacccaguauucagagcagaggacucuuuggcgcuauagccggcuucaucgaagggggauggacagguaugguggauggcugguacggguaucaucaccagaaugagcaaggauccggcuacgcggccgaccugaagucuacccagaacgcaauugaugagaucacgaauaaggucaacagcgugauagaaaagaugaauacccaguuuacagcuguugguaaagaguucaaccacuuagaaaagaggauugagaaucugaacaaaaagguggacgauggguuccucgacaucuggacuuacaaugccgaacuucuggucuugcuagagaacgagcggacccuggauuaucaugacucaaaugugaaaaaccucuacgaaaagguacgcagucagcugaagaauaacgcuaaagagaucggcaacggauguuuugaguucuaucacaagugcgauaauacauguauggaguccguuaaaaacggcacuuacgacuauccuaaguacagcgaagaggccaaacuuaaucgagagaagauugauggggugaagcuggaaucuaccagaaucuaucaaauuuuggcaauauacucaacagucgccaguagccucgugcuggucguguccuuaggagcuaucucuuuuuggaugugcucgaacgguagccugcagugcaggauuuguaucuga

SEQ ID NO: 134987 - RNA, 1701 nt, Artificial Sequence
  derived and/or modified CDS sequence (opt3) from hemagglutinin__InfluenzaA__AEK21406
augaaggccauccuggugguccuccuuuacaccuucgcuacagcaaacgccgacacucugugcauuggcuaucacgcgaauaacagcacggauaccguugacacaguguuggagaaaaauguaacugugacccauuccgucaacuuacuggaagauaagcacaaugggaaacuauguaagcucagaggaguggcuccccugcaucuugguaaaugcaacauagccggcuggauccuggggaauccugagugugaaucuuugucaacagcaaguagcugguccuacauuguugagaccucuucgucagacaacggaacuugcuauccaggcgauuuuaucgacuacgaggagcucagggagcagcugagcaguauguccucuuucgaacgguuugagauuuucccgaagacaagcuccuggcccgaucacgacucaaauaagggugugaccgccgcuuguccucaugcaggggccaaaaguuuuuauaagaaccugaucuggcucgucaaaaagggaaauagcuacccaaaauuaucuaaguccuauauaaacgauaagggcaaagaagugcugguacuuuggggcauccaccaccccucaacgagcgcugaccaacagaguuuguaccagaaugccgaugcguacguuuucguggggacuucucgcuauuccaagaaauuuaagccugagauugcaauccgaccaaaaguccgugaccaggagggaagaaugaacuacuauuggacccugguggaacccggugauaagauuacauucgaggccacuggcaaucuaguggucccuagguacgcuuuugccauggaacggaacgcagggagcggaaucauaauuucggacaccccaguucaugacugcaacacaaccugucaaacgccgaaaggcgcuaucaauacuucucuccccuuccagaacauucacccuaucacaaucgguaagugcccaaaguaugugaaauccaccaagcugcgccuugccacugggcugagaaauguacccucaauucagaguaggggauuguuuggcgcgauagccggcuucaucgaagggggauggacagguaugguggauggcugguacggguaucaucaccagaacgaacaaggaagcggcuacgcagcugaccucaaauccacccagaaugccauugauaagaucacgaacaaagucaauucugugauagagaagaugaacacccaguuuacagcuguugguaaggaguucaaucaccuggaaaaacggauugagaacuuaaauaagaaaguggacgauggguuccuggacaucuggacuuacaacgccgaacuccuuguccuguuggagaaugaacgcacccuagauuaucaugacagcaacgugaagaaucuguacgagaaaguacgaucacagcucaagaacaacgcaaaggagaucggcaauggauguuuugaguucuaucacaaaugcgauaacacauguauggaaaguguuaagaauggcacuuacgacuauccuaaauacuccgaagaggccaagcugaacagagaagagauugauggggugaaacuugagagcaccaggaucuaucaaauucuggcuauauacucuacagucgcgucaaguuuggugcucgucgugagccugggagcaaucuccuuuuggaugugcucuaaugguucguuacagugccggauuuguaucuga

SEQ ID NO: 134988 - RNA, 1701 nt, Artificial Sequence
  derived and/or modified CDS sequence (opt3) from hemagglutinin__InfluenzaA__AEK21416
augaaggccauccuggugguccuccuuuacaccuucgcuacagcaaacgccgacacucugugcauuggcuaucacgcgaauaacagcacggauaccguugacacaguguuggagaaaaauguaacugugacccauuccgucaacuuacuggaagauaagcacaaugggaaacuauguaagcucagaggaguggcuccccugcaucuugguaaaugcaacauagccggcuggauccuggggaauccugagugugaaucuuugucaacagcaaguagcugguccuacauuguugagaccucuucgucagacaacggaacuugcuauccaggcguguuuaucgauuacgaggagcucagggagcagcugagcagugucuccucuuucgaacgguuugagauuuucccgaagacaagcuccuggcccaaucacgacucaaacaagggugugaccgccgcuuguccucaugcaggggccaaaaguuuuuauaagaaucugaucuggcucguuaaaaagggaaacagcuacccaaaauuaucuaaguccuauauaaaugauaagggcaaagaaguacuggugcuuuggggcauccaccaccccucaacgacugcugaccaacagagcuuguaccagaacgccgaugcguacgucuucguggggaccagucgcuauucuaagaaauuuaagccugagauugcagugcgaccaaaaguccgugaccaggagggaagaaugaauuacuauuggacacugguugaacccggugauaagaucacuuucgaggccaccggcaaccuagugguaccuagguacgcuuuugccauggaacggaacgcaggguccggaauuaucauaagcgacacaccagugcaugauugcaauaccacgugucaaacuccgaaaggcgcuauuaacacaucgcuccccuuccagaauauccacccuauuaccaucgguaagugcccaaaguaugucaaaucuacuaagcugcgccuugccacagggcugagaaacgugcccuccauccagucaaggggauuguuuggcgcgauugccggcuucauagaagggggauggaccgguaugguugacggcugguacggguaucaucaccagaaugaacaaggaaguggcuacgcagcugaccucaaaagcacgcagaacgccaucgauaagauuaccaauaaagugaacuccgucaucgagaagaugaauacacaguuuacugcuguggguaaggaguucaaccaccuggaaaaacggauagagaauuuaaacaagaaaguagacgauggguuccuggacauuuggaccuacaaugccgaacuccuuguucuguuggagaacgaacgcacacuagauuaucaugacucuaaugugaagaaccuguacgagaaaguccgaaaccagcucaagaauaacgcaaaggagaucggcaauggauguuuugaguucuaucacaaaugcgauaacacuuguauggaaagcgugaagaauggcaccuacgacuauccuaaauacucagaagaggccaagcugaacagagaagagaucgauggggucaaacuugagaguacaaggauuuaucaaauccuggcuauuuacuccaccguggcgagcucuuugguucucgugguaucacugggagcaauaaguuuuuggaugugcagcaaugguuccuuacagugccggaucuguauuuga

SEQ ID NO: 134989 - RNA, 1701 nt, Artificial Sequence
  derived and/or modified CDS sequence (opt3) from hemagglutinin__InfluenzaA__AEK21426
augaaggccauccuggugguccuccuuuacaccuucgcuacagcaaacgccgacacucugugcauuggcuaucacgcgaauaacagcacggauaccguugacacaguguuggagaagaauguaacugugacccauuccgucaacuuacuggaagauaagcacaaugggaaacuauguaagcucagaggaguggcuccccugcaucuugguaaaugcaacauagccggcuggauccuggggaauccugagugugaaucuuugucaacagcaaguagcugguccuacauuguugagaccucuucgucagacaacggaacuugcuauccaggcaauuuuaucgauuacgaggagcucagggagcagcugagcaguguguccucuuucgaacgguuugagauuuucccgaagacaagcuccuggcccgaccacgauucaaacaagggugucaccgccgcuuguccucaugcaggggccaaaaguuuuuauaagaaucugaucuggcucgugaaaaagggaaacagcuacccaaaauuaucuaaguccuauauaaaugacaagggcaaagaaguacugguucuuuggggcauccaccaccccucaacgagcgcugaucaacagaguuuguaccagaacgccgacgcguacguguucgucgggacuucucgcuauuccaagaaauuuaagccugagauugcaauccgaccaaaagugcgugaucaggagggaagaaugaauuacuauuggacccugguggaacccggugacaagauuacauucgaggccacuggcaaccuagucgcuccuagguacgccuuugcaauggaacggaacgcugggagcggaaucauaauuucggauaccccaguucaugacugcaauacaaccugucaaacgccgaaaggcgccaucaacacuucucuccccuuccagaauauucacccuaucacaaucgguaagugcccaaaguaugugcgcuccaccaaacugagacuugcgacugggcugaggaacguacccucaauucagagucggggauuguuuggcgccauagcaggcuucaucgaagggggauggacagguaugguggacggcugguacggguaucaucaccagaaugaacaaggaagcggcuacgcugccgaucucaaguccacccagaacgcuauugacaaaaucacgaauaaggucaacucugugauagagaaaaugaauacccaguuuacagccguugguaaggaguucaaccaccuggaaaagcgcauugagaauuuaaacaaaaagguggaugacggguuccuggauaucuggacuuacaaugcagaacuccuuguccuguuggagaacgaacgaacccuagacuaucaugauagcaaugugaaaaaccuguacgagaagguaagaucacagcucaaaaacaaugccaaggagaucggcaacggauguuuugaguucuaucacaagugcgacaauacauguauggaaaguguuaaaaacggcacuuacgauuauccuaaguacuccgaagaggcuaaacugaauagggaagagauugacggggugaaacuugagagcacccggaucuaucaaauucuggcgauauacucuacagucgcaucaaguuuggugcucgucgugagccugggagccaucuccuuuuggaugugcucuaacgguucguuacagugccguauuuguaucuga

SEQ ID NO: 134990 - RNA, 1701 nt, Artificial Sequence; identical to SEQ ID NO: 131881
  derived and/or modified CDS sequence (opt3) from hemagglutinin__InfluenzaA__AEK21436

SEQ ID NO: 134991 - RNA, 1701 nt, Artificial Sequence
  derived and/or modified CDS sequence (opt3) from hemagglutinin__InfluenzaA__AEK21456
augaaggccauccuggugguccuccuuuacaccuucgcuacagcaaacgccgacacucugugcauuggcuaucacgcgaauaacagcacggauaccguugacacaguguuggagaaaaauguaacugugacccauuccgucaacuuacuggaagauaagcacaaugggaaacuauguaagcucagaggaguggcuccccugcaucuugguaaaugcaacauagccggcuggauccuggggaauccugagugugaaucuuugucaacagcaaguagcugguccuacauuguugagaccucuucgucagacaacggaacuugcuauccaggcgauuuuaucgacuacgaggagcucagggagcagcugagcaguguguccucuuucgaacgguuugagauuuucccgaagacaagcuccuggcccaaucacgauucaaacaagggugucaccgccgcuuguccucaugcaggggccaaaaguuuuuauaagaaucugaucuggcucgugaaaaagggaaacagcuacccaaaauuaucuaaguccuauauaaaugacaagggcaaagaaguacugguucuuuggggcauccaccaccccucaacgagcgcugaucaacagaguuuguaccagaacgccgacgcguacguguucgucgggacuucucgcuauuccaagaaauuuaagccugagauugcaauccgaccaaaagugcgugaucaggagggaagaaugaauuacuauuggacccugguggaacccggugacaagauuacauucgaggccacuggcaaccuagucguuccuagguacgcuuuugccauggaacggaacgcagggagcggaaucauaauuucggauaccccagugcaugacugcaauacaaccugucaaacgccgaaaggcgcuaucaacacuucucuccccuuccagaauauucacccuaucacaaucgguaagugcccaaaguauguaaaauccaccaagcugcgccuugccacugggcugagaaacgugcccucaauucagaguaggggauuguuuggcgcgauagccggcuucaucgaagggggauggacagguauggucgacggcugguacggguaucaucaccagaaugaacaaggaagcggcuacgcagcugaucucaaauccacccagaacgccauugacaagaucacgaauaaagugaacucuguuauagagaagaugaauacccaguuuacagcuguggguaaggaguucaaccaccuggaaaaacggauugagaauuuaaacaagaaagucgaugacggguuccuggauaucuggacuuacaaugccgaacuccuugugcuguuggagaacgaacgcacccuagacuaucaugauagcaauguaaagaaccuguacgagaaaguucgaucacagcucaagaacaaugcaaaggagaucggcaacggauguuuugaguucuaucacaaaugcgacaauacauguauggaaaacgugaagaauggcacuuacgauuauccuaaauacagugaagaggccaagcugaacagagaagagauugacggggucaaacuugaguccaccaggaucuaucaaauucuggcuauauacagcacaguggcgucuucauugguccucgugguuagucugggagcaaucagcuuuuggaugugcuccaaugguucuuuacagugccggauuuguaucuga

SEQ ID NO: 134992 - RNA, 1701 nt, Artificial Sequence; identical to SEQ ID NO: 134929
  derived and/or modified CDS sequence (opt3) from hemagglutinin__InfluenzaA__AEK21466

SEQ ID NO: 134993 - RNA, 1701 nt, Artificial Sequence; identical to SEQ ID NO: 134929
  derived and/or modified CDS sequence (opt3) from hemagglutinin__InfluenzaA__AEK21476

SEQ ID NO: 134994 - RNA, 1701 nt, Artificial Sequence; identical to SEQ ID NO: 131881
  derived and/or modified CDS sequence (opt3) from hemagglutinin__InfluenzaA__AEK21486

SEQ ID NO: 134995 - RNA, 1701 nt, Artificial Sequence
  derived and/or modified CDS sequence (opt3) from hemagglutinin__InfluenzaA__AEK28774
augaagaccaucauugcccugagcuacauacucugccuuguguucgcucagaaacugcccggcaacgacaauuccacagcaacuuuguguuuagggcaccaugccgucccuaacggaacgaucguuaagaccauuacaaaugaucaaaucgaggugacuaacgcgaccgaacugguacagucuucaaguacaggugagauuugcgacagcccacaccagauccuagauggcaaaaauuguacccucauagacgcucugcuuggggauccgcagugcgacggauuucaaaacaagaaaugggaucuguucguggaaagauccaaggccuauucuaauuguuaccccuaugacgucccugauuacgcaucguugaggucacucguggccagcaguggcacucuggaguuuaacaaugaauccuucaacuggacagguguuacccagaaugggacgucuagcgcuugcauccggcgcuccaagaacucauuuuucagucgacugaauuggcucacucauuuaaacuuuaaauauccagcacugaaugugaccaugcccaacaacgagcaguucgacaagcuguacauuuggggaguccaccauccuggcacagauaaagaccagaucuuuuuguaugcccaagcuagcggccguauuacugugucuaccaagagaucccagcagacagccaucccaaauauagggucaaggccccggguacgcaacauuccuagcagaaucaguauuuacuggaccaucguuaaaccaggagauauccugcuaauuaauucuacggguaaccucauagcgccgaggggcuacuucaagauccgguccggaaagagcucgauuaugcgcucugacgcacccaucgggaaauguaauuccgagugcauaacuccuaacggcucaauuccaaaugacaagcccuuucagaacgugaaucgaaucacauauggugccuguccuagauacgucaaacaaaacacccugaaacuugcuacugggaugaggaaugugccagaaaaacagacacggggaaucuucggcgccauugcaggcuuuaucgagaacgggugggaaggaaugguggaugguugguauggcuuccgucaccagaauagugaggggcgcggacaagcugccgaccuuaagagcacccaggcggccauugaucagauaaacggcaaauugaauagacucaucgguaagacgaacgagaaguuccaccagauugaaaaagaguuuuccgaagucgaggggaggauccaagaccuggaaaaguacguugaggauaccaaaaucgacuuauggucuuauaacgcagagcugcucguggcucuugaaaaucagcauacaauucaccugacugauagcgagaugaacaaguuguucgaaaagaccaagaagcagcuacgggagaaugccgaagacaugggcaacggaugcuuuaaaauauaccauaagugugauaaugcuugcaucggcucaauucgaaacgggacauaugaccacgauguauaccgcgacgaggcccugaauaacagauuccagaucaaaggaguggagcucaagagugguuacaaagacuggauucuguggaucuccuuugcaauaagcugcuuccuucugugugucgccuugcucggcuuuaucaugugggcuugccaaaaggggaauauuagguguaacaucugcauuuga

SEQ ID NO: 134996 - RNA, 1701 nt, Artificial Sequence
  derived and/or modified CDS sequence (opt3) from hemagglutinin__InfluenzaA__AEK28785
augaagaccaucauugcccugagcuacauacucugccuuguguucgcucagaaccugcccggcaaugacaacuccgcagccacauuguguuuagggcaccaugcggucccuaauggaacuaucguuaaaacgauuaccaacgaucaaguggagguaacaaaugcuacugaacuggugcagaacucuucaaccggugagaucugcgacaguccacaccagauucuagauggcgaaaauuguacacucaucgacgcccugcuuggggauccgcagugcgacggauuucaaaacaagaaaugggaucuguucgucgagagaagcaaggcauauuccaauuguuaccccuaugacgugccugauuacgccucuuugaggucgcucguugcuucaagcggcacccuggaauuuaacaaugagaguuucaacuggacuggugugacacagaaugggaccuccucugcaugcauacggcgcagcaacaauuccuuuuucucacgacugaacuggcucacgcauuuaaacuuuaaauauccagcccugaaugucacuaugcccaacaaugagcaguucgacaaacuuuacaucuggggagugcaccauccuggcaccgauaaggaccagaucuuuuuguaugcucaagccaguggccguauuacaguaagcacuaaaagaucucagcaggcgguuauuccaaacaucggguccaggccccgggugcgcaauauaccuucaagaauuagcaucuacuggaccauugucaagccaggagauauccugcuaaucaacaguacagguaaucucauugcaccgaggggcuacuucaaaauacggucugggaaguccagcaucaugcgcucggacgcccccauuggaaaauguaacucugaaugcaucaccccuaauggcuccauaccaaacgacaagcccuuucagaaugugaaccgaauuacguauggugcuuguccuagauacgugaagcaaaauacucugaaacuugccacagggaugaggaacgucccagagaagcagacccggggaaucuucggcgcaaucgcuggcuuuauugaaaaugggugggagggaaugguugaugguugguauggcuuccgucaccagaacucagaggggcgcggacaagccgcggaccugaaaaguacucaggccgcaaucgaucagauuaacggcaaguugaauagacucauagguaaaacaaacgaaaaguuccaccagaucgagaaagaauuuagcgagguggaagggaggauucaagaccuggagaaguacguagaggauaccaagaucgacuuaugguccuauaaugcugaacugcucguggcccuugagaaccagcauacgauccaccugaccgauucugaaaugaauaaauuguucgagaagacaaagaagcagcuacgggaaaacgcugaggacaugggcaauggaugcuuuaaaauuuaccauaagugugauaacgccugcauaggcagcauccgaaaugggacuuaugaccacgaugucuaccgcgacgaggcacugaacaauagauuccagauuaagggaguggaacucaaaucagguuacaaggacuggauccuguggauuaguuuugccaucuccugcuuccuucuguguguugcuuugcucggcuuuauaaugugggcgugccaaaaagggaacaucagguguaauauuugcaucuga

SEQ ID NO: 134997 - RNA, 1701 nt, Artificial Sequence
  derived and/or modified CDS sequence (opt3) from hemagglutinin__InfluenzaA__AEK28796
augaagaccaucauugcccugagcuacauacucugccuuguguucgcucagaaacugcccggcaacgacaauuccacagcaacuuuguguuuagggcaccaugccgucccuaacggaacgaucguuaagaccauuacaaaugauaaaaucgaggugacuaacgcgaccgaacugguacaaucuucaaguacaggugagauuugcgacagcccacaccagauccuagauggcaagaauuguacccucauagacgcucugcuuggggauccgcagugcgacggauuucagaacaaaaagugggaucuguucguggaaagauccaaggccuauucuaauuguuaccccuaugacgucccugauuacgcaucguugaggucacucguggccagcaguggcacucuggaguuuaacaaugaauccuucaacuggacagguguuacccaagacgggacgucuagcgcuugcauccggggauccaaaaauucauuuuucagucgccugaacuggcucacucauuuaaauuuuaaguauccagcacugaacgugaccaugcccaauaacgagcaguucgauaaacuuuacauuuggggcguccaccauccuggcacagacaaggaucagaucuuuuuguaugcccaggcuagcgggcgaauuacugugucuaccaaacguucccaacaggccgcgaucccaaacauaggaucaagacccaggguacggaauauuccuagccgcaucaguauuuacuggacaaucguuaagccaggugacauccugcuaauuaacucuaccggcaaucucauagcaccgagaggguacuucaagaucagguccggaaaaagcucgauuaugcggucugacgcccccaucggcaaguguaacuccgagugcauaacgccuaaugguucaauuccaaacgauaaacccuuucagaaugugaaccgcaucacuuauggggcuuguccucgauacgucaagcagaauacacugaaacuugccaccggaaugagaaacgugccagaaaagcaaacuaggggcaucuucggcgcaauugcuggguuuaucgagaauggaugggaagguaugguggacggcugguauggguuccggcaccagaacagugagggacguggccaggccgcggaucugaaaagcacacaagccgcaauugaccagauaaaugguaaguugaaccgccucaucgggaagaccaaugagaaauuccaccagauugaaaaggaguuuuccgaagucgagggcagaauccaggaucuggaaaaauacguugaggacacgaagaucgauuuauggucuuauaacgcugagcugcucguggcccuugaaaaccaacauaccauucaccugacagacagcgagaugaauaaauuguucgaaaagacuaagaaacagcuaagggagaacgcugaagauaugggaaauggcugcuuuaagauauaccauaaaugugacaacgccugcaucgggucaauucggaauggaaccuaugaucacgacguauaccgagacgaggcacugaacaaucgcuuccagaucaaggguguggagcucaaaaguggcuacaaggauuggauucuguggaucuccuuugccauaagcugcuuccuucugugugucgcuuugcucggguuuaucaugugggcgugccagaagggaaacauuagauguaauaucugcauuuga

SEQ ID NO: 134998 - RNA, 1701 nt, Artificial Sequence
  derived and/or modified CDS sequence (opt3) from hemagglutinin__InfluenzaA__AEK28807
augaagaccaucauugcccugagcuacauacucugccuuguguucgcucagaaacugcccggcaacgacaauuccacagcaacuuuguguuuagggcaccaugccgucccuaacggaacgaucguuaagaccauuacaaaugaucaaaucgaggugacuaacgcgaccgaacugguacagucuucaaguacaggugagauuugcgacagcccacaccagauccuagauggcgaaaauuguacccucauagacgcucugcuuggggauccgcagugcgacggauuucaaaacaaaaagugggaucuguucguggagagauccaaagccuauggcaauuguuaccccuaugacgucccugauuacgcaucuuugaggucgcucguggccucaagcgguacucuggaauuuaacaaugagaguuucaacuggacagggguuacccagaauggaacguccucugcuugcauccgcaagagcaacaauuccuuuuucucacggcugaacuggcucacucauuuaaaguuuaaauauccagcacugaaugugaccaugcccaacaacgagcaguucgacaaacuuuacauuuggggcguccaccauccuggcacagauaaugaccagaucuuuuuguaugcccaagcuagugggcgaauuacugugagcaccaagcguucucagcagacaguaaucccaaacauaggauccagacccaggguucggaauauuccuucacgcaucagcauuuacuggaccaucgugaagccaggugauauccugcuaauuaacaguacgggcaaucucauagccccgagaggguacuucaaaaucaggucuggaaaguccagcauuaugcggucggacgcgcccaucggcaaguguaacucugaaugcauaacuccuaaugguuccauuccaaacgacaaacccuuucagaaugucaaccgcaucacauauggggcauguccucgauacgugaagcaaaauacccugaaacuugccacuggaaugagaaacgugccagagaagcagacaaggggcaucuucggcgcuauugccggguuuaucgaaaauggaugggaggguauggucgauggcugguauggguuccggcaccagaacucagagggacguggccaagcagcugaccugaaaaguacccaggccgcgauugaucagauaaaugguaaguugaaccgccucaucgggaaaacgaacgaaaaguuccaccagauugagaaggaauuuagcgagguugaaggcagaauccaagaccuggagaaauacguggaggauaccaagaucgacuuaugguccuauaaugccgaacugcucguagcacuugagaaccagcauacaauucaccugacugauucugaaaugaauaaauuguucgagaagaccaaaaagcagcuaagggaaaacgcugaggacaugggaaauggcugcuuuaagauauaccauaaaugugauaacgccugcaucgggagcauucggaauggaacauaugaccacgauguguaccgagacgaggcucugaacaaucgcuuccagaucaagggugucgaacucaaaucaggcuacaaggacuggauucuguggaucaguuuugccauauccugcuuccuucuguguguggcauugcucggguuuaucaugugggccugccaaaaaggaaacauuagauguaauaucugcauuuga

SEQ ID NO: 134999 - RNA, 1701 nt, Artificial Sequence
  derived and/or modified CDS sequence (opt3) from hemagglutinin__InfluenzaA__AEK28818
augaagaccaucauugcccugagcuacauacucugccuuguguucgcucagaaacugcccggcaacgacaauuccacagcaacuuuguguuuagggcaccaugccgucccuaacggaacgaucguuaagaccauuacaaaugaucaaaucgaggugacuaacgcgaccgaacugguacagucuucaaguacaggugagauuugcgacagcccacaccagauccuagauggcaaaaauuguacccucauagacgcucugcuuggggauccgcagugcgacggauuucaaaacaagaaaugggaucuguucguggaaagauccaaggccuauucuaauuguuaccccuaugacgucccugauuacgcaucguugaggucacucguggccagcaguggcacucuggaguuuaacaaugaauccuucaacuggacagguguuacccagaaugggacgucuagcgcuugcauccggcgcuccaagaacucauuuuucagucgacugaauuggcucacucauuuaaacuuuaaauauccagcacugaaugugaccaugcccaacaacgagcaguucgacaaacuuuacauuuggggaguccaccauccuggcacagauaaagaccagaucuuuuuguaugcccaagcuagcggccguauuacugugucuaccaagagaucccagcagacaguaaucccaaauauagggucaaggccccggguucgcaacauuccuagcagaaucaguauuuacuggaccaucgugaaaccaggagauauccugcuaauuaauaacacggguaaucucauagccccgaggggcuacuucaagauccggucugggaaguccagcauuaugcgcucggacgcgcccaucggaaaauguaacucugagugcauaacuccuaauggcuccauuccaaacgacaagcccuuucagaaugucaaccgaaucacauauggugcauguccuagauacgugaaacaaaauacccugaaacuugccacugggaugaggaacgugccagaaaagcagacacggggaaucuucggcgcuauugccggcuuuaucgagaaugggugggaaggaauggucgaugguugguauggcuuccgucaccagaacucagaggggcgcggacaagcagcugaccugaagaguacccaggccgcgauugaucagauaaauggcaaauugaacagacucaucgguaagacgaacgagaaguuccaccagauugaaaaagaguuuagcgaaguugaggggaggauccaagaccuggaaaaguacguggaggauaccaaaaucgacuuaugguccuauaaugccgagcugcucguagcacuugaaaaccagcauacaauucaccugacugauucugagaugaauaaguuguucgaaaagaccaagaagcagcuacgggagaacgcugaagacaugggcaauggaugcuuuaaaauauaccauaagugugauaacgccugcaucggcagcauucgaaaugggacauaugaccacgauguguaccgcgacgaggcucugaacaauagauuccagaucaaaggagucgagcucaagucagguuacaaagacuggauucuguggaucaguuuugccauauccugcuuccuucuguguguggcauugcucggcuuuaucaugugggccugccaaaaggggaacauuagguguaauaucugcauuuga

SEQ ID NO: 135000 - RNA, 1701 nt, Artificial Sequence
  derived and/or modified CDS sequence (opt3) from hemagglutinin__InfluenzaA__AEK28828
augaagaccaucauugcccugagcuacauacucugccuuguguucgcucagaaacugcccggcaacgacaauuccacagcaacuuuguguuuagggcaccaugccgucccuaacggaacgaucguuaagaccauuacaaaugaucaaaucgaggugacuaacgcgaccgaacugguacagucuucaaguacaggugagauuugcgacagcccacaccagauccuagauggcaaaaauuguacccucauagacgcucugcuuggggauccgcagugcgacggauuucaaaacaagaaaugggaucuguucguggaaagauccaaggccuauucuaauuguuaccccuaugacgucccugauuacgcaucguugaggucacucguggccagcaguggcacucuggaguuuaacaaugaauccuucaacuggacagguguuacccagaaugggacgucuagcgcuugcauccggcgcuccaagaacucauuuuucagucgacugaauuggcucacucauuuaaacuuuaaauauccagcacugaaugugaccaugcccaacaacgagcaguucgacaagcuguacauuuggggaguccaccauccuggcacagauaaagaccagaucuuuuuguaugcccaagcuagcggccguauuacugugucuaccaagagaucccagcagacaguaaucccaaauauagggucaaggccccggguucgcgauauuccuagcagaaucaguauuuacuggaccaucgugaaaccaggagacauccugcuaauuaacucuacggguaaucucauagccccgaggggcuacuucaagauccgguccggaaagagcucgauuaugcgcucugacgcgcccaucgggaaauguaacuccgagugcauaacuccuaauggcucaauuccaaacgauaagcccuuucagaaugucaaccgaaucacauauggugcauguccuagauacgugaaacaaaauacccugaaacuugccacugggaugaggaacgugccagaaaaacagacacggggaaucuucggcgcuauugccggcuuuaucgagaaugggugggaaggaauggucgacgguugguauggcuuccgucaccagaacagugaggggcgcggacaagcagcugaucuuaagagcacccaggccgcgauugaccagauaaauggcaaauugaacagacucaucgguaagacgaaugagaaguuccaccagauugaaaaagaguuuuccgaaguugaggggaggauccaagaucuggaaaaguacguggaggacaccaaaaucgauuuauggucuuauaacgccgagcugcucguagcacuugaaaaccagcauacaauucaccugacugacagcgagaugaauaaguuguucgaaaagaccaagaagcagcuacgggagaacgcugaagauaugggcaauggaugcuuuaaaauauaccauaagugugacaacgccugcaucggcucaauucgaaaugggacauaugaucacgacguguaccgcgacgaggcucugaacaauagauuccagaucaaaggagucgagcucaagagugguuacaaagauuggauucuguggaucuccuuugccauaagcugcuuccuucuguguguggcauugcucggcuuuaucauguggguuugccaaaaggggaacauuagguguaauaucugcauuuga

SEQ ID NO: 135001 - RNA, 1701 nt, Artificial Sequence; identical to SEQ ID NO: 130482
  derived and/or modified CDS sequence (opt3) from hemagglutinin__InfluenzaA__AEK28839

SEQ ID NO: 135002 - RNA, 1701 nt, Artificial Sequence
  derived and/or modified CDS sequence (opt3) from hemagglutinin__InfluenzaA__AEK28850
augaagaccaucauugcccugagcuacauacucugccuuguguucgcucagaaacugcccggcaacgacaauuccacagcaacuuuguguuuagggcaccaugccgucccuaacggaacgaucguuaagaccauuacaaaugaucaaaucgaggugacuaacgcgaccgaacugguacagucuucaaguacaggugagauuugcgacagcccacaccagauccuagauggcgaaaauuguacccucauagacgcucugcuuggggauccgcagugcgacggauuucaaaacaaaaagugggaucuguucguggagagauccaaagccuauucuaauuguuaccccuaugacgucccugauuacgcaucguugaggucacucguggccagcaguggcacucuggaauuuaacaaugaguccuucaacuggacagguguuacccagaaugggacgucuagcgcuugcauccggcgcuccaacaauucauuuuucagucgacugaacuggcucacucauuuaaaguuuaaguauccagcacugaaugugaccaugcccaacaacgagcaguucgacaaacuuuacauuuggggaguccaccauccuggcacagauaaugaccagaucuuuuuguaugcccaagcuagcggccguauuacugugucuaccaagagaucccagcagacaguaaucccaaacauagggucaaggcugcggguucgcaauauucccagcagaaucaguauuuacuggaccaucgugaaaccuggagauauccuacucauuaacucuacggguaaucugauagccccaaggggcuacuucaagauccgguccgggaaaagcucgauuaugcgcucugacgcgccgaucggaaaguguaacuccgaaugcauaacucccaauggcucaauuccuaacgacaagccauuucagaaugucaaccgaaucacauauggugcaugucccagauacgugaaacaaaauacccuuaagcuggccacugggaugaggaacgugccugagaaacagacacggggaaucuucggcgcuauugccggcuuuaucgaaaaugggugggagggaauggucgaugguugguauggcuuccgucaccagaacagugaggggcgcggacaagcagcugaccucaagagcacccaggccgcgauugaucagauaaauggcaaauugaacagacugaucgguaagacgaacgaaaaauuccaccagauugagaaggaauuuuccgagguugaagggaggauccaagacuuagagaaguacguggaggauaccaaaaucgaccuguggucuuauaaugccgaacuccuuguagcacuggagaaccagcauacaauugauuugacugacagcgaaaugaauaagcuauucgagaaaaccaagaaacagcugcgggaaaacgcugaggauaugggcaauggaugcuuuaagauauaccacaagugugacaacgccugcaucggcucaauucgaaaugggacauaugaucaugacguguaccgcgacgaggcucucaacaauagauuccagaucaaaggagucgaacugaagagugguuacaaagauuggauucuuuggaucuccuuugccauaagcugcuuccuguuguguguggcacuccugggcuuuaucaugugggccugccaaaaggggaacauuagguguaauaucugcauuuga

SEQ ID NO: 135003 - RNA, 1701 nt, Artificial Sequence
  derived and/or modified CDS sequence (opt3) from hemagglutinin__InfluenzaA__AEK28861
augaagaccaucauugcccugagcuacauacucugccuuguguucgcucagaaacugcccggcaacgacaauuccacagcaacuuuguguuuagggcaccaugccgucccuaacggaacgaucguuaagaccauuacaaaugaucaaaucgaggugacuaacgcgaccgaacugguacagucuucaaguacaggugagauuugcgacagcccacaccagauccuagauggcgaaaauuguacccucauagacgcucugcuuggggauccgcagugcgacggauuucaaaacaaaaagugggaucuguucguggagagauccaaagccuauucuaauuguuaccccuaugacgucccugauuacgcaucguugaggucacucguggccagcaguggcacucuggaauuuaacaaugaguccuucaacuggacagguguuacccagaaugggacgucuagcgcuugcauccggcgcuccaacaauucauuuuucagucgacugaacuggcucacucauuuaaaguuuaaguauccagcacugaaugugaccaugcccaacaacgagcaguucgacaaacuuuacauuuggggaguccaccauccuggcacagauaaugaccagaucuuuuuguaugcccaagcuagcggccguauuacugugucuaccaagagaucccagcagacaguaaucccaaacauagggucaaggccccggguucgcaauauuccuagcagaaucaguauuuacuggaccaucgugaaaccaggagauauccugcuaauuaacucuacggguaaucucauagccccgaggggcuacuucaagauccgguccgggaaaagcucgauuaugcgcucugacgcgcccaucggaaaguguaacuccgaaugcauaacuccuaauggcucaauuccaaacgacaagcccuuucagaaugucaaccgaaucacauauggugcauguccuagauacgugaaacaaaauacccugaagcuggccacugggaugaggaacgugccagagaaacagacacggggaaucuucggcgcuauugccggcuuuaucgaaaaugggugggagggaauggucgaugguugguauggcuuccgucaccagaacagugaggggcgcggacaagcagcugaccuuaagagcacccaggccgcgauugaucagauaaauggcaaauugaacagacucaucgguaagacgaacgaaaaauuccaccagauugagaaggaauuuuccgagguugaagggaggauccaagaccuggagaaguacguggaggauaccaaaaucgacuuauggucuuauaaugccgaacugcucguagcacuugagaaccagcauacaauugaucugacugacagcgaaaugaauaaguuguucgagaaaaccaagaaacagcuaaaggaaaacgcugaggauaugggcaauggaugcuuuaagauauaccacaaaugugacaacgccugcaucggcucaauucggaaugggacauaugaucaugacguguaccgagacgaggcucugaacaaucgcuuccacaucaagggagucgaacucaaaagugguuacaaggauuggauucuguggaucuccuuugccacuagcugcuuccuucuguguguggcauugcucggcuuuauaaugugggccugccagaaagggaacaucagauguaauauuugcaucuga

SEQ ID NO: 135004 - RNA, 1701 nt, Artificial Sequence
  derived and/or modified CDS sequence (opt3) from hemagglutinin__InfluenzaA__AEK28872
augaagaccaucauugcccugagcuacauacucugccuuguguucgcucagaaacugcccggcaacgacaauuccacagcaacuuuguguuuagggcaccaugccgucccuaacggaacgaucguuaagaccauuacaaaugaucaaaucgaggugacuaacgcgaccgaacugguacagucuucaaguacaggugagauuugcgacagcccacaccagauccuagauggcgaaaauuguacccucauagacgcucugcuuggggauccgcagugcgacggauuucaaaacaaaaagugggaucuguucguggagagauccaaagccuauucuaauuguuaccccuaugacgucccugauuacgcaucguugaggucacucguggccagcaguggcacucuggaauuuaacaaugaguccuucaacuggacagguguuacccagaaugggacgucuagcgcuugcauccggcgcuccaacaauucauuuuucagucgacugaacuggcucacucauuuaaaguuuaaguauccagcacugaaugugaccaugcccaacaacgagcaguucgacaaacuuuacauuuggggaguccaccauccuggcacagauaaugaccagaucuuuuuguaugcccaagcuagcggccguauuacugugucuaccaagagaucccagcagacaguaaucccaaacauagggucaaggccccggguucgcgauauuccuagcagaaucaguauuuacuggaccaucgugaaaccaggagacauccugcuaauuaauucuacggguaaccucauagccccgaggggcuacuucaagauccgguccgggaaaagcucgauuaugcgcucugacgcgcccaucggaaaguguaauuccgaaugcauaacuccuaacggcucaauuccaaaugauaagcccuuucagaacgucaaucgaaucacauauggugcauguccuagauacgugaaacaaaacacccugaagcuggccacugggaugaggaaugugccagagaaacagacacggggaaucuucggcgcuauugccggcuuuaucgaaaacgggugggagggaauggucgacgguugguauggcuuccgucaccagaauagugaggggcgcggacaagcagcugaucuuaagagcacccaggccgcgauugaccagauaaacggcaaauugaauagacucaucgguaagacgaacgaaaaauuccaccagauugagaaggaauuuuccgagguugaagggaggauccaagaucuggagaaguacguggaggacaccaaaaucgauuuauggucuuauaacgccgaacugcucguagcacuugagaaucagcauacaauucaccugacugacagcgaaaugaacaaguuguucgagaaaaccaagaaacagcuacgggaaaaugcugaggauaugggcaacggaugcuuuaagauauaccauaagugugacaaugccugcaucggcucaauucgaaacgggacauaugaucacgacguguaccgcgacgaggcucugaauaacagauuccagaucaaaggagucgaacucaagagugguuacaaagauuggauucuguggaucuccuuugccauaagcugcuuccuucuguguguggcauugcucggcuuuaucaugugggccugccaaaaggggaauauuagguguaacaucugcauuuga

SEQ ID NO: 135005 - RNA, 1701 nt, Artificial Sequence
  derived and/or modified CDS sequence (opt3) from hemagglutinin__InfluenzaA__AEK28883
augaagaccaucauugcccugagcuacauacucugccuuguguucgcucagaaacugcccggcaacgacaauuccacagcaacuuuguguuuagggcaccaugccgucccuaacggaacgaucguuaagaccauuacaaaugaucaaaucgaggugacuaacgcgaccgaacugguacagucuucaaguacaggugagauuugcgacagcccacaccagauccuagauggcgaaaauuguacccucauagacgcucugcuuggggauccgcagugcgacggauuucaaaacaaaaagugggaucuguucguggagagauccaaagccuauucuaauuguuaccccuaugacgucccugauuacgcaucguugaggucacucaucgccagcaguggcacucuggaauuuaacaaugaguccuucaacuggacaggugugacccagaaugggacgucuagcgcuugcauucggcgcuccucaaacagcuuuuucagccgacugaauuggcucacucauuuaaaguuuaaguauccagcacugaacguuaccaugcccaauaacgagcaguucgacaaacuuuacaucuggggagugcaccauccuggcacagauaacgaccagauuuuucuuuaugcccaggcuucuggccguaucacugucuccaccaagagaucacaacagacagugauaccaaauauugggagcaggccccggguacgcaacaucccuaguagaauuucuaucuacuggaccaucguuaaaccaggagauauucugcuaauaaauuccacggguaaccucaucgccccgaggggcuacuucaagauucggagcgggaaaucgucuaucaugcgcuccgacgcgcccauaggaaaguguaauucagaaugcauuacuccuaacggcaguaucccaaaugacaagcccuuucagaacgugaaucgaaucacauauggugcauguccuagauacgucaaacaaaacacccugaaguuggccacugggaugaggaaugugccagagaaacagacacggggaauuuucggcgcuaucgccggcuuuauugaaaacgggugggagggaaugguggaugguugguauggcuuccgucaccagaauagcgaggggcgcggacaagcagcugaccugaaguccacccaggccgcgauagaucagaucaacggcaaauugaauagacucauugguaagacgaacgaaaaauuccaccagaucgagaaggaauuuucugaggucgaagggaggauccaagaccuggagaaguacguugaggauaccaaaauugacuuauggagcuauaacgccgaacugcucguggcacuugagaaucagcauacaauacaccugacugauucagaaaugaacaaguuguucgagaaaaccaagaaacagcuacgggaaaaugcugaggacaugggcaacggaugcuuuaagaucuaccauaagugugauaaugccugcauuggcaguauccgaaacgggacauaugaccacgauguauaccgcgacgaggcucugaauaacagauuccagauuaaaggaguggaacucaaguccgguuacaaagacuggauccuguggauaaguuuugccaucucuugcuuccuucugugugucgcauugcucggcuuuauuaugugggccugccaaaaggggaauaucagguguaacauuugcaucuga

SEQ ID NO: 135006 - RNA, 1701 nt, Artificial Sequence
  derived and/or modified CDS sequence (opt3) from hemagglutinin__InfluenzaA__AEK28894
augaagaccaucauugcccugagcuacauacucugccuuguguucgcucagaaacugcccggcaacgacaauuccacagcaacuuuguguuuagggcaccaugccgucccuaacggaacgaucguuaagaccauuacaaaugaucaaaucgaggugacuaacgcgaccgaacugguacagucuucaaguacaggugagauuugcgacagcccacaccagauccuagauggcgaaaauuguacccucauagacgcucugcuuggggauccgcagugcgacggauuucaaaacaaaaagugggaucuguucguggagagauccaaagccuauucuaauuguuaccccuaugacgucccugauuacgcaucguugaggucacucguggccagcaguggcacucuggaauuuaacaaugaguccuucaacuggacagguguuacccagaaugggacgucuagcgcuugcauccggcgcuccaacaauucauuuuucagucgacugaacuggcucacucauuuaaaguuuaaguauccagcacugaaugugaccaugcccaacaacgagcaguucgacaaacuuuacauuuggggaguccaccauccuggcacagauaaugaccagaucuuuuuguaugcccaagcuagcggccguauuacugugucuaccaagagaucccagcagacaguaaucccaaacauagggucaaggccccggguucgcaauauuccuagcagaaucaguauuuacuggaccaucgugaaaccaggagauauccugcuaauuaacucuacggguaaucucauagccccgaggggcuacuucaagauccgguccgggaaaagcucgauuaugcgcucugacgcgcccaucggaaaguguaacuccgaaugcauaacuccuaauggcucaauuccaaacgacaagcccuuucagaaugucaaccgaaucacauauggugcauguccuagauacgugaaacaaaauacccugaagcuggccacugggaugaggaacgugccagagaaacagacacggggaaucuucggcgcuauugccggcuuuaucgaaaaugggugggagggaauggucgaugguugguauggcuuccgucaccagaacagugaggggcgcggacaagcagcugaccuuaagagcacccaggccgcgauugaucagauaaauggcaaauugaacagacucaucgguaagacgaacgaaaaauuccaccagauugagaaggaauuuuccgagguugaagggaggauccaagaccuggagaaguacguggaggauaccaaaaucgacuuauggucuuauaaugccgaacugcucguagcacuugagaaccagcauacaauucaccugacugauagcgaaaugaauaaguuguucgagaaaaccaagaaacagcuacgggaaaacgcugaggacaugggcaauggaugcuuuaagauauaccauaagugugauaacgccugcaucggcucaauucgaaaugggacauaugaccacgauguguaccgcgacgaggcucugaacaauagauuccagaucaaaggagucgaacucaagagugguuacaaagacuggauucuguggaucuccuuugccauaagcugcuuccuucuguguguggcauugcucggcuuuaucaugugggccugccaaaaggggaacauuagguguaauaucugcauuuga

SEQ ID NO: 135007 - RNA, 1701 nt, Artificial Sequence
  derived and/or modified CDS sequence (opt3) from hemagglutinin__InfluenzaA__AEK28905
augaagaccaucauugcccugagcuacauacucugccuuguguucgcucagaaacugcccggcaacgacaauuccacagcaacuuuguguuuagggcaccaugccgucccuaacggaacgaucguuaagaccauuacaaaugaucaaaucgaggugacuaacgcgaccgaacugguacagucuucaaguacaggugagauuugcgacagcccacaccagauccuagauggcgaaaauuguacccucauagacgcucugcuuggggauccgcagugcgacggauuucaaaacaaaaagugggaucuguucguggagagauccaaagccuauucuaauuguuaccccuaugacgucccugauuacgcaucguugaggucacucguggccagcaguggcacucuggaauuuaacaaugaguccuucaacuggacagguguuacccagaaugggacgucuagcgcuugcauccggcgcuccaacaauucauuuuucagucgacugaacuggcucacucauuuacguuuuaaguauccagcacugaaugugaccaugcccaacaacgagcaguucgacaaacuuuacauuuggggaguccaccauccuggcacagauaaugaccagaucuuuccauaugcccaagcuagcggcagaauuacugugucuaccaagaggucccagcagacaguaauccccaacauagggucacggccucgcguuagaaauauuccaagcaggaucaguauuuacuggaccaucgugaagccgggagauaucuugcugauuaacucuacggguaaucuaauagcgccccggggcuacuucaaaauccgcuccggaaagagcucgauuaugcgaucugacgccccuaucgggaaauguaacuccgaaugcauaacuccaaauggcucaauucccaacgacaagccuuuucagaaugucaacagaaucacauauggugcauguccaagguacgugaagcaaaauacccucaaacuggccacugggaugcggaacgugcccgagaagcagacacguggaaucuucggcgcuauugccggcuuuaucgaaaaugggugggagggaauggucgaugguugguauggcuuccgccaccagaacagugaggggagaggacaagcagcugaccuuaaaagcacccaggccgcgauugaucagauaaauggcaagcugaacagguugaucgguaaaacgaacgaaaaguuccaccagauugagaaagaauuuuccgagguugaagggcggauccaagaccucgagaaguacguggaggauaccaagaucgaccuguggucuuauaaugccgaauuacugguagcacucgagaaccagcauacaauugaucuuacugacagcgaaaugaauaaacuguucgagaagaccaaaaagcaguugcgagaaaacgcugaggauaugggcaauggaugcuuuaaaauauaccacaagugugacaacgccugcaucggcucaauucgcaaugggacauaugaucaugacguguacagagacgaggcucuaaacaauagguuccagaucaagggagucgaacugaaaagugguuacaaggauuggauucucuggaucuccuuugccauaagcugcuuccugcuuuguguggcacuguugggcuuuaucaugugggccugccaaaaagggaacauucgguguaauaucugcauuuga

SEQ ID NO: 135008 - RNA, 1701 nt, Artificial Sequence
  derived and/or modified CDS sequence (opt3) from hemagglutinin__InfluenzaA__AEK28916
augaagaccaucauugcccugagcuacauacucugccuuguguucgcucagaaacugcccggcaacgacaauuccacagcaacuuuguguuuagggcaccaugccgucccuaacggaacgaucguuaagaccauuacaaaugaucaaaucgaggugacuaacgcgaccgaacugguacagucuucaaguacaggugagauuugcgacagcccacaccagauccuagauggcgaaaauuguacccucauagacgcucugcuuggggauccgcagugcgacggauuucaaaacaaaaagugggaucuguucguggagagauccaaagccuauucuaauuguuaccccuaugacgucccugauuacgcaucguugaggucacucguggccagcaguggcacucuggaauuuaacaaugaguccuucaacuggacagguguuacccagaaugggacgucuagcgcuugcauccggcgcuccaacaauucauuuuucagucgacugaacuggcucacucauuuaaaguuuaaguauccagcacugaaugugaccaugcccaacaacgagcaguucgacaaacuuuacauuuggggaguccaccauccuggcacagauaaugaccagaucuuuuuguaugcccaagcuagcggccguauuacugugucuaccaagagaucccagcagacaguaaucccaaacauagggucaaggccccggauucgcaauaucccuagcagaauuaguaucuacuggaccaucguuaaaccaggagauauucugcuaauaaacucuacggguaaucucaucgccccgaggggcuacuucaagauucgguccgggaaaagcucggugaugcgcucugacgcgcccaucggaaaguguaacuccgaaugcauaacuccuaauggcucaauuccaaacgacaagcccuuucagaaugucaaccgaaucacauauggugcauguccuagauacgugaaacaaaauacccugaagcuggccacugggaugaggaacgugccagagaaacagacacggggaaucuucggcgcuauugccggcuuuaucgaaaaugggugggagggaauggucgaugguugguauggcuuccgucaccagaacagugaggggcgcggacaagcagcugaccuuaagagcacccaggccgcgauugaucagauaaauggcaaauugaacagacucaucgguaagacgaacgaaaaauuccaccagauugagaaggaauuuuccgagguugaagggaggauccaagaccuggagaaguacguggaggauaccaaaaucgacuuauggucuuauaaugccgaacugcucguagcacuugagaaccagcauacaauugaucugacugacagcgaaaugaauaaguuguucgagaaaaccaagaaacagcuacgggaaaacgcugaggauaugggcaauggaugcuuuaagauauaccacaagugugacaacgccugcaucggcucaauucgaaaugggacauaugaucaugacguguaccgcgacgaggcucugaacaauagauuccagaucaaaggagucgaacucaagagugguuacaaagauuggauucuguggaucuccuuugccauaagcugcuuccuucuguguguggcauugcucggcuuuaucaugugggccugccaaaaggggaacauuagguguaauaucugcauuuga

SEQ ID NO: 135009 - RNA, 1701 nt, Artificial Sequence
  derived and/or modified CDS sequence (opt3) from hemagglutinin__InfluenzaA__AEK28927
augaagaccaucauugcccugagcuacauacucugccuuguguucgcucagaaacugcccggcaacgacaauuccacagcaacuuuguguuuagggcaccaugccgucccuaacggaacgaucguuaagaccauuacaaaugaucaaaucgaggugacuaacgcgaccgaacugguacagucuucaaguacaggugagauuugcgacagcccacaccagauccuagauggcgaaaauuguacccucauagacgcucugcuuggggauccgcagugcgacggauuucaaaacaaaaagugggaucuguucguggagagauccaaagccuauucuaauuguuaccccuaugacgucccugauuacgcaucguugaggucacucaucgccagcaguggcacucuggaauuuaacaaugaguccuucaacuggacaggugugacccagaaugggacgucuagcgcuugcauucggcgcuccaacaauucauuuuucagucgacugaacuggcucacucauuuaaaguuuaaguauccagcacugaauguuaccaugcccaacaacgagcaguucgacaaacuuuacaucuggggagugcaccauccuggcacagauaaugaccagaucuuuuuguaugcccaagcuagcggccguauuacugucucuaccaagagaucccagcagacagugauaccaaacauugggucaaggccccggguacgcaauaucccuagcagaauuaguaucuacuggaccaucguuaaaccaggagauauucugcuaauaaacucuacggguaaucucaucgccccgaggggcuacuucaagauucgguccgggaaaagcucgaucaugcgcucugacgcgcccauaggaaaguguaacuccgaaugcauuacuccuaauggcucaaucccaaacgacaagcccuuucagaaugugaaccgaaucacauauggugcauguccuagauacgucaaacaaaauacccugaagcuggccacugggaugaggaacgugccagagaaacagacacggggaauuuucggcgcuaucgccggcuuuauugaaaaugggugggagggaaugguggaugguugguauggcuuccgucaccagaacagugaggggcgcggacaagcagcugaccuuaagagcacccaggccgcgauagaucagaucaauggcaaauugaacagacucauugguaagacgaacgaaaaauuccaccagaucgagaaggaauuuuccgaggucgaagggaggauccaagaccuggagaaguacguugaggauaccaaaauugacuuauggucuuauaaugccgaacugcucguggcacuugagaaccagcauacaauacaccugacugauagcgaaaugaauaaguuguucgagaaaaccaagaaacagcuacgggaaaacgcugaggacaugggcaauggaugcuuuaagaucuaccauaagugugauaacgccugcauuggcucaauccgaaaugggacauaugaccacgauguauaccgcgacgaggcucugaacaauagauuccagauuaaaggaguggaacucaagagugguuacaaagacuggauccuguggauauccuuugccaucagcugcuuccuucugugugucgcauugcucggcuuuauuaugugggccugccaaaaggggaacaucagguguaauauuugcaucuga

SEQ ID NO: 135010 - RNA, 1701 nt, Artificial Sequence
  derived and/or modified CDS sequence (opt3) from hemagglutinin__InfluenzaA__AEK28949
augaagaccaucauugcccugagcuacauacucugccuuguguucgcucagaaacugcccggcaacgacaauuccacagcaacuuuguguuuagggcaccaugccgucccuaacggaacgaucguuaagaccauuacaaaugaucaaaucgaggugacuaacgcgaccgaacugguacagucuucaaguacaggugagauuugcgacagcccacaccagauccuagauggcgaaaauuguacccucauagacgcucugcuuggggauccgcagugcgacggauuucaaaacaaaaagugggaucuguucguggagagauccaaagccuauucuaauuguuaccccuaugacgucccugauuacgcaucguugaggucacucguggccagcaguggcacucuggaauuuaacaaugaguccuucaacuggacagguguuacccagaaugggacgucuagcgcuugcauccggcgcuccaacaauucauuuuucagucgacugaacuggcucacucauuuaaaguuuaaguauccagcacugaaugugaccaugcccaacaacgagcaguucgacaaacuuuacauuuggggaguccaccauccuggcacagauaaugaccagaucuuuuuguaugcccaagcuagcggccguauuacugugucuaccaagagaucccagcagacaguaaucccaaacauagggucaaggccccggguucgcaauauuccuagcagaaucaguauuuacuggaccaucgugaaaccaggagauauccugcuaauuaacucuacggguaaucucauagccccgaggggcuacuucaagauccgguccgggaaaagcucgauuaugcgcucugacgcgcccaucggaaaguguaacuccgaaugcauaacuccuaauggcucaauuccaaacgacaagcccuuucagaaugucaaccgaaucacauauggugcauguccuagauacgugaaacaaaauacccugaagcuggccacugggaugaggaacgugccagagaaacagacacggggaaucuucggcgcuauugccggcuuuaucgaaaaugggugggagggaauggucgaugguugguauggcuuccgucaccagaacagugaggggcgcggacaagcagcugaccuuaagagcacccaggccgcgauugaucagauaaauggcaaauugaacagacucaucgguaagacgaacgaaaaauuccaccagauugagaaggaauuuuccgagguugaagggaggauccaagaccuggagaaguacguggaggauaccaaaaucgacuuauggucuuauaaugccgaacugcucguagcacuugagaaccagcauacaauugaucugacugacagcgaaaugaauaaguuguucgagaaaaccaagaaacagcuacgggaaaacgcugaggauaugggcaauggaugccugaagauauaccacaagugugacaacgccugcaucggcucaauucgaaaugggacauaugaucaugacguguaccgcgacgaggcucucaacaauagauuucagaucaaaggagucgaacugaagagugguuacaaagauuggauucuuuggaucuccuucgccauaagcugcuuucuguuguguguggcacuccugggcuucaucaugugggccugccaaaaggggaacauuagguguaauaucugcauuuga

SEQ ID NO: 135011 - RNA, 1701 nt, Artificial Sequence; identical to SEQ ID NO: 130482
  derived and/or modified CDS sequence (opt3) from hemagglutinin__InfluenzaA__AEK28960

SEQ ID NO: 135012 - RNA, 1701 nt, Artificial Sequence; identical to SEQ ID NO: 130482
  derived and/or modified CDS sequence (opt3) from hemagglutinin__InfluenzaA__AEK28971

SEQ ID NO: 135013 - RNA, 1701 nt, Artificial Sequence
  derived and/or modified CDS sequence (opt3) from hemagglutinin__InfluenzaA__AEK28982
augaagaccaucauugcccugagcuacauacucugccuuguguucgcucagaaacugcccggcaacuauaauuccacagcaacuuuguguuuagggcaccaugccgucccuaacggaacgaucguuaagaccauuacaaaugaccaaaucgaggugacuaacgcgaccgaacugguacagucuucaaguacaggugagauuugcgauagcccacaccagauccuagacggcgaaaauuguacccucauagaugcucugcuuggggacccgcagugcgauggauuucaaaacaaaaagugggaccuguucguggagagauccaaagccuacucuaauuguuaucccuacgaugucccugacuaugcaucguugaggucacucguggccagcaguggcacucuggaauuuaacaaugaguccuucaacuggacagguguuacccagaaugggacgucuagcgcuugcauccggcgcuccaacaauucauuuuucagucgacugaacuggcucacucauuuaaaguuuaaguacccagcacugaaugugaccaugcccaacaacgagcaguucgauaaacuuuauauuuggggaguccaccauccuggcacagacaaugaucagaucuuuuuguacgcccaagcuagcggccguauuacugugucuaccaagagaucccagcagacaguaaucccaaacauagggucaaggccccggguucgcaauauuccuagcagaaucaguauuuacuggaccaucgugaaaccaggagacauccugcuaauuaacucuacggguaaucucauagccccgaggggcuauuucaagauccgguccgggaaaagcucgauuaugcgcucugaugcgcccaucggaaaguguaacuccgaaugcauaacuccuaauggcucaauuccaaacgacaagcccuuucagaaugucaaccgaaucacauacggugcauguccuagauaugugaaacaaaauacccugaagcuggccacugggaugaggaacgugccagagaaacagacacggggaaucuucggcgcuauugccggcuuuaucgaaaaugggugggagggaauggucgacgguugguacggcuuccgucaccagaacagugaggggcgcggacaagcagcugaucuuaagagcacccaggccgcgauugaccagauaaauggcaaauugaacagacucaucgguaagacgaacgaaaaauuccaccagauugagaaggaauuuuccgagguugaagggaggauccaagaucuggagaaguauguggaggacaccaaaaucgauuuauggucuuacaaugccgaacugcucguagcacuugagaaccagcauacaauucaccugacugacagcgaaaugaauaaguuguucgagaaaaccaagaaacagcuacgggaaaacgcugaggauaugggcaauggaugcuuuaagauauaucauaagugugacaacgccugcaucggcucaauucgaaaugggacauacgaucacgacguguaccgcgaugaggcucugaacaauagauuccagaucaaaggagucgaacucaagagugguuauaaagacuggauucuguggaucuccuuugccauaagcugcuuccuucuguguguggcauugcucggcuuuaucaugugggccugccaaaaggggaacauuagguguaauaucugcauuuga

SEQ ID NO: 135014 - RNA, 1701 nt, Artificial Sequence
  derived and/or modified CDS sequence (opt3) from hemagglutinin__InfluenzaA__AEK28993
augaagaccaucauugcccugagcuacauacucugccuuguguucgcucagaaacugcccggcaacuauaauuccacagcaacuuuguguuuagggcaccaugccgucccuaacggaacgaucguuaagaccauuacaaaugaccaaaucgaggugacuaacgcgaccgaacugguacagucuucaaguacaggugagauuugcgauagcccacaccagauccuagacggcgaaaauuguacccucauagaugcucugcuuggggacccgcagugcgauggauuucaaaacaaaaagugggaccuguucguggagagauccaaagccuacucuaauuguuaucccuacgaugucccugacuaugcaucguugaggucacucguggccagcaguggcacucuggaauuuaacaaugaguccuucaacuggacagguguuacccagaaugggacgucuagcgcuugcauccggcgcuccaacaauucauuuuucagucgacugaacuggcucacucauuuaaaguuuaaguacccagcacugaaugugaccaugcccaacaacgagcaguucgauaaacuuuauauuuggggaguccaccauccuggcacagacaaugaucagaucuuuuuguacgcccaagcuagcggccguauuacugugucuaccaagagaucccagcagacaguaaucccaaacauagggucaaggccccggguucgcaauauuccuagcagaaucaguauuuacuggaccaucgugaaaccaggagacauccugcuaauuaacucuacggguaaucucauagccccgaggggcuauuucaagauccgguccgggaaaagcucgauuaugcgcucugaugcgcccaucggaaaguguaacuccgaaugcauaacuccuaauggcucaauuccaaacgacaagcccuuucagaaugucaaccgaaucacauacggugcauguccuagauaugugaaacaaaauacccugaagcuggccacugggaugaggaacgugccagagaaacagacacggggaaucuucggcgcuauugccggcuuuaucgaaaaugggugggagggaauggucgacgguugguacggcuuccgucaccagaacagugaggggcgcggacaagcagcugaucuuaagagcacccaggccgcgauugaccagauaaauggcaaauugaacagacucaucgguaagacgaacgaaaaauuccaccagauugagaaggaauuuuccgagguugaagggaggauccaagaucuggagaaguauguggaggacaccaaaaucgauuuauggucuuacaaugccgaacugcucguagcacuugagaaccagcauacaauugaccugacugauagcgaaaugaauaaguuguucgagaaaaccaagaaacagcuacgggaaaacgcugaggacaugggcaauggaugcuuuaagauauaucacaagugugauaacgccugcaucggcucaauucgaaaugggacauacgaccaugauguguaccgcgacgaggcucugaacaauagauuccagaucaaaggagucgaacucaagagugguuauaaagacuggauucuguggaucuccuuugccauaagcugcuuccuucuguguguggcauugcucggcuuuaucaugugggccugccaaaaggggaacauuagguguaauaucugcauuuga

SEQ ID NO: 135015 - RNA, 1701 nt, Artificial Sequence
  derived and/or modified CDS sequence (opt3) from hemagglutinin__InfluenzaA__AEK29004
augaagaccaucauugcccugagcuacauacucugccuuguguucgcucagaaacugcccggcaacgacaauuccacagcaacuuuguguuuagggcaccaugccgucccuaacggaacgaucguuaagaccauuacaaaugaucaaaucgaggugacuaacgcgaccgaacugguacagucuucaaguacaggugagauuugcaauagcccacaccagauccuagacggcgaaaacuguacccucauagaugcucugcuuggggacccgcagugcgauggauuucaaaauaaaaagugggaccuguucguggagagauccaaagcccauucuaacuguuaucccuacgaugucccugacuaugugucguugaggucacucguugcaagcaguggcacucuggaauuuaauaacgaguccuucaauuggacaggugugacccagaacgggacgucuagcgccugcauccggcgcuccaauaacucauuuuucagucgacugaauuggcucacucacuuaaacuuuaaguacccagcucugaacgucaccaugcccaauaacgagcaguucgauaagcuguauauuuggggagugcaucacccuggcacagacaaagaucagaucuuuuuguacgcacaagccagcggccguauuacuguaucuaccaagagaucccagcaggcuguuaucccaaauauagggucaaggccccgggugcgcaacauuccuagcagagucaguaucuauuggacaauugugaaaccaggagacauccugcuaaucaauucuaccgguaaccucauugccccgaggggcuacuucaagauacgguccgggaaaagcucgaucaugcgcucugaugcgcccauuggaaaguguaauuccgcaugcaucacgccuaacggcucaauaccaaaugacaagcccuuucagaacgugaaucgaauuacuuacggugccuguccuagauaugucaaacaaaacacacugaaacuugcuaccgggaugaggaauguuccagaaaaacagacucggggaaucuucggcgccaucgcaggcuuuauugagaacgggugggaaggaaugguggacgguugguacggcuuccgucaccagaauagugaggggcgcggacaagcugccgaucuuaagagcacacaggcggccaucgaccagauuaacggcaaauugaacagacucauagguaagaccaaugagaaauuccaucagaucgaaaaggaguuuuccgaaguagaggggaggauucaagaucuggaaaaguauguggaggacacgaaaaucgauuuauggucuuacaacgcagagcugcucgucgcucuugaaaaucagcacaccaucgaccugacagauagcgagaugaacaaguuguucgaaaagacuaagaaacagcuacgggagaaugccgaagacaugggcaacggaugcuuuaagauuuaucauaagugugauaaugcuugcauaggcucaauccgaaacgggaccuacgaccacgauguguaucgcgacgaggcccugaauaacagauuccagauuaaaggaguugagcucaagagugguuacaaagacuggauccuguggauuuccuuugcaaucagcugcuuccuucuguguguggccuugcucggcuuuauaaugugggcuugccaaaaggggaauaucagguguaacauuugcaucuga

SEQ ID NO: 135016 - RNA, 1701 nt, Artificial Sequence
  derived and/or modified CDS sequence (opt3) from hemagglutinin__InfluenzaA__AEK29026
augaagaccaucauugcccugagcuacauacucugccuuguguucgcucagaaacugcccggcaacgacaauuccacagcaacuuuguguuuagggcaccaugccgucccuaacggaacgaucguuaagaccauuacaaaugaucaaaucgaggugacuaacgcgaccgaacugguacagucuucaaguacaggugagauuugcgacagcccacaccagauccuagauggcaaaaauuguacccucauagacgcucugcuuggggauccgcagugcgacggauuucaagauaagaaaugggaccuguucguggaaagauccaaggccuauucuaacuguuaccccuaugaugucccugacuacgcaucguugaggucacucguggccagcaguggcacucuggaguuuaauaacgaauccuucaauuggacagguguuacccagaacgggacgucuagcgcuugcauccggcgcuccaaaaauucauuuuucagucgacugaacuggcucacucauuuaaauuuuaaauauagcgcacugaacgugaccaugccaaauaacgagcaguucgauaaacuuuacauuuggggaguccaccaucccggcacagacaaggaucagaucuuuuuguaugcccaggcuucuggccguauuacuguguccaccaagagaucacaacagacaguaaucccuaacauagggagcaggccacggguucgcaauauucccaguagaaucucuauuuacuggaccaucgugaaaccuggagacauccugcuaauuaacuccacggguaaucucauagccccaaggggcuacuucaagaugcagagcgggaagucgucuaucaugcgguccgacgcgccgauuggaaaauguaacucagagugcaucacucccaauggcaguauaccuaacgauaagccauuucaaaaugucaaccgcauuacauauggugcauguccccgauacgugaaacagaauacccugaaacuugccacugggaugagaaacgugccugaaaagcagacaaggggaaucuucggcgcuaucgccggcuuuauugagaaugggugggaaggaauggucgacgguugguauggcuuccggcaccaaaacagcgaggggcguggacaggcagcugaucugaaguccacccaggccgcgaucgaccagauuaauggcaaauugaaccgccucauagguaagacgaaugagaaguuccaccaaaucgaaaaagaguuuucugaaguugaggggaggauucaggaucuggaaaaguacguggaggacaccaaaaucgauuuauggagcuauaacgccgagcugcucguagcacuugaaaaccagcauacaaucgaccugacugauucagagaugaauaaguuguucgaaaagaccaagaagcagcuaagagagaacgcugaagacaugggcaauggaugcuuuaaaauuuaccacaagugugauaacgccugcauaggcaguauccggaaugggacauaugaccaugacguguaccgagaugaggcucugaacaaucgcuuccaaauuaaaggagucgagcucaaguccgguuacaaagacuggauccuguggauuagcuuugccaucucuugcuuccuucuguguguggcauugcucggcuuuauaaugugggccugccagaaggggaacaucagauguaauauuugcaucuga

SEQ ID NO: 135017 - RNA, 1701 nt, Artificial Sequence
  derived and/or modified CDS sequence (opt3) from hemagglutinin__InfluenzaA__AEK29048
augaagaccaucauugcccugagcuacauacucugccuuguguucgcucagaaacugcccggcaacgacaauuccacagcaacuuuguguuuagggcaccaugccgucccuaacggaacgaucguuaagaccauuacaaaugaucaaaucgaggugacuaacgcgaccgaacugguacagucuucaaguacaggugagauuugcaauagcccacaccagauccuagacggcgaaaacuguacccucauagaugcucugcuuggggacccgcagugcgauggauuucaaaauaaaaagugggaccuguucguggagagauccaaagcccauucuaacuguuaucccuacgaugucccugacuaugcaucguugaggucacucguggccagcaguggcacucuggaauuuaauaacgaguccuucaauuggacagguguugcucagaacgggaccucuagcgcaugcauccggcgcuccaauaacucauuuuucagucgacugaauuggcucacgcacuuaaacuuuaaguacccagcccugaacgugacuaugcccaauaacgagcaguucgauaaacuuuauauuuggggaguccaucacccuggcaccgacaaagaucagaucuuuuuguacgcucaagccgcgggccguauuacagugagcacuaagagaucucagcaggcaguaaucccaaauauaggguccaggccccggguucgcaacauuccuucaagagugagcaucuauuggaccauugucaaaccaggagacauccugcuaaucaauaguacagguaaccucauugccccgaggggcuacuucaagauacggucugggaaauccagcaucaugcgcucggaugcucccauuggaaaguguaauucugccugcaucaccccuaacggcuccauaccaaaugacaagcccuuucagaacgugaaucgaauuacguacggugcauguccuagauaugugaaacaaaacacucugaaacuugcuacagggaugaggaaugucccagaaaagcagacccggggaaucuucggcgccaucgcgggcuuuauugagaacgggugggaaggaaugguugacgguugguacggcuuccgucaccaaaauucagaggggcgcggacaggccgcagaucugaagaguacucaggcugccaucgaccagauuaacggcaaauugaacagacucauagguaagacaaaugagaaauuccaucagaucgaaaaggaguuuagcgaaguggaggggaggauucaagaucuggaaaaguauguagaggacaccaaaaucgauuuaugguccuacaacgcugagcugcucguggcccuugaaaaucagcacacgaucgaccugaccgauucugagaugaacaaguuguucgaaaagacaaagaaacagcuacgggagaaugcagaagacaugggcaacggaugcuuuaagauuuaucauaagugugauaaugccugcauaggcagcauccgaaacgggacuuacgaccacgaugucuaucgcgacgaggcucugaauaacagauuccagauuaaaggaguggagcucaagucagguuacaaagacuggauccuguggauuaguuuugcgaucuccugcuuccuucuguguguugcauugcucggcuuuauaaugugggccugccaaaaggggaauaucagguguaacauuugcaucuga

SEQ ID NO: 135018 - RNA, 1701 nt, Artificial Sequence
  derived and/or modified CDS sequence (opt3) from hemagglutinin__InfluenzaA__AEK29070
augaagaccaucauugcccugagcuacauacucugccuuguguucgcucagaaacugcccggcaacgacaauuccacagcaacuuuguguuuagggcaccaugccgucccuaacggaacgaucguuaagaccauuacaaaugaucaaaucgaggugacuaacgcgaccgaacugguacagucuucaaguacaggugagauuugcgacagcccacaccagauccuagauggcgaaaauuguacccucauagacgcucugcuuggggauccgcagugcgacggauuucaaaacaaaaagugggaucuguucguggagagauccaaagccuauucuaauuguuaccccuaugacgucccugauuacgcaucguugaggucacucguggccagcaguggcacucuggaauuuaacaaugaguccuucaacuggacagguguuacccagaaugggacgucuagcgcuugcauccggcgcuccaacaauucauuuuucagucgacugaacuggcucacucauuuaaauuuuaaguauccagcacugaacgugaccaugcccaacaaugagcaguucgacaagcuguacauuuggggaguccaccauccuggcacagauaaagaccagaucuuuuuguaugcccaagcuagcggccguauuacugugucuaccaagagaucccagcaggccguaaucccaaacauagggucaaggccccggguucgcaauauuccuagcagaaucaguauuuacuggacaaucgugaaaccaggagauauccugcuaauuaacucuaccgguaaucucauagcgccgaggggcuacuucaagauccgguccgggaaaagcucgauuaugcgcucugacgcacccaucggaaaguguaacuccgaaugcauaacgccuaauggcucaauuccaaacgacaagcccuuucagaaugucaaccgaaucacuuauggugccuguccuagauacgugaaacaaaauacacugaaacuugcuaccgggaugaggaacgugccagagaagcagacucggggaaucuucggcgccauugcaggcuuuaucgaaaaugggugggagggaauggucgaugguugguauggcuuccgucaccagaacagugaggggcgcggacaagcugccgaccuuaagagcacacaggcggccauugaucagauaaauggcaaauugaacagacucaucgguaagaccaacgaaaaauuccaccagauugagaaggaauuuuccgagguugaagggaggauccaagaccuggagaaguacguggaggauacgaaaaucgacuuauggucuuauaaugcagaacugcucguagcucuugagaaccagcauaccauucaccugacagauagcgaaaugaauaaguuguucgagaaaacuaagaaacagcuacgggaaaacgccgaggacaugggcaauggaugcuuuaagauauaccauaagugugauaacgcuugcaucggcucaauucgaaaugggaccuaugaccacgauguguaccgcgacgaggcccugaacaauagauuccagaucaaaggagucgaacucaagagugguuacaaagacuggauucuguggaucuccuuugcaauaagcugcuuccuucuguguguggccuugcucggcuuuaucaugugggcuugccaaaaggggaacauuagguguaauaucugcauuuga

SEQ ID NO: 135019 - RNA, 1701 nt, Artificial Sequence
  derived and/or modified CDS sequence (opt3) from hemagglutinin__InfluenzaA__AEK29081
augaagaccaucauugcccugagcuacauacucugccuuguguucgcucagaaacugcccggcaacgacaauuccacagcaacuuuguguuuagggcaccaugccgucccuaacggaacgaucguuaagaccauuacaaaugaucaaaucgaggugacuaacgcgaccgaacugguacagucuucaaguacaggugagauuugcgacagcccacaccagauccuagauggcgaaaauuguacccucauagacgcucugcuuggggauccgcagugcgacggauuucaaaacaaaaagugggaucuguucguggagagauccaaagccuauucuaauuguuaccccuaugacgucccugauuacgcaucguugaggucacucguggccagcaguggcacucuggaauuuaacaaugaguccuucaacuggacagguguuacccagaaugggacgucuagcuccugcauccggcgcucaaacaauagcuuuuucagucgacugaacuggcucacucauuuaaauuuuaaguauccagcucugaacgugaccaugcccaacaaugagcaguucgacaaacuuuacauuuggggaguccaccauccuggcacagauaaggaccagaucuuuuuguaugcacaagccucuggccguauuacuguguccaccaagagaucacagcaggcuguaaucccaaacauagggagcaggccccggguucgcaauauuccuaguagaaucucuauuuacuggacaaucgugaaaccaggagauauccugcuaauuaacuccaccgguaaucucauagccccgaggggcuacuucaagauccggagcgggaaaucgucuauuaugcgcuccgacgcgcccaucggaaaguguaacucagaaugcauaacgccuaauggcaguauuccaaacgacaagcccuuucagaaugucaaccgaaucacuuauggugcauguccuagauacgugaaacaaaauacacugaaacuugccaccgggaugaggaacgugccagagaagcagacucggggaaucuucggcgcuauugccggcuuuaucgaaaaugggugggagggaauggucgaugguugguauggcuuccgucaccagaacagcgaggggcgcggacaagcagcugaccugaaguccacacaggccgcgauugaucagauaaauggcaaauugaacagacucaucgguaagaccaacgaaaaauuccaccagauugagaaggaauuuucugagguugaagggaggauccaagaccuggagaaguacguggaggauacgaaaaucgacuuauggagcuauaaugccgaacugcucguagcacuugagaaccagcauaccauucaccugacagauucagaaaugaauaaguuguucgagaaaacuaagaaacagcuacgggaaaacgcugaggacaugggcaauggaugcuuuaagauauaccauaagugugauaacgccugcaucggcaguauucgaaaugggaccuaugaccacgauguguaccgcgacgaggcucugaacaauagauuccagaucaaaggagucgaacucaaguccgguuacaaagacuggauucuguggaucagcuuugccauaucuugcuuccuucuguguguggcauugcucggcuuuaucaugugggccugccaaaaggggaacauuagguguaauaucugcauuuga

SEQ ID NO: 135020 - RNA, 1701 nt, Artificial Sequence; identical to SEQ ID NO: 133581
  derived and/or modified CDS sequence (opt3) from hemagglutinin__InfluenzaA__AEK29092

SEQ ID NO: 135021 - RNA, 1701 nt, Artificial Sequence; identical to SEQ ID NO: 134903
  derived and/or modified CDS sequence (opt3) from hemagglutinin__InfluenzaA__AEK29125

SEQ ID NO: 135022 - RNA, 1701 nt, Artificial Sequence; identical to SEQ ID NO: 134903
  derived and/or modified CDS sequence (opt3) from hemagglutinin__InfluenzaA__AEK29136

SEQ ID NO: 135023 - RNA, 1701 nt, Artificial Sequence; identical to SEQ ID NO: 134903
  derived and/or modified CDS sequence (opt3) from hemagglutinin__InfluenzaA__AEK29169

SEQ ID NO: 135024 - RNA, 1701 nt, Artificial Sequence; identical to SEQ ID NO: 134903
  derived and/or modified CDS sequence (opt3) from hemagglutinin__InfluenzaA__AEK29180

SEQ ID NO: 135025 - RNA, 1701 nt, Artificial Sequence; identical to SEQ ID NO: 134903
  derived and/or modified CDS sequence (opt3) from hemagglutinin__InfluenzaA__AEK29191

SEQ ID NO: 135026 - RNA, 1701 nt, Artificial Sequence; identical to SEQ ID NO: 134903
  derived and/or modified CDS sequence (opt3) from hemagglutinin__InfluenzaA__AEK29202

SEQ ID NO: 135027 - RNA, 1701 nt, Artificial Sequence; identical to SEQ ID NO: 134903
  derived and/or modified CDS sequence (opt3) from hemagglutinin__InfluenzaA__AEK29213

SEQ ID NO: 135028 - RNA, 1701 nt, Artificial Sequence; identical to SEQ ID NO: 134903
  derived and/or modified CDS sequence (opt3) from hemagglutinin__InfluenzaA__AEK29224

SEQ ID NO: 135029 - RNA, 1701 nt, Artificial Sequence; identical to SEQ ID NO: 134903
  derived and/or modified CDS sequence (opt3) from hemagglutinin__InfluenzaA__AEK29235

SEQ ID NO: 135030 - RNA, 1701 nt, Artificial Sequence
  derived and/or modified CDS sequence (opt3) from hemagglutinin__InfluenzaA__AEK29268
augaagaccaucauugcccugagcuacauacucugccuuguguucgcucagaaacugcccggcaacgacaauuccacagcaacuuuguguuuagggcaccaugccgucccuaacggaacgaucguuaagaccauuacaaaugaucaaaucgaggugacuaacgcgaccgaacugguacagucuucaaguacaggugagauuugcaauagcccacaccagauccuagacggcgaaaacuguacccucauagaugcucugcuuggggacccgcagugcgauggauuucaaaauaaaaagugggaccuguucguggagagauccaaagcccauucuaacuguuaucccuacgaugucccugacuaugcaucguugaggucacucguggccagcaguggcacucuggaauuuaauaacgaguccuucaauuggacagguguuacccagaacgggacgucuagcgcuugcauccggcgcuccaauaacucauuuuucagucgacugaauuggcucacucacuuaaacuuuaaguacccagcacugaacgugaccaugcccaauaacgagcaguucgauaagcuguauauuuggggaguccaucacccuggcacagacaaagaucagaucuuuuuguacgcccaagcuagcggccguauuacugugucuaccaagagaucccagcaggccguaaucccaaauauagggucaaggccccggguucgcaacauuccuagcagagugaguaucuauuggacaauugucaaaccaggagacauccugcuaaucaauucuaccgguaaccucauugcgccgaggggcuacuucaagauacgguccgggaaaagcucgaucaugcgcucugaugcacccauuggaaaguguaauuccgccugcaucacgccuaacggcucaauaccaaaugacaagcccuuucagaacgugaaucgaauuacuuacggugcuuguccuagauaugugaaacaaaacacacugaaacuugccaccgggaugaggaaugucccagaaaaacagacucggggaaucuucggcgcaaucgcuggcuuuauugagaacgggugggaaggaaugguugacgguugguacggcuuccgucaccagaauagugaggggcgcggacaagccgcggaucuuaagagcacacaggccgcaaucgaccagauuaacggcaaauugaacagacucauagguaagaccaaugagaaauuccaucagaucgaaaaggaguuuuccgaaguggaggggaggauucaagaucuggaaaaguauguagaggacacgaaaaucgauuuauggucuuacaacgcugagcugcucguggcccuugaaaaucagcacaccaucgaccugacagauagcgagaugaacaaguuguucgaaaagacuaagaaacagcuacgggagaaugcugaagacaugggcaacggaugcuuuaagauuuaucauaagugugauaaugccugcauaggcucaauccgaaacgggaccuacgaccacgaugucuaucgcgacgaggcacugaauaacagauuccagauuaaaggaguggagcucaagagugguuacaaagacuggauccuguggauuuccuuugccaucagcugcuuccuucuguguguugcuuugcucggcuuuauaaugugggcgugccaaaaggggaauaucagguguaacauuugcaucuga

SEQ ID NO: 135031 - RNA, 1698 nt, Artificial Sequence
  derived and/or modified CDS sequence (opt3) from hemagglutinin__InfluenzaA__AEK59838
augaaggugaaacugcucguccuucugugcaccuucacagccacuuacgcugacacgaucuguauuggcuaucacgcaaacaauagcaccgauacaguugacacuguguuggagaagaacguaaccgugacacauuccgucaauuuacuggaagauucucacaacgggaaacuaugccuccugaagggaauagcgccccuucagcuggguaauuguucaguggccggcuggaucuuggggaacccugagugcgaacuccugauuaguaaagagagcugguccuacaucguugaaaagccagacccggagaauggaaccuguuaucccggccauuuugcugauuacgaggaacugagagagcaacucucuucggugagcucauucgaaagguuugagauuuucccuaaggagaguuccuggccaaaccacacugucacaggugugucugccagcugcucccauaaugggaaaucaaguuuuuauaagaacuuacuguggcuuaccggaaagaauggcuuguaccccaaccugagcaagucuuaugcaaauaacaaagaaaaggaggugcuaguucucuggggcgugcaccacccuccaaauaucggggaccagaaggcccuguaccauacggaaaacgcuuacgucuccguggugucaagccacuauaguaaaaaguucacucccgagauagcaaaacggccuaagguccgcgaucaggaaggacgaaucaacuacuauuggacccuucuggagccagguaauacaauuaucuuugaggccaacggcaauuugauugcuccgcguuacgccuucgcgcucucuagaggguuuggauccggcaucauaaacagcaaugcacccauggacaaaugugaugccaagugccagacuccucaaggugcuauuaacucgucucugccauuccagaauguucaucccgugaccaucggggaauguccuaaauauguaagguccgccaaguuacggauggugacaggacugcgcaacauuccaucaauccagaguagaggccucuuuggcgcaaucgcuggguucauugagggagguuggaccggcauggucgacgggugguacggauaucaccaccagaaugaacaaggcagcgguuacgccgcggaucagaaguccacgcagaacgccauaaaugggaucacuaacaaaguaaauucuguuauugagaagaugaacacacaguuuaccgcagugggcaaagaguucaauaaacuugaaaggcggauggagaaccugaacaaaaaggucgacgauggauucaucgacauauggacuuacaaugcugaauugcuagugcugcucgagaacgaacgcacacuggacuuucaugauagcaauguaaagaaccuuuaugagaaaguuaagucacaacugaaaaauaacgccaaggaaauuggcaaugggugcuucgaguuuuaccacaaauguaacgacgagugcauggaaagugugaagaauggaaccuaugauuaccccaaguauuccgaggaaagcaaauugaaccgagagaagaucgacggugucaaacucgagucuaugggcguguaccagauccuggcuauuuauucaacggucgccaguagcuuagugcugcuaguuucccucggggcaaucucuuucuggaugugcucgaauggaagccugcaguguagaauuugcauauga

SEQ ID NO: 135032 - RNA, 1701 nt, Artificial Sequence
  derived and/or modified CDS sequence (opt3) from hemagglutinin__InfluenzaA__AEK98378
augaagaccaucauugcccugagcuacauacucugccuuguguucgcucagaaacugcccggcaacgacaauuccacagcaacuuuguguuuagggcaccaugccgucccuaacggaacgaucguuaagaccauuacaaaugaucaaaucgaggugacuaacgcgaccgaacugguacagucuucaaguacaggugagauuugcgacagcccacaccagauccuagauggcgaaaauuguacccucauagacgcucugcuuggggauccgcagugcgacggauuucaaaacaaaaagugggaucuguucguggagagauccaaagccuauucuaauuguuaccccuaugacgucccugauuacgcaucguugaggucacucguggccagcaguggcacucuggaauuuaacaaugaguccuucaacuggacagguguuacccagaaugggacgucuagcgcuugcauccggcgcuccaacaauucauuuuucagucgacugaacuggcucacucauuuaaaguuuaaguauccagcacugaaugugaccaugcccaacaacgagaaauucgacaaacuuuacauuuggggaguccaccauccuggcacagauaaugaccagaucuuuccauaugcccaggcuagcggccguauuacugugucuaccaagagaucccaacagacaguaauccccaacauagggucaaggccucggguucgcaauauuccaagcagaaucaguauuuacuggaccaucgugaagccgggagauaucuugcugauuaacucuacggguaaucuaauagcccccaggggcuacuucaaaauccaguccggaaagagcucgauuaugcggucugacgcgccuaucgggaaguguaacuccgaaugcauaacuccaaauggcucaauucccaacgacaaaccuuuucagaaugucaaccgcaucacauauggugcauguccacgauacgugaagcaaaauacccucaaacuggccacugggaugagaaacgugcccgagaagcagacaaggggaaucuucggcgcuauugccggcuuuaucgaaaaugggugggagggaauggucgaugguugguauggcuuccggcaccagaacagugaggggauuggacaagcagcugaccuuaaaagcacccaggccgcgauagaucagaucaauggcaagcugaaccguuugauugguaaaacgaacgaaaaguuccaccagaucgagaaggaauuuuccgagguugaagggcgcauccaagaccucgagaaauacguggaggauaccaagauugaccuguggucuuauaaugccgaauuacugguagcacucgagaaccagcauacaauagaucuuacugacagcgaaaugaauaaacuguucgagaagaccaaaaagcaguugagagaaaacgcugaggauaugggcaauggaugcuuuaagaucuaccacaaaugugacaacgccugcauuggcucaaucaggaaugggacauaugaucaugacguguaccgggacgaggcucuaaacaaucgauuccagauuaagggagucgaacugaaaagugguuacaaggauuggauccucuggauauccuuugccaucagcugcuuccugcuuuguguggcacuguugggcuuuauuaugugggccugccaaaaagggaacauccgcuguaauauuugcaucuga

SEQ ID NO: 135033 - RNA, 1701 nt, Artificial Sequence; identical to SEQ ID NO: 129963
  derived and/or modified CDS sequence (opt3) from hemagglutinin__InfluenzaA__AEK98380

SEQ ID NO: 135034 - RNA, 1701 nt, Artificial Sequence
  derived and/or modified CDS sequence (opt3) from hemagglutinin__InfluenzaA__AEK98382
augaagaccaucauugcccugagcuacauacucugccuuguguucgcucagaaacugcccggcaacgacaauuccacagcaacuuuguguuuagggcaccaugccgucccuaacggaacgaucguuaagaccauuacaaaugaucaaaucgaggugacuaacgcgaccgaacugguacaaaauucuucaacaggugagauuugcgacaguccacaccagauccuagauggcgaaaacuguacccucauagacgcucugcuuggggauccgcagugcgacggauuucagaauaaaaagugggaucuguucguggagagaagcaaagccuauuccaacuguuaccccuaugacgucccugauuacgcaucuuugaggucgcucguggccucaagcggcacucuggaauuuaauaacgagaguuucaauuggacagguguuacccagaacgggacguccucugcuugcauccggcgcagcaauaacuccuuuuucucacgacugaauuggcucacucauuuaaaguuuaaguauccagcacugaacgugaccaugcccaacaaugagaaauucgacaaacuuuacauuuggggaguccaccauccuggcacagauaacgaccagaucuuuuuguaugcccaggcuaguggccguauuacugugagcaccaagagaucucaacagacaguaaucccaaauauaggguccaggccccggauucgcaacaucccuucaagaauuagcaucuacuggaccaucguuaagccaggagauauucugcuaauaaauaguacggguaaccucaucgccccgaggggcuacuucaaaauucagaucgggaagucuuccauaaugcggagcgacgcgcccauuggaaaguguaauucggaaugcaucacuccuaacggcucuaucccaaaugacaaacccuuucagaacgugaaucgcauuacauauggugcauguccucgauacgucaagcaaaacacccugaaacuugccacugggaugagaaaugugccagagaagcagacaaggggaaucuucggcgcuauugccggcuuuauagaaaacgggugggagggaaugguggaugguugguauggcuuccggcaccaaaauuccgaggggaucggacaggcagcugaccugaaaucaacccaggccgcgauugaucagaucaacggcaaguugaaccgucucaucgguaaaacgaaugaaaaguuccaccagauugagaaggaauuuagugaggucgaagggcgcauacaagaccuggagaaauacguugaggauaccaagaucgacuuauggagcuauaacgccgaacugcucguggcacuugagaaucagcauacaauugaucugacugacuccgaaaugaacaaauuguucgagaagaccaaaaagcagcuaagagaaaaugcugaggauaugggcaacggaugcuuuaagaucuaccacaaaugugacaaugccugcauuggcucuaucaggaacgggacauaugaucaugacguauaccgggacgaggcucugaauaaccgauuccagauaaagggaguggaacucaaaagcgguuacaaggauuggauccuguggauuucauuugccaucaguugcuuccuucugugugucgcauugcucggcuuuauuaugugggccugccaaaaagggaauauccgcuguaacauaugcauuuga

SEQ ID NO: 135035 - RNA, 1701 nt, Artificial Sequence
  derived and/or modified CDS sequence (opt3) from hemagglutinin__InfluenzaA__AEK98386
augaagaccaucauugcccugagcuacauacucugccuuguguucgcucagaaacugcccggcaacgacaauuccacagcaacuuuguguuuagggcaccaugccgucccuaacggaacgaucguuaagaccauuacaaaugaucaaaucgaggugacuaacgcgaccgaacugguacagucuucaaguacaggugagauuugcaauagcccacaccagauccuagacggcgaaaacuguacccucauagaugcucugcuuggggacccgcagugcgauggauuucaaaauaaaaagugggaccuguucguggagagauccaaagcccauucuaacuguuaucccuacgaugucccugacuaugcaucguugaggucacucguggccagcaguggcacucuggaauuuaauaacgaguccuucaauuggacagguguuacccagaacgggacgucuagcgcuugcauccggcgcuccaauaacucauuuuucagucgacugaauuggcucacucacuuaaacuuuaaguacccagcacugaacgugaccaugcccaauaacgagcaguucgauaagcuguauauuuggggaguccaucacccuggcacagacaaagaucagaucuuuuuguacgcccaagcuagcggccguauuacugugucuaccaagagaucccagcaggccguaaucccaaauauagggucaaggacacggguucgcaacauucccagcagagugaguaucuauuggaccauugucaaaccuggagacauccugcuaaucaauucuacggguaaccucauugcgccaaggggcuacuucaagauacgguccgggaaaagcucgaucaugcgcucugaugcaccgauuggaaaguguaauuccgccugcaucacucccaacggcucaauaccuaaugacaagccauuucagaacgugaaucgaauuacauacggugcuugucccagauaugugaaacaaaacacccugaaacuugccacugggaugaggaaugucccugaaaaacagacacggggaaucuucggcgcaaucgcuggcuuuauugagaacgggugggaaggaaugguugacgguugguacggcuuccgucaccagaauagugaggggcgcggacaagccgcggaucuuaagagcacccaggccgcaaucgaccagauuaacggcaaauugaacagacucauagguaagacgaaugagaaauuccaucagaucgaaaaggaguuuuccgaaguggaggggaggauucaagaucuggaaaaguauguagaggacaccaaaaucgauuuauggucuuacaacgcugagcugcucguggcccuugaaaaucagcacacaaucgaccugacugauagcgagaugaacaaguuguucgaaaagaccaagaaacagcuacgggagaaugcugaagacaugggcaacggaugcuuuaagauuuaucauaagugugauaaugccugcauaggcucaauccgaaacgggacauacgaccacgaugucuaucgcgacgaggcacugaauaacagauuccagauuaaaggaguggagcucaagagugguuacaaagacuggauccuguggauuuccuuugccaucagcugcuuccuucuguguguugcuuugcucggcuuuauaaugugggcgugccaaaaggggaauaucagguguaacauuugcaucuga

SEQ ID NO: 135036 - RNA, 1701 nt, Artificial Sequence
  derived and/or modified CDS sequence (opt3) from hemagglutinin__InfluenzaA__AEK98388
augaagaccaucauugcccugagcuacauacucugccuuguguucgcucagaaacugcccggcaacgacaauuccacagcaacuuuguguuuagggcaccaugccgucccuaacggaacgaucguuaagaccauuacaaaugaucaaaucgaggugacuaacgcgaccgaacugguacagucuucaaguacaggugagauuugcgacagcccacaccagauccuagauggcaaaaauuguacccucauagacgcucugcuuggggauccgcagugcgacggacugcaaaacaagaaaugggauuuguuuguggaaagauccaaggccuauucuaauuguuaccccuaugacgucccugauuacgcaucgcucaggucacugguggccagcaguggcacucuggaguucaacaaugaauccuuuaacuggacagguguuacccagaaugggacgucuagcgcuugcauccggcgcuccaagaacucauucuuuagucgacucaauugguuaacucaucugaacuucaaauauccagcacuuaaugugaccaugcccaacaacgagcaguuugacaaguuguacauuuggggaguccaccauccuggcacagauaaagaccagaucuuccuguaugcccaagcuagcggccguauuacugugucuaccaagagaucccagcagacagccaucccaaauauagggucaaggccccggguacgcaacauuccuagcagaaucaguauuuacuggaccaucguuaaaccaggagauauccuacucauuaauucuacggguaaccugauagcgccgaggggcuacuuuaagauccgguccgggaaaagcucgauuaugcgcucugacgcacccaucggaaaauguaauuccgagugcauaacuccuaacggcucaauuccaaaugacaagcccuuccagaacgugaaucgaaucacauauggugccuguccuagauacgucaaacaaaacacccuuaagcuggcuacugggaugaggaaugugccagaaaaacagacacggggaaucuuuggcgccauugcaggcuucaucgagaacgggugggaaggaaugguggaugguugguauggcuuucgucaccagaauagugaggggcgcggacaagcugccgaccucaagagcacccaggcggccauugaucagauaaacggcaaauugaauagacugaucgguaagacgaacgagaaguuccaccagauugaaaaagaguucuccgaagucgaggggaggauccaagacuuagaaaaguacguugaggauaccaaaaucgaccuguggucuuauaacgcagagcuccuuguggcucuggaaaaucagcauacaauugauuugacugacagcgagaugaacaagcuauuugaaaagaccaagaagcagcugcgggagaaugccgaagauaugggcaacggaugcuucaaaauauaccacaagugugacaaugcuugcaucggcucaauucgaaacgggacauaugaucaugacguauaccgcgacgaggcccucaauaacagauuucagaucaaaggaguggagcugaagagugguuacaaagauuggauucuuuggaucuccuucgcaauaagcugcuuucuguugugugucgcccuccugggcuucaucaugugggcuugccaaaaggggaauauuagguguaacaucugcauuuga

SEQ ID NO: 135037 - RNA, 1701 nt, Artificial Sequence
  derived and/or modified CDS sequence (opt3) from hemagglutinin__InfluenzaA__AEK98390
augaagaccaucauugcccugagcuacauacucugccuuguguucgcucaggagcugcccggcaacgacaauuccacagcaacuuuguguuuagggcaccaugccgucccuaacggaacgaucguuaaaaccauuacaaaugaucaaaucgaagugacuaacgcgaccgagcugguacagucuucaaguacaggugaaauuugcaauagcccacaccagauccuagacggcgagaacuguacccucauagaugcucugcuuggggacccgcagugcgauggauuucaaaauaagaaaugggaccuguucguggaaagauccaaggcccauucuaacuguuaucccuacgaugucccugacuaugcaucguugaggucacucguggccagcaguggcacucuggaguuuaauaacgaguccuucaauuggacagguguuacccagaacgggacgucuagcgcuugcauccggcgcuccaauaacucauuuuucagucgacugaauuggcucacucacuuaaacuuuaaauacccagcacugaacgugaccaugcccaauaacgaacaguucgauaagcuguauauuuggggaguccaucacccuggcacagacaaggaucagaucuuuuuguacgcccaagcuagcggccguauuacugugucuaccaaaagaucccagcaggccguaaucccaaauauagggucaaggccccggguucgcaacauuccuagcagagugaguaucuauuggacaauugucaagccaggagacauccugcuaaucaauucuaccgguaaccucauugcgccgaggggcuacuucaaaauacgguccggaaagagcucgaucaugcgcucugaugcacccauugggaaauguaaguccgccugcaucacgccuaauggcucaauaccaaacgacaagacuuuucagaaugugaaccgaauuacauacggugcuugucccagauaugugaaacaaaauacccugaaacuugccacugggaugaggaacgucccugagaagcagacacggggaaucuucggcgcaaucgcuggcuuuauugaaaaugggugggagggaaugguugacgguugguacggcuuccgucaccagaacagugaggggcgcggacaagccgcggaucuuaagagcacccaggccgcaaucgaccagauuaauggcaaauugaacagacucauagguaagacgaacgaaaaauuccaucagaucgagaaggaauuuuccgagguggaagggaggauucaagaucuggagaaguauguagaggacaccaaaaucgauuuauggucuuacaaugcugaacugcucguggcccuugagaaccagcacacaaucgaccugacugauagcgaaaugaauaaguuguucgagaaaaccaagaaacagcuacgggaaaacgcugaggacaugggcaauggaugcuuuaagauuuaucauaagugugauaacgccugcauaggcucaauccgaaaugggacauacgaccacgaugucuaucgcgacgaggcacugaacaauagauuccagauuaaaggaguggaacucaagagugguuacaaagacuggauccuguggauuuccuuugccaucagcugcuuccuucuguguguugcuuugcucggcuuuauaaugugggcgugccaaaaggggaacaucagguguaauauuugcaucuga

SEQ ID NO: 135038 - RNA, 1701 nt, Artificial Sequence
  derived and/or modified CDS sequence (opt3) from hemagglutinin__InfluenzaA__AEK98392
augaagaccaucauugcccugagcuacauacucugccuuguguucgcucagaaacugcccggcaacgacaauuccacagcaacuuuguguuuagggcaccaugccgucccuaacggaacgaucguuaagaccauuacagaugaccaaaucgaggugacuaaugcgaccgaacugguacagucuucaaguacaggugagauuugcaacagcccacaccagauccuagauggcgaaaauuguacccucauagacgcucugcuuggggauccgcagugcgacggauuucaaaacaaaaagugggaucuguucguggagagauccaaagcccauucuaauuguuaucccuacgacgucccugauuaugcaucguugaggucacucguggccagcaguggcacucuggaauuuaacaaugagaacuucaauuggacagguguuacccagaacgggacguccucugcuugcauccggcgcagcaauaacuccuuuuucucacgacugaauuggcucacucacuuaaacuuuaaguacccagcacugaacgugaccaugcccaauaacgagcaguucgacaaacuuuauauuuggggaguccaucacccuggcacagauaaagaccagaucuuuuuguacgcccaagcuaguggccguauuacugugagcaccaagagaucucagcaggccguaaucccaaauauaggguccaggcugcggguucgcaacauucccucaagagugagcaucuauuggacaauugucaaaccuggagauauccuacucaucaauaguaccgguaaccugauugcgccaaggggcuacuucaagauacggucugggaaauccagcaucaugcgcucggacgcaccgauuggaaaguguaauucugccugcaucacgcccaacggcuccauaccuaaugacaagccauuucagaacgugaaucgaauuacuuacggugcuugucccagauaugugaaacaaaacacacuuaagcuggccaccgggaugaggaaugucccugaaaaacagacucggggaaucuucggcgcaaucgcuggcuuuauugagaacgggugggaaggaaugguugaugguugguacggcuuccgucaccaaaauucagaggggcgcggacaggccgcggacuugaagaguacacaggccgcaaucgaucagauuaacggcaaacucaacagacugauagguaagaccaaugagaaauuccaucagaucgaaaaggaguuuagcgaaguggaggggaggauucaagacuuagaaaaguauguagaggauacgaaaaucgaccugugguccuacaacgcugagcuccuuguggcccuggaaaaucagcacaccaucgauuugacagacucugagaugaacaagcuauucgaaaagacuaagaaacagcugcgggagaaugcugaagauaugggcaacggaugcuuuaagauuuaucauaagugugacaaugccugcauaggcagcauccgaaacgggaccuacgaucacgacgucuaucgcgacgaggcacucaauaacagauuccagauuaaaggaguggagcugaagucagguuacaaagauuggauccuuuggauuaguuuugccaucuccugcuuccuguuguguguugcucuccugggcuuuauaaugugggcgugccaaaaggggaauaucagguguaacauuugcaucuga

SEQ ID NO: 135039 - RNA, 1701 nt, Artificial Sequence
  derived and/or modified CDS sequence (opt3) from hemagglutinin__InfluenzaA__AEK98394
augaagaccaucauugcccugagcuacauacucugccuuguguucgcucagaaacugcccggcaacgacaauuccacagcaacuuuguguuuagggcaccaugccgucccuaacggaacgaucguuaagaccauuacaaaugaucaaaucgaggugacuaacgcgaccgaacugguacagucuucaaguacaggugagauuugcaauagcccacaccagauccuagacggcgaaaacuguacccucauagaugcucugcuuggggacccgcagugcgauggauuucaaaauaaaaagugggaccuguucguggagagauccaaagcccauucuaacuguuaucccuacgaugucccugacuaugcaucguugaggucacucguggccagcaguggcacucuggaauuuaauaacgaguccuucaauuggacagguguuacccagaacgggacgucuagcgcuugcauccggcgcuccaauaacucauuuuucagucgacugaauuggcucacucacuuaaacuuuaaguacccagcacugaacgugaccaugcccaauaacgagcaguucgauaaacuuuauauuuggggaguccaucacccuggcacagacaaagaucagaucuuuuuguacgcccaagcuagcggccguauuacugugucuaccaagagaucccagcaggccguaaucccaaauauagggucaaggcugcggguucgcaacauucccagcagagugaguaucuauuggacaauugucaaaccuggagacauccuacucaucaauucuaccgguaaccugauugcgccaaggggcuacuucaagauacgguccgggaaaagcucgaucaugcgcucugaugcaccgauuggaaaguguaauuccgccugcaucacgcccaacggcucaauaccuaaugacaagccauuucagaacgugaaucgaauuacuuacggugcuugucccagauaugugaaacaaaacacacuuaagcuggccaccgggaugaggaaugucccugaaaaacagacucggggaaucuucggcgcaaucgcuggcuuuauugagaacgggugggaaggaaugguugacgguugguacggcuuccgucaccagaauagugaggggcgcggacaagccgcggaucucaagagcacacaggccgcaaucgaccagauuaacggcaaauugaacagacugauagguaagaccaaugagaaauuccaucagaucgaaaaggaguuuuccgaaguggaggggaggauucaagauuuagaaaaguauguagaggacacgaaaaucgaucuguggucuuacaacgcugagcuccuuguggcccuggaaaaucagcacaccaucgacuugacagauagcgagaugaacaagcuauucgaaaagacuaagaaacagcugcgggagaaugcugaagacaugggcaacggaugcuuuaagauuuaucauaagugugauaaugccugcauaggcucaauccgaaacgggaccuacgaccacgaugucuaucgcgacgaggcacucaauaacagauuccagauuaaaggaguggagcugaagagugguuacaaagacuggauccuuuggauuuccuuugccaucagcugcuuccuguuguguguugcucuccugggcuuuauaaugugggcgugccaaaaggggaauaucagguguaacauuugcaucuga

SEQ ID NO: 135040 - RNA, 1701 nt, Artificial Sequence
  derived and/or modified CDS sequence (opt3) from hemagglutinin__InfluenzaA__AEK98396
augaagaccaucauugcccugagcuacauacucugccuuguguucgcucagaaacugcccggcaacgacaauuccacagcaacuuuguguuuagggcaccaugccgucccuaacggaacgaucguuaagaccauuacaaaugaucaaaucgaggugacuaacgcgaccgaacugguacagucuucaaguacaggugagauuugcgacagcccacaccagauccuagauggcgaaaauuguacccucauagacgcucugcuuggggauccgcagugcgacggauuucaaaacaaaaagugggaucuguucguggagagauccaaagccuauucuaauuguuaccccuaugacgucccugauuacgcaucguugaggucacucguggccagcaguggcacucuggaauuuaacaaugaguccuucaacuggacagguguuacccagaaugggacgucuagcgcuugcauccggcgcuccaacaagucauuuuucagucgacugaauuggcucacucauuuaaaguuuaaauauccagcacugaacgugaccaugcccaauaacgagcaguucgacaaacuuuacauuuggggaguccaccauccuggcacagauaacgaccagaucagcuuguaugcccaggcuucuggccguauuacuguguccaccaagagaucacaacagacaguaaucccaaauauagggagcaggccccggguucgcaacauuccuaguagaaucucuauuuacuggaccaucgugaagccaggagauauccugcuaauuaauuccacggguaaccucauagccccgaggggcuacuuuaaaauccggagcgggaagucgucuauuaugcgcuccgacgcgcccaucggaaaguguaauucagaaugcauaacuccuaacggcaguauuccaaaugacaaacccuuccagaacgucaaucgaaucacauauggugcauguccuagauacgugaagcaaaacacccugaaacuugccacugggaugaggaaugugccagagaagcagacacggggaaucuuuggcgcuauugccggcuucaucgaaaacgggugggagggaauggucgaugguugguauggcuuucgucaccagaauagcgaggggcgcggacaagcagcugaccugaaauccacccaggccgcgauugaucagauaaacggcaaguugaauagacucaucgguaaaacgaacgaaaaguuccaccagauugagaaggaguucucugaaguugaagggaggauccaagaccuggagaaauacguggaggauaccaagaucgacuuauggagcuauaacgccgaacugcucguagcacuugagaaucagcauacaauugaucugacugacucagaaaugaacaaauuguuugagaagaccaaaaagcagcuacgggaaaaugcugaggauaugggcaacggaugcuucaagauauaccacaaaugugacaaugccugcaucggcaguauucgaaacgggacauaugaucaugacguguaccgcgacgaggcucugaauaacagauuucagaucaagggagucgaacucaaauccgguuacaaggauuggauucuguggaucagcuucgccauaucuugcuuucuucuguguaucgcauugcucggcuucauuaugugggccugccaaaaagggaauaucagguguaacauuugcaucuga

SEQ ID NO: 135041 - RNA, 1701 nt, Artificial Sequence
  derived and/or modified CDS sequence (opt3) from hemagglutinin__InfluenzaA__AEK98398
augaagaccaucauugcccugagcuacauacucugccuuguguucgcucagaaacugcccggcaacgacaauuccacagcaacuuuguguuuagggcaccaugccgucccuaacggaacgaucguuaagaccauuacaaaugaucaaaucgaggugacuaacgcgaccgaacugguacagucuucaaguacaggugagauuugcgacagcccacaccagauccuagauggcaaaaauuguacccucauagacgcucugcuuggggauccgcagugcgacggacugcaaaacaagaaaugggauuuguuuguggaaagauccaaggccuauucuaauuguuaccccuaugacgucccugauuacgcaucgcucaggucacugguggccagcaguggcacucuggaguucaacaaugaauccuuuaacuggacagguguuacccagaaugggacgucuagcgcuugcauccggcgcuccaagaacucauucuuuagucgacucaauugguuaacucaucugaacuucaaauauccagcacuuaaugugaccaugcccaacaacgagcaguuugacaaguuguacauuuggggaguccaccauccuggcacagauaaagaccagaucuuccuguaugcccaagcuagcggccguauuacugugucuaccaagagaucccagcagacagccaucccaaauauagggucaaggccccggguacgcaacauuccuagcagaaucaguauuuacuggaccaucguuaaaccaggagauauccuacucauuaauucuacggguaaccugauagcgccgaggggcuacuuuaagauccgguccgggaaaagcucgauuaugcgcucugacgcacccaucggaaaauguaauuccgagugcauaacuccuaacggcucaauuccaaaugacaagcccuuccagaacgugaaucgaaucacauauggugccuguccuagauacgucaaacaaaacacccuuaagcuggcuacugggaugaggaauaucccagaaaaacagacacggggaauuuuuggcgccaucgcaggcuucauugagaacgggugggaaggaaugguggaugguugguauggcuuucgucaccagaauagugaggggcgcggacaagcugccgaccucaagagcacccaggcggccauagaucagaucaacggcaaauugaauagacugauugguaagacgaacgagaaguuccaccagaucgaaaaagaguucuccgaaguggaggggaggauccaagacuuagaaaaguacgucgaggauaccaaaauugaccuguggucuuauaacgcagagcuccuuguugcucuggaaaaucagcauacaauagauuugacugacagcgagaugaacaagcuauuugaaaagaccaagaagcagcugcgggagaaugccgaagauaugggcaacggaugcuucaaaaucuaccacaagugugacaaugcuugcauuggcucaauccgaaacgggacauaugaucaugacguguaccgcgacgaggcccucaauaacagauuucagauuaaaggaguagagcugaagagugguuacaaagauuggaucauauggaucuccuucgcaauuagcugcuuucuucuguguguggccuugcucggcuucaucaugugggcuugccaaaaggggaauauuagguguaacaucugcauauga

SEQ ID NO: 135042 - RNA, 1701 nt, Artificial Sequence
  derived and/or modified CDS sequence (opt3) from hemagglutinin__InfluenzaA__AEK98400
auggagaccaucauugcccugagcuacauacucucccuuguguucgcucagaagcugcccggcaacgacaauucuacagcaacuuugugcuuagggcaccaugccgucccuaacggaacgaucguuaaaaccauuacaaaugaucaaaucgaagugacuaacgcgaccgagcugguacagucaaguagcacaggugaaauuugugacuccccacaccagauccuagauggcgagaauugcacccucauagacgcucugcuuggggauccgcagugugacggauuucaaaacaagaaaugggaucuguucguggaaagaucuaaggccuauucgaauugcuaccccuaugacgucccugauuacgcaucauugaggagccucguggccaguuccggcacucuggaguuuaacaaugagaacuucaauuggacagguguuacccagaacgggacgucuagcgcuuguauccggcgcuccaauaacucauuuuucagucgacugaauuggcucacucauuuacguuuuaaauauccagcacugaacgugaccaugcccaacaaugaagaguucgacaaacuuuacauuuggggaguccaccauccuggcacagauaacgaccagaucuuuuuguaugcccaggcuagcggcagaauuacugugucuaccaagaggucccaacagacaguaaucccaaauauagggucacggccccgcguuagaaacauuccuagcaggaucaguauuuacuggaccaucgugaagccaggagauauccugcuaauuaauucuacggguaaccucauagccccgcggggcuacuucaagauccgcuccgggaaaagcucgauuaugcgaucugacgcgcccaucggaaagugcuccucagaauguauaacuccuaauggcaguauuccaaacgacaaacccuuucagaaugucaacagaaucacauauggugcaugcccuagguacgugaagcagaauacccugaaacuugccacugggaugcggaacgugccagagaagcaaacacguggaaucuucggcgcuauugccggcuuuaucgagaaugggugggaaggaauggucgaugguugguauggcuuccgccaccagaacagcgaggggauuggacaggcagcugaccugaaguccacccaagccgcgauagaucagaucaauggcaaauugaacagacucauugguaagacgaacgaaaaauuccaccagaucgagaaggaauuuucugagaucgaggggaggauucaggaccuggaaaaauacguugaggauaccaagauagacuuauggagcuauaaugccgaacugcucguggcacuugagaaccaacauacaaucgaucugacugacucagaaaugaauaaguuguucgagaaaaccaagaaacagcuacgggagaacgcugaagauaugggcaauggauguuuuaagauuuaccacaaaugcgacaacgccuguaucggcaguauucgaaaugggacauaugaucaugacguauaccgcgacgaggcucugaacaauagauuccagaucaagggaguggaacucaaguccgguuacaaagauuggauacuguggaucagcuuugccauuucuugcuuccuucugugcgucgcauugcucggcuuuaucaugugggccugucagaaggggaacauuaggugcaauaucuguauauga

SEQ ID NO: 135043 - RNA, 1701 nt, Artificial Sequence
  derived and/or modified CDS sequence (opt3) from hemagglutinin__InfluenzaA__AEK98402
augaagaccaucauugcccugagcuacauacucugccuuggcuucgcucagaaacugcccgggaacgacaauuccacagcaacuuuguguuuaggacaccaugccgugccuaacgguacgaucgucaagaccauuacaaaugaucaaaucgagguuacuaacgcgaccgaacuggugcagucuucaaguacaggcgagauuugcgacagcccacaccagauccuagaugggaaaaauuguacccucauagacgcucugcuuggagauccgcagugcgacggcuuucaaaacaagaaaugggaucuguucguagaaagauccaaggccuauucuaauuguuaccccuaugacgugccugauuacgcaucguugaggucacucgucgccagcagugguacucuggaguuuaacaaugaauccuucaacuggacaggggugacccagaauggaacgucuagcgcuugcauccggcgcuccaagaacucauuuuucagucgacugaauuggcucacucauuuaaacuuuaaauauccagcacugaauguuaccaugcccaacaacgagcaguucgacaagcuguacauuuggggcgugcaccauccuggcacagauaaagaccagaucuuuuuguaugcccaagcuagcgggcguauuacugucucuaccaagagaucccagcagacagccaucccaaauauaggaucaaggccccgggugcgcaacauuccuagcagaaucaguauuuacuggaccaucguaaaaccaggugauauccugcuaauuaauucuacgggcaaccucauagcgccgaggggguacuucaagauccgguccggaaagagcucgauuaugcgcucugacgcacccaucggcaaauguaauuccgagugcauaacuccuaacgguucaauuccaaaugacaagcccuuucagaacguuaaucgaaucacauauggggccuguccuagauacgugaaacaaaacacccugaaacuugcuacuggaaugaggaaugucccagaaaaacagacacggggcaucuucggcgccauugcaggguuuaucgagaacggaugggaagguaugguggauggcugguauggguuccgucaccagaauagugagggacgcggccaagcugccgaccuuaagagcacccaggcggccauuaaccagauaaaugguaaauugaacagacucaucgggaagacgaacgagaaguuccaccagauugaaaaagaguuuuccgaaguggagggcaggauccaagaucuggaaaaguacgucgaggacaccaaaaucgauuuauggucuuauaaugcagagcugcucguugcucuugaaaaccagcauacaauugaccugacugauagcgagaugaauaaguuguucgaaaagaccaagaagcagcuacgggagaacgccgaagacaugggaaauggcugcuuuaaaauauaccacaagugugauaacgcuugcaucgggucaauucgaaauggaacauaugaccaugauguguaccgcgacgaggcccugaacaauagauuccagaucaaagguguagagcucaagaguggcuacaaagacuggauucuguggaucuccuuugcaauaagcugcuuccuucuguguguggccuugcucggguuuaucaugugggcuugccaaaagggaaacauuagguguaauaucugcauuuga

SEQ ID NO: 135044 - RNA, 1701 nt, Artificial Sequence
  derived and/or modified CDS sequence (opt3) from hemagglutinin__InfluenzaA__AEK98404
augaagaccaucauugcccugagcuacauacucucccuuguguucgcucagaaacugcccggcaacgacaauucuacagcaacuuugugcuuagggcaccaugccgucccuaacggaacgaucguuaagaccauuacaaaugaucaaaucgaggugacuaacgcgaccgaacugguacagucaaguagcacaggugagauuugugacuccccacaccagauccuagauggcgaaaauugcacccucauagacgcucugcuuggggauccgcagugugacggauuucaaaacaaaaagugggaucuguucguggagagaucuaaagccuauucgaauugcuaccccuaugacgucccugauuacgcaucauugaggagccucguggccaguuccggcacucuggaauuuaacaaugagaacuucaauuggacagguguuacccagaacgggacgucuagcgcuuguauccggcgcuccaauaacucauuuuucagucgacugaauuggcucacucauuuacguuuuaaguauccagcacugaacgugaccaugcccaacaaugaggaguucgacaaacuuuacauuuggggaguccaccauccuggcacagauaacgaccagaucuuuuuguaugcccaggcuagcggcagaauuacugugucuaccaagaggucccaacagacaguaaucccaaauauagggucacggccccgcguuagaaacauuccuagcaggaucaguauuuacuggaccaucgugaagccaggagauauccugcuaauuaauucuacggguaaccucauagccccgcggggcuacuucaaaaugcgcuccggaaagagcucgaucaugcgaucugacgcgcccauugggaaaugcaauuccgaauguaucacuccuaacggcucaauaccaaaugacaagcccuuucagaacgucaauagaauuacauauggugcaugcccuagguacgugaagcagaacacccugaaacuugccacugggaugcggaaugugccagaaaagcaaacacguggaaucuucggcgcuaucgccggcuuuauugagaacgggugggagggaauggucgaugguugguauggcuuccgccaccagaauagugaagggaucggacaggcagcugaccugaaaagcacccaagccgcgauugaucagauaaacggcaaguugaacagacucaucgguaaaacgaaugagaaguuccaccagauugaaaaagaguuuuccgaaguugaggggaggauccaggaccuggagaaguacguggaagauaccaagaucgacuuauggucuuauaacgccgagcugcucguagcacuugaaaaucaacauacaauugaucugacugacagcgagaugaacaaauuguucgaaaagaccaaaaagcagcuacgggagaaugcugaggauaugggcaacggauguuuuaaaauauaccacaagugcgacaaugccuguaucggcucaauucgaaacgggacauaugaucaugacguguaccgcgacgaagcucugaauaacagauuccagaucaagggagucgagcucaaaagugguuacaaggauuggauucuguggaucuccuuugccauaagcugcuuccuucugugcguggcauugcucggcuuuaucaugugggccugucagaaagggaauauuaggugcaacaucuguauuuga

SEQ ID NO: 135045 - RNA, 1701 nt, Artificial Sequence
  derived and/or modified CDS sequence (opt3) from hemagglutinin__InfluenzaA__AEK98406
augaagaccaucauugcccugagcuacauacucucccuuguguucgcucagaaacugcccggcaacgacaauucuacagcaacuuugugcuuagggcaccaugccgucccuaacggaacgaucguuaagaccauuacaaaugaucaaaucgaggugacuaacgcgaccgaacugguacagucaaguagcacaggugagauuugugacuccccacaccagauccuagauggcgaaaauugcacccucauagacgcucugcuuggggauccgcagugugacggauuucaaaacaaaaagugggaucuguucguggagagaucuaaagccuauucgaauugcuaccccuaugacgucccugauuacgcaucauugaggagccucguggccaguuccggcacucuggaauuuaacaaugagaacuucaauuggacagguguuacccagaacgggacgucuagcgcuuguauccggcgcuccaauaacucauuuuucagucgacugaauuggcucacucauuuacguuuuaaguauccagcacugaacgugaccaugcccaacaaugaggaacuugacaaguuguacauuuggggaguccaccauccuggcacagauaacgaccagaucuuccuguaugcccaggcuagcggcagaauuacugugucuaccaaaaggucccaacagacaguaaucccaaauauagggucacggccccgcguuagaaacauuccuagcaggaucaguauuuacuggaccaucgugaagccaggagauauccuacucauuaauucuacggguaaccugauagccccgcggggcuacuuuaaaauccgcuccggaaagagcucgauuaugcgaucugacgcgcccaucgggaaaugcaauuccgaguguauaacuccuaacggcucaauuccaaaugacaagcccuuccagaacgucaauagaaucacauauggugcaugcccuagguacgugaagcagaacacccuuaaacuggccacugggaugcggaaugugccagaaaagcaaacacguggaaucuuuggcgcuauugccggcuucaucgagaacgggugggagggaauggucgaugguugguauggcuuucgccaccagaauagugaagggauuggacaggcagcugacuugaaaagcacccaagccgcgauagaucagaucaacggcaagcucaacagacugauugguaaaacgaaugagaaguuccaccagaucgaaaaagaguucuccgaaguugaggggaggauccaggacuuagagaaguacguggaagauaccaagauugaccuguggucuuauaacgccgagcuccuuguagcacuggaaaaucaacauacaauagauuugacugacagcgagaugaacaaacuauuugaaaagaccaaaaagcagcugcgggagaaugcugaggauaugggcaacggauguuucaaaaucuaccacaagugcgacaaugccuguauuggcucaauccgaaacgggacauaugaucaugacguguaccgcgacgaagcucucaauaacagauuucagauuaagggagucgagcugaaaagugguuacaaggauuggauccuuuggauauccuucgccaucagcugcuuucuguugugcguggcacuccugggcuucguuaugugggccugucagaaagggaauauuaggugcaacaucuguauuuga

SEQ ID NO: 135046 - RNA, 1701 nt, Artificial Sequence
  derived and/or modified CDS sequence (opt3) from hemagglutinin__InfluenzaA__AEL11687
augaagaccaucauugcccugagcuacauacucugccuuguguucgcucagaaacugcccggcaacgacaauuccacagcaacuuuguguuuagggcaccaugccgucccuaacggaacgaucguuaagaccauuacaaaugaucaaaucgaggugacuaacgcgaccgaacugguacagucuucaaguacagguggcauuugcgacagcccacaccagauccuagauggggagaauuguacccucauagacgcucugcuuggagauccgcagugcgacggcuuucaaaacaaaaagugggaucuguucguggaaagauccaaagccuauucuaauuguuaccccuaugacgucccugauuacgcaucguugaggucacucguggccagcagugguacucuggaguuuaacaaugaauccuucaacuggacagggguuacccagaauggaacgucuagcuccugcaagcggcgcucaaacaauagcuuuuucagccgacugaacuggcucacucauuuaaaguuuaaauauccagcucugaaugugaccaugcccaacaacgagaaguucgacaaacuuuacaucuggggcguccaccauccugugacagauaaugaccagauucguuuguaugcacaggccucuggcagaaucacuguauccaccaagaggucacaacagacaguuauuccaaacaucggguaccggccccgcgugagagauauaccuagcaggauuaguaucuacuggaccauugucaaaccaggagacauccugcuaaucaauucuacggguaaccucauugcuccgcggggcuauuuuaagauacgcuccgggaagaguucgaucaugcgaucugacgcccccauuggaaaauguaauuccgagugcaucacuccuaacggcucaauaccaaaugauaagcccuuccagaacgugaauagaauuacauacggugcguguccuagguaugugaaacagaacacccugaagcuggcaacugggaugcggaaugucccagaaaaacaaacacguggaaucuuuggcgccaucgcuggcuucauugagaacgggugggaaggaaugguugacgguugguacggcuuucgccaccagaauagugaggggaucggacaggccgcagaucuuaagagcacccaagcugccauuaaccagauaaauggcaaauugaacagacucaucgguaagacgaacgagaaguuccaccagauugaaaaagaguucuccgaaguggaggggaggauccaggaccuggaaaaguauguagaggauaccaaaaucgacuuauggucuuacaaugcggagcugcucguggcccuugaaaaccaacauacaauugaucugacugacagcgagaugaauaaguuguuugaacggaccaaaaagcagcuacgagagaacgcagaagauaugggcaauggaugcuucaagauauaucacaaaugugacaacgcuugcaucggcucaauucgcaaugggacauacgaucaugacgucuacagagacgaggcccugaacaauagguuucagaucaagggaguggagcucaaaagugguuauaaggauuggauucuguggaucuccuucgcuauaagcugcuuucuucuguguguuguguugcucggcuucaucaugugggccugccagaaagggaacauucgguguaauaucugcauuuga

SEQ ID NO: 135047 - RNA, 1692 nt, Artificial Sequence
  derived and/or modified CDS sequence (opt3) from hemagglutinin__InfluenzaA__AEL31632
auggagaagaucgugcugcuccuugccauugucagccugguuaaauccgaccagauaugcaucggcuaccacgcuaacaauucuaccgaacaaguggauacaauuauggagaagaacguaacugugacgcaugcacaggacaucuuggaaaagacccacaaugggaaauuauguaaccuggauggagucaaaccccuaauucucagagacugcucaguggccgguuggcugcuuggcaauccuaugugugaugaguuccugaacguuccagaauggaguuauaucguggagaagauaaauccggcgaacgacuugugcuaccccgggaauuuuaacgauuaugaggaacucaagcaucugcugagcaggaucaaucacuucgagaaaauucagaucauuccuaaguccucuuggucggaccaugaggcuucaggagucagcaguguguguccauaccagggccgguccagcuuuuuccgcaacguaguuuggcucacuaaaaaggauaaugccuaucccacaaucaaacgaucuuacaacaauaccaaccaagaagacuuacuggugcuuugggguauacaccacccuaacgaugcagccgagcagacacguuuguaucagaauccaaccacuuacauuuccgucgggacaucaacccugaaccagaggcuagugcccaagaucgcuacgagaaguaaggugaauggacaaagcggccggauggaauuuuucuggacuauucucaaaucuaacgacgcaaucaauuuugaguccaacggcaauuucaucgccccugaaaacgcuuacaagauugucaaaaagggggauucaaccauaaugaaaagcgagcuggaauauggaaauugcaacacaaagugucagacuccaaucggugccauuaauaguucuaugccguuucauaacauccacccccuuaccauaggcgagugcccuaaauacguuaaguccaaucgccugguguuggcgacagggcucagaaacagcccacagggagagaccaggggccuguucggugcaauugccggguuuaucgaaggaggcuggcagggcaugguagacgggugguauggauaccaucacucgaaugagcaagguucuggcuaugcugccgacaaggaauccacgcagaaagcaaucgauggggugacuaacaaggucaacucaauuaucgacaaaaugaauacacaguucgaggcugugggacgggaauuuaacaauuuagagcgccgaauugagaaccugaauaagaaaauggaagauggcuuccucgacguuuggaccuacaacgccgagcuucugguguugauggaaaaugagagaacucuagauuuccacgacaguaacgucaagaaucuguaugauaaggugaggcuccaacugcgggacaacgcgaaagaacuugguaauggguguuuugaguucuaccaucguugcgauaacgaguguauggaaagcguacgcaauggcacauacgacuauccccaguacuccgaggaagccagacugaagagggaggagauaucuggaguuaaauuggaaagcaucggcaccuaucagauucucucaaucuacaguacgguggcauccagccuggcuuuagccaucauggucgcugggcuguuucuauggaugugcucuaacggaucacuccagugccggauuuguauauga

SEQ ID NO: 135048 - RNA, 1701 nt, Artificial Sequence; identical to SEQ ID NO: 134968
  derived and/or modified CDS sequence (opt3) from hemagglutinin__InfluenzaA__AEL89297

SEQ ID NO: 135049 - RNA, 1701 nt, Artificial Sequence; identical to SEQ ID NO: 134968
  derived and/or modified CDS sequence (opt3) from hemagglutinin__InfluenzaA__AEL89307

SEQ ID NO: 135050 - RNA, 1701 nt, Artificial Sequence; identical to SEQ ID NO: 134968
  derived and/or modified CDS sequence (opt3) from hemagglutinin__InfluenzaA__AEL89317

SEQ ID NO: 135051 - RNA, 1701 nt, Artificial Sequence; identical to SEQ ID NO: 134968
  derived and/or modified CDS sequence (opt3) from hemagglutinin__InfluenzaA__AEL89327

SEQ ID NO: 135052 - RNA, 1701 nt, Artificial Sequence; identical to SEQ ID NO: 134968
  derived and/or modified CDS sequence (opt3) from hemagglutinin__InfluenzaA__AEL89337

SEQ ID NO: 135053 - RNA, 1701 nt, Artificial Sequence; identical to SEQ ID NO: 134968
  derived and/or modified CDS sequence (opt3) from hemagglutinin__InfluenzaA__AEL89347

SEQ ID NO: 135054 - RNA, 1701 nt, Artificial Sequence; identical to SEQ ID NO: 134968
  derived and/or modified CDS sequence (opt3) from hemagglutinin__InfluenzaA__AEL89357

SEQ ID NO: 135055 - RNA, 1701 nt, Artificial Sequence; identical to SEQ ID NO: 134968
  derived and/or modified CDS sequence (opt3) from hemagglutinin__InfluenzaA__AEL89367

SEQ ID NO: 135056 - RNA, 1701 nt, Artificial Sequence; identical to SEQ ID NO: 134968
  derived and/or modified CDS sequence (opt3) from hemagglutinin__InfluenzaA__AEL89391

SEQ ID NO: 135057 - RNA, 1701 nt, Artificial Sequence; identical to SEQ ID NO: 134968
  derived and/or modified CDS sequence (opt3) from hemagglutinin__InfluenzaA__AEL89401

SEQ ID NO: 135058 - RNA, 1701 nt, Artificial Sequence; identical to SEQ ID NO: 134968
  derived and/or modified CDS sequence (opt3) from hemagglutinin__InfluenzaA__AEL89411

SEQ ID NO: 135059 - RNA, 1701 nt, Artificial Sequence; identical to SEQ ID NO: 134968
  derived and/or modified CDS sequence (opt3) from hemagglutinin__InfluenzaA__AEL89421

SEQ ID NO: 135060 - RNA, 1701 nt, Artificial Sequence; identical to SEQ ID NO: 134968
  derived and/or modified CDS sequence (opt3) from hemagglutinin__InfluenzaA__AEL89441

SEQ ID NO: 135061 - RNA, 1701 nt, Artificial Sequence; identical to SEQ ID NO: 134968
  derived and/or modified CDS sequence (opt3) from hemagglutinin__InfluenzaA__AEL89451

SEQ ID NO: 135062 - RNA, 1701 nt, Artificial Sequence; identical to SEQ ID NO: 134968
  derived and/or modified CDS sequence (opt3) from hemagglutinin__InfluenzaA__AEL89461

SEQ ID NO: 135063 - RNA, 1701 nt, Artificial Sequence; identical to SEQ ID NO: 134968
  derived and/or modified CDS sequence (opt3) from hemagglutinin__InfluenzaA__AEL89471

SEQ ID NO: 135064 - RNA, 1701 nt, Artificial Sequence
  derived and/or modified CDS sequence (opt3) from hemagglutinin__InfluenzaA__AEL89481
augaaggugauccuggucguucuccuuuacaccuucgccacagcuaacgcagacacucugugcauuggcuaucacgccaauaacagcacggauaccguggacacaguauuggagaaaaaugugacugucacccauuccgugaacuuacuggaagauaagcacaaugggaaacuauguaagcucagaggaguugcgccccugcaucuugguaaaugcaacauagcuggcuggauccuggggaauccugagugugaaucuuugucaacagccaguagcugguccuacauuguggagaccucuucgucagacaacggaacuugcuauccaggcgauuuuaucgacuacgaggagcucagggagcagcugagcagugucuccucuuucgaacgguuugagauuuucccgaagacaagcuccuggcccaaucacgauucaaacaagggugugaccgcagccuguccucaugcuggggcaaaaaguuuuuauaagaaucugaucuggcucguuaaaaagggaaacagcuacccaaaauuaucuaaguccuauauaaaugacaagggcaaagaaguacuggugcuuuggggcauccaccaccccucaacgagcgccgaucaacagaguuuguaccagaacgcugacgccuacgucuucguggggacuucucgcuauuccaagaaauuuaagccugagauugcgauccgaccaaaagugcgugaucaggagggaagaaugaauuacuauuggacccuggucgaacccggugacaagauuacauucgaggcaacuggcaaccuaguugugccuagguacgccuuugcuauggaacggaacgccgggagcggaaucauaauuucggauaccccaguacaugacugcaauacaaccugucaaacgccgaaaggcgcaaucaacacuucucuccccuuccagaauauucacccuaucacaaucgguaagugcccaaaguaugugaaauccaccaagcugcgccuugcuacugggcugagaaacguccccucaauucagaguaggggauuguuuggcgccauagcgggcuucaucgaagggggauggacagguaugguggacggcugguacggguaucaucaccagaaugaacaaggaagcggcuacgccgcagaucucaaauccacccagaacgcuauugacaagaucacgaauaaaguuaacucugugauagagaagaugaauacccaguuuacagccgucgguaaggaguucaaccaccuggaaaaacggauugagaauuuaaacaagaaaguggaugacggguuccuggauaucuggacuuacaaugcugaacuccuuguacuguuggagaacgaacgcacccuagacuaucaugauagcaauguuaagaaccuguacgagaaagugcgaucacagcucaagaacaaugccaaggagaucggcaacggauguuuugaguucuaucacaaaugcgacaauacauguauggaaagugucaagaacggcacuuacgauuauccuaaauacuccgaagaggcaaagcugaauagagaagagauugacggggugaaacuugagagcaccaggaucuaucaaauucuggccauauacucuacagucgcuucaaguuuggugcucguugugagccugggagcgaucuccuuuuggaugugcucuaacgguucguuacagugccggauuuguaucuga

SEQ ID NO: 135065 - RNA, 1701 nt, Artificial Sequence; identical to SEQ ID NO: 133632
  derived and/or modified CDS sequence (opt3) from hemagglutinin__InfluenzaA__AEL89491

SEQ ID NO: 135066 - RNA, 1701 nt, Artificial Sequence
  derived and/or modified CDS sequence (opt3) from hemagglutinin__InfluenzaA__AEL89501
augaaggccauccuggugguccuccuuuacaccuucgcuacagcaaacgccgacacucugugcauuggcuaucacgcgaauaacagcacggauaccguugacacaguguuggagaagaauguaacugugacccauuccgucaacuuacuggaagauaagcacaaugggaaacuauguaagcucagaggaguggcuccccugcaucuugguaaaugcaacauagccggcuggauccuggggaauccugagugugaaucuuugucaacagcaaguagcugguccuacauuguugagaccucuucgucagacaacggaacuugcuauccaggcgauuuuaucgacuacgaagaacucagggagcagcugagcaguguguccucuuucgaacgguuugagauuuucccgaagacaagcuccuggcccgaucacgacucaaauaagggugucaccgccgcuuguccucaugcaggggccaaaaguuuuuauaagaaccugaucuggcucgugaaaaagggaaauagcuacccaaaauuaucuaaguccuauauaaacgaugaaggcaaggagguacugguucuuuggggcauccaccaccccucaacgagcgcugaccaacagaguuuguaccagaaugccgaugcguacguguucgucgggacuucucgcuauuccaaaaaguuuaaaccugagauugcaauccgaccaaaggugcgugaccaggaaggaagaaugaacuacuauuggacccugguggagcccggugauaaaauuacauucgaagccacuggcaaucuagucguuccuagguacgcuuuugccauggagcggaacgcagggagcggaaucauaauuucggacaccccagugcaugacugcaacacaaccugucaaacgccgaagggcgcuaucaauacuucucuccccuuccagaacauucacccuaucacaaucgguaaaugcccaaaguauguaaaguccaccaaacugcgccuugccacugggcugagaaaugugcccucaauucagaguaggggauuguuuggcgcgauagccggcuucaucgaagggggauggacagguauggucgauggcugguacggguaucaucaccagaacgagcaaggaagcggcuacgcagcugaccucaaguccacccagaaugccauugauaaaaucacgaacaagguaaauucuguuauagagaaaaugaacacccaguuuacagcuguggguaaggaguucaaucaccuggagaagcggauugaaaacuuaaauaaaaaggucgacgauggguuccuggacaucuggacuuacaacgccgagcuccuugugcuguuggaaaaugagcgcacccuagauuaucaugacagcaacgugaaaaaucuguacgagaagguucgaucacagcucaaaaacaacgcaaaggaaaucggcaauggauguuuugaguucuaucacaagugcgauaacacauguauggaaagugugaaaaauggcacuuacgacuauccuaaguacuccgaggaagccaaacugaacagagaggagauugauggggucaaacuugaaagcaccaggaucuaucaaauucuggcuauauacucuacaguggcgucaaguuugguccucgugguuagccugggagcaaucuccuuuuggaugugcucuaaugguucguuacagugccggauuuguaucuga

SEQ ID NO: 135067 - RNA, 1701 nt, Artificial Sequence; identical to SEQ ID NO: 131881
  derived and/or modified CDS sequence (opt3) from hemagglutinin__InfluenzaA__AEL89511

SEQ ID NO: 135068 - RNA, 1701 nt, Artificial Sequence; identical to SEQ ID NO: 133632
  derived and/or modified CDS sequence (opt3) from hemagglutinin__InfluenzaA__AEL89521

SEQ ID NO: 135069 - RNA, 1701 nt, Artificial Sequence
  derived and/or modified CDS sequence (opt3) from hemagglutinin__InfluenzaA__AEL89531
augaaggccauccuggugguccuccuuuacaccuucacaacugcuaacgcagacacgcugugcauuggcuaucacgccaauaacagcaccgauacaguugacacuguguuggagaaaaauguaaccgugacacauuccgucaacuuacuggaagauaagcacaaugggaaacuaugucagcucagaggaguggcgccccugcaucuugguaagugcaacauagcuggcuggauccuggggaauccugagugugaaucuuugucaaccgccaguagcugguccuacauuguugagacuucuucgucagacaacggaacaugcuauccaggcgauuuuaucgacuacgaggagcucagggagcaacugagcaguguguccucuuucgaacgguuugagauguucccgaaaaccagcuccuggcccaaucacgauucaaacaagggugucacggcagccuguccucaugcuggggcaaagaguuuuuauaaaaaucugauuuggcucgugaagaaaggaaacagcuacccaaaguuaucuaaauccuauaucaaugacaagggcaaggaaguacugguucuuuggggcauacaccaccccucaacuagcgccgaucagcagaguuuguaccagaacgcugacgccuacguguucgucgggaccucucgcuauuccaaaaaguuuaaaccugagaucgcgauucgaccaaaggugcgugaucaagagggaagaaugaauuacuauuggacacugguggaacccggugacaaaaucacuuucgaggcaaccggcaaccuagucguuccuagguacgccuuugcuauggaacggaacgccgggagcggaauuaucauaucggauacaccagugcaugacugcaauaccacgugucagacuccgaagggcgcaauuaacacaucucuccccuuccagaauauccacccuauuaccaucgguaaaugcccaaaguauguaaaguccacuaaacugcgccuugcuacagggcugagaaacgugcccucaauccagaguaggggauuguuuggcgccauugcgggcuucauagaagggggauggaccgguauggucgacggcugguacggguaucaucaccaaaaugaacagggaagcggcuacgccgcagaucucaaguccacgcagaacgcuaucgacaaaauuaccaauaaggugaacucuguuaucgagaaaaugaauacacaguuuacugccguggguaaggaguucaaccaccuggaaaagcggauagagaauuuaaacaaaaaggucgaugacggguuccuggauauuuggaccuacaaugcugaacuccuugugcuguuggagaacgaacgcacacuagacuaucaugauagcaauguaaagaaccuguacgagaagguucgaucacaacucaaaaacaaugccaaggagaucggcaacggauguuuugaguucuaucacaagugcgacaauacuuguauggaaagugugaaaaacggcaccuacgauuauccuaaguacuccgaagaggcaaaacugaauagagaagagaucgacggggucaaacuugagagcacaaggauuuaucagauccuggccauuuacucuaccguggcuucaaguuugguccucgugguuagccugggagcgauauccuuuuggaugugcucuaacgguucguuacagugccggaucuguauuuga

SEQ ID NO: 135070 - RNA, 1701 nt, Artificial Sequence; identical to SEQ ID NO: 133632
  derived and/or modified CDS sequence (opt3) from hemagglutinin__InfluenzaA__AEL89541

SEQ ID NO: 135071 - RNA, 1701 nt, Artificial Sequence
  derived and/or modified CDS sequence (opt3) from hemagglutinin__InfluenzaA__AEL89551
augaaggccauccuggugguccuccuuuacaccuucgcuacagcaaacgccgacacucugugcauuggcuaucacgcgaauaacagcacggauaccguugacacaguguuggagaaaaauguaacugugacccauuccgucaacuuacuggaagauaagcacaaugggaaacuauguaagcucagaggaguggcuccccugcaucuugguaaaugcaacauagccggcuggauccuggggaauccugagugugaaucuuugucaacagcaaguagcugguccuacauuguugagaccucuucgucagacaacggaacuugcuauccaggcgauuuuaucgacuacgaggagcucagggagcagcugagcaguguguccucuuucgaacgguuugagauuuucccgaagacaagcuccuggcccgaucacgacucaaauaagggugucaccgccgcuuguccucaugcaggggccaaaaguuuuuauaagaaccugaucuggcucgugaaaaagggaaauagcuacccaaaauuaucuaaguccuauauaaacgauaagggcaaagaaguacugguucuuuggggcauccaccaccccucaacgagcgcugaccaacagaguuuguaccagaaugccgaugcguacguguucgucgggacuucucgcuauuccaagaaauuuaagccugagauugcaauccgaccaaaagugcgugaccaggagggaagaaugaacuacuauuggacccugguggaacccggugauaagauuacauucgaggccacuggcaaucuagucguuccuagguacgcuuuugccauggaacggaacgcagggagcggaaucauaauuucggacaccccagcucaugacugcaacacaaccugucaaacgccgaaaggcgccaucaauacuucucuccccuuccagaacauucacccuaucacaaucgguaagugcccaaaguaugugaaauccaccaagcugcgccuugcgacugggcugagaaauguacccucaauucagaguaggggauuguuuggcgccauagcaggcuucaucgaagggggauggacagguaugguggauggcugguacggguaucaucaccagaacgaacaaggaagcggcuacgcugccgaccucaaauccacccagaaugcuauugauaagaucacgaacaaagucaauucugugauagagaagaugaacacccaguuuacagccguugguaaggaguucaaucaccuggaaaaacggauugagaacuuaaauaagaaaguggacgauggguuccuggacaucuggacuuacaacgcagaacuccuuguccuguuggagaaugaacgcacccuagauuaucaugacagcaacgugaagaaucuguacgagaaaguacgaucacagcucaagaacaacgccaaggagaucggcaauggauguuuugaguucuaucacaaaugcgauaacacauguauggaaaguguuaagaauggcacuuacgacuauccuaaauacuccgaagaggcuaagcugaacagagaagagauugauggggugaaacuugagagcaccaggaucuaucaaauucuggcgauauacucuacagucgcaucaaguuuggugcucgucgugagccugggagccaucuccuuuuggaugugcucuaaugguucguuacagugccggauuuguaucuga

SEQ ID NO: 135072 - RNA, 1701 nt, Artificial Sequence
  derived and/or modified CDS sequence (opt3) from hemagglutinin__InfluenzaA__AEL89561
augaaggccauccuggugguccuccuuuacaccuucgcuacagcaaacgccgacacucugugcauuggcuaucacgcgaauaacagcacggauaccguugacacaguguuggagaaaaauguaacugugacccauuccgucaacuuacuggaagauaagcacaaugggaaacuauguaagcucagaggaguggcuccccugcaucuugguaaaugcaacauagccggcuggauccuggggaauccugagugugaaucuuugucaacagcaaguagcugguccuacauuguugagaccucuucgucaggaaacggcacuugcuauccaggugacuuuaucgauuacgaagaacucagggagcagcugagcaguguguccucuuucgaacgguuugagauuuucccgaagacaagcuccuggcccgaccacgauucaaauaagggggucaccgccgcuuguccucaugcaggagccaaaaguuuuuauaagaaccugaucuggcucgugaaaaagggcaauagcuacccaaaauuaucuaaguccuauauaaacgacaagggcaaagaaguacugguucuuugggggauccaccaccccucaacgagcgcugaucaacagaguuuguaccagaaugccgacgcguacguguucgucggaacuucucgcuauuccaagaaauuuaagccugagauugcaauccgaccaaaagugcgugaucaggaggguagaaugaacuacuauuggacccugguggaacccggcgacaagauuacauucgaggccacugggaaucuagucguuccuagguacgcuuuugccauggaacggaacgcaggaagcggcaucauaauuucggauaccccagugcaugacugcaacacaaccugucaaacgccgaaaggugcuaucaauacuucucuccccuuccagaacauucacccuaucacaaucgggaagugcccaaaguauguaaaauccaccaagcugcgccuugccacuggacugagaaaugugcccucaauucagaguaggggcuuguuuggcgcgauagccggguucaucgagggagguuggacaggcauggucgacgggugguacggauaucaucaccagaacgaacaaggcagcgguuacgcagcugaucucaaauccacccagaaugccauugacaagaucacgaacaaaguuaauucugugauagagaagaugaacacccaguuuacagcuguggggaaggaguucaaucaccuggaaaaacggauugagaacuuaaauaagaaagucgaugacggcuuccuggauaucuggacuuacaacgccgaacuccuugugcuguuggagaaugaacgcacccuagacuaucaugauagcaacguaaagaaucuguacgagaaaguucgaucacagcucaagaacaacgcaaaggagaucggaaauggcuguuuugaguucuaucacaaaugcgacaacacauguauggagagugugaagaaugggacuuacgauuauccuaaauacuccgaagaggccaagcugaacagagaagagauugacggagucaaacuugagagcaccgaaaucuaucaaauucuggcuauauacucuacaguggcgucaaguuugguccucgugguuagccugggugcaaucuccuuuuggaugugcucuaauggcucguuacagugcaggauuuguaucuga

SEQ ID NO: 135073 - RNA, 1701 nt, Artificial Sequence; identical to SEQ ID NO: 133632
  derived and/or modified CDS sequence (opt3) from hemagglutinin__InfluenzaA__AEL89571

SEQ ID NO: 135074 - RNA, 1701 nt, Artificial Sequence
  derived and/or modified CDS sequence (opt3) from hemagglutinin__InfluenzaA__AEL89581
augaaggccauccuggugguccuccuuuacaccuucgcuacagcaaacgccgacacucugugcauuggcuaucacgcgaauaacagcacggauaccguugacacaguguuggagaaaaauguaacugugacccauuccgucaacuuacuggaagauaagcacaaugggaaacuauguaagcucagaggaguggcuccccugcaucuugguaaaugcaacauagccggcuggauccuggggaauccugagugugaaucuuugucaacagcaaguagcugguccuacauuguugagaccucuucgucagacaacggaacuugcuauccaggcgauuuuaucgacuacgaggagcucagggagcagcugagcaguguguccucuuucgaacgguuugagauguucccgaagacaagcuccuggcccgaucacgacucaaauaagggugucaccgccgcuuguccucaugcaggggccaaaaguuuuuauaagaaccugauuuggcucgugaaaaagggaaauagcuacccaaaauuaucuaaguccuauaucaacgauaagggcaaagaaguacugguucuuuggggcauacaccaccccucaacgagcgcugaccaacagaguuuguaccagaaugccgaugcguacguguucgucgggacuucucgcuauuccaagaaauuuaagccugagaucgcaauucgaccaaaagugcgugaccaggagggaagaaugaacuacuauuggacccugguggaacccggugauaagaucacauucgaggccacuggcaaucuagucguuccuagguacgcuuuugccauggaacggaacgcagggagcggaauuaucauaucggacaccccagugcaugacugcaacacaaccugucaaacgccgaaaggcgcuauuaauacuucucuccccuuccagaacauccacccuauuacaaucgguaagugcccaaaguauguaaaauccaccaagcugcgccuugccacugggcugagaaaugugcccucaauccagaguaggggauuguuuggcgcgauugccggcuucauagaagggggauggacagguauggucgauggcugguacggguaucaucaccagaacgaacaaggaagcggcuacgcagcugaccucaaauccacccagaaugccaucgauaagauuacgaacaaaguuaauucugugaucgagaagaugaacacccaguuuacagcuguggguaaggaguucaaucaccuggaaaaacggauagagaacuuaaauaagaaagucgacgauggguuccuggacauuuggacuuacaacgccgaacuccuugugcuguuggagaaugaacgcacccuagauuaucaugacagcaacguaaagaaucuguacgagaaaguucgaucacagcucaagaacaacgcaaaggagaucggcaauggauguuuugaguucuaucacaaaugcgauaacacauguauggaaagugugaagaauggcacuuacgacuauccuaaauacuccgaagaggccaagcugaacagagaagagaucgauggggucaaacuugagagcaccaggauuuaucaaauccuggcuauuuacucuacaguggcgucaaguuugguccucgugguuagccugggagcaauauccuuuuggaugugcucuaaugguucguuacagugccggaucuguauuuga

SEQ ID NO: 135075 - RNA, 1701 nt, Artificial Sequence; identical to SEQ ID NO: 134502
  derived and/or modified CDS sequence (opt3) from hemagglutinin__InfluenzaA__AEL89591

SEQ ID NO: 135076 - RNA, 1701 nt, Artificial Sequence
  derived and/or modified CDS sequence (opt3) from hemagglutinin__InfluenzaA__AEL89601
augaaggccauccuggugguccuccuuuacaccuucgcuacagcaaacgccgacacucugugcauuggcuaucacgcgaauaacagcacggauaccguugacacaguguuggagaaaaauguaacugugacccauuccgucaacuuacuggaagauaagcacaaugggaaacuauguaagcucagaggaguggcuccccugcaucuugguaaaugcaacauagccggcuggauccuggggaauccugagugugaaucuuugucaacagcaaguagcugguccuacauuguugagaccucuucgucagacaacggaacuugcuauccaggcgauuuuaucgacuacgaggagcucagggagcagcugagcaguguguccucuuucgaacgguuugagauuuucccgaagacaagcuccuggcccaaucacgauucaaacaagggugucaccacggccuguccucaugcuggggcaaaaaguuuuuauaagaaucugaucuggcucgugaaaaagggaaacagcuacccaaaauuaucuaaguccuauauaaaugacaagggcaaagaaguacugguucuuuggggcauccaccaucccccuacuucagccgaucaacagagcuuguaccagaacgcugacgccuacguguucgucgggaccagucgcuauucuaagaaauuuaagccagagauugcgauccgacccaaagugcgugaucaggagggaagaaugaauuacuauuggacacugguggaaccuggugacaagauuacuuucgaggcaaccggcaaccuagucguuccaagguacgccuuugcuauggaacggaacgccggguccggaaucauaauuagcgauacaccggugcacgacugcaauaccacgugucaaacucccaaaggcgcaaucaacacaucgcucccuuuccagaauauucacccaaucaccaucgguaagugccccaaguauguaaaaucuacuaagcugcgccuugcuacagggcugagaaacgugccuuccauucagucaaggggauuguuuggcgccauagcgggcuucaucgaagggggauggaccgguauggucgacggcugguacggguaucaucaccagaaugaacaaggaaguggcuacgccgcagaucucaaaagcacgcagaacgcuauugacgagaucaccaauaaggugaacuccguuauagagaaaaugaauacacaguuuacugccguggguaaggaguucaaccaccuggaaaagcggauugaaaauuuaaacaaaaaggucgaugacggguuccuggauaucuggaccuacaaugcugagcuccuugugcuguuggaaaacgagcgcacacuagacuaucaugauucuaaaguaaagaaucuguacgagaaaguucgaagccagcucaagaacaacgccaaggaaaucggcaauggauguuuugaguucuaucacaaaugcgacaacacuuguauggaaucagugaagaauggcaccuacgauuauccaaaauacagugaggaagcaaagcugaacagagaggagauugacggggucaaacuugaauccacaaggaucuaucaaauucuggccauauacagcaccguggcuucuucauugguccucgugguuagucugggagcgaucagcuuuuggaugugcuccaaugguucuuuacagugccggauuuguaucuga

SEQ ID NO: 135077 - RNA, 1701 nt, Artificial Sequence; identical to SEQ ID NO: 134502
  derived and/or modified CDS sequence (opt3) from hemagglutinin__InfluenzaA__AEL89611

SEQ ID NO: 135078 - RNA, 1701 nt, Artificial Sequence; identical to SEQ ID NO: 134944
  derived and/or modified CDS sequence (opt3) from hemagglutinin__InfluenzaA__AEL89621

SEQ ID NO: 135079 - RNA, 1701 nt, Artificial Sequence; identical to SEQ ID NO: 133632
  derived and/or modified CDS sequence (opt3) from hemagglutinin__InfluenzaA__AEL89631

SEQ ID NO: 135080 - RNA, 1701 nt, Artificial Sequence; identical to SEQ ID NO: 134968
  derived and/or modified CDS sequence (opt3) from hemagglutinin__InfluenzaA__AEL89641

SEQ ID NO: 135081 - RNA, 1701 nt, Artificial Sequence
  derived and/or modified CDS sequence (opt3) from hemagglutinin__InfluenzaA__AEL89651
augaaggccauccuggugguccuccuuuacaccuucgcuacagcaaacgccgacacucugugcauuggcuaucacgcgaauaacagcacggauaccguugacacaguguuggagaaaaauguaacugugacccauuccgucaacuuacuggaagauaagcacaaugggaaacuauguaagcucagaggaguggcuccccugcaucuugguaaaugcaacauagccggcuggauccuggggaauccugagugugaaucuuugucaacagcaaguagcugguccuacauuguugagaccucuucgucagacaacggaacuugcuauccaggcguguuuaucgauuacgaggagcucagggagcagcugagcagugucuccucuuucgaacgguuugagauuuucccgaagacaagcuccuggcccaaucacgacucaaacaagggugugaccgccgcuuguccucaugcaggggccaaaaguuuuuauaagaaucugaucuggcucguuaaaaagggaaacagcuacccaaaauuaucuaaguccuauauaaaugauaagggcaaagaaguacuggugcuuuggggcauccaccaccccucaacgacugcugaccaacagagcuuguaccagaacgccgaugcguacgucuucguggggaccagucgcuauucuaagaaauuuaagccugagauugcaauccgaccaaaagugcgugaccaggagggaagaaugaauuacuauuggacacuggucgaacccggugauaagauuacuuucgaggccaccggcaaccuaguugugccuagguacgcuuuugccauggaacggaacgcaggguccggaaucauaauuagcgacacaccaguacaugauugcaauaccacgugucaaacuccgaaaggcgcuaucaacacaucgcuccccuuccagaauauucacccuaucaccaucgguaagugcccaaaguuugugaaaucuacuaagcugcgccuugccacagggcugagaaacguccccuccauucagucaaggggauuguucggcgcgauagccggcuuuaucgaagggggauggaccgguaugguggacggcugguauggguaccaucaccagaaugaacaaggaaguggcuaugcagcugaccucaaaagcacgcagaacgccauugauaagaucaccaauaaaguuaacuccgugauagagaagaugaauacacaguucacugcugucgguaaggaguucaaccaccuggaaaaacggauugagaauuuaaacaagaaaguggacgauggguuucuggacaucuggaccuacaaugccgaacuccuuguacuguuggagaacgaacgcacacuagauuaccaugacucuaauguuaagaaccuguaugagaaagugcgaaaccagcucaagaauaacgcaaaggagaucggcaauggauguuucgaauuuuaccacaaaugcgauaacacuuguauggagagcgucaagaauggcaccuaugacuacccuaaauauucagaagaggccaagcugaacagagaagagauugauggggugaaacuugagaguacaaggaucuaccaaauucuggcuauauauuccaccgucgcgagcucuuuggugcucguugugucacugggagcaaucaguuucuggaugugcagcaaugguuccuuacagugccggauuuguaucuga

SEQ ID NO: 135082 - RNA, 1701 nt, Artificial Sequence; identical to SEQ ID NO: 134483
  derived and/or modified CDS sequence (opt3) from hemagglutinin__InfluenzaA__AEL89661

SEQ ID NO: 135083 - RNA, 1701 nt, Artificial Sequence
  derived and/or modified CDS sequence (opt3) from hemagglutinin__InfluenzaA__AEL89671
augaaggccauccuggugguccuccuuuacaccuucgcuacagcaaacgccgacacucugugcauuggcuaucacgcgaauaacagcacggauaccguugacacaguguuggagaaaaauguaacugugacccauuccgucaacuuacuggaagauaagcacaaugggaaacuauguaagcucagaggaguggcuccccugcaucuugguaaaugcaacauagccggcuggauccuggggaauccugagugugaaucuuugucaacagcaaguagcugguccuacauuguugagaccucuucgucagacaacggaacuugcuauccaggcgauuuuaucgacuacgaggagcucagggagcagcugagcaguguguccucuuucgaacgguuugagauuuucccgaagacaagcuccuggcccaaucacgauucaaacaagggugucaccgccgcuuguccucaugcaggggccaaaaguuuuuauaagaaucugaucuggcucgugaaaaagggaaacagcuacccaaaauuaucuaaguccuauauaaaugacaagggcaaagaaguacugguucuuuggggcauccaccaccccucaacgacugcugaucaacagagcuuguaccagagugccgacaccuacguguucgucgggacaucucgcuauuccaagaaauuuaagccugagauugcgauccgaccaaaagugcgugaucaggagggaagaaugaacuacuauuggacucugguggaacccggugacaagauuaccuucgaggcaacaggcaaucuagucguuccuagguacgccuuugcuauggaacggaacgccgggagcggaaucauaauuucggauaccccagugcaugacugcaacacgacuugucaaacaccgaaaggcgcaaucaauaccucucuccccuuccagaacauucacccuaucacuaucgguaagugcccaaaguauguaaaauccacaaagcugcgccuugcuaccgggcugagaaaugugcccucaauucagaguaggggauuguuuggcgccauagcgggcuucaucgaagggggauggacggguauggucgacggcugguacggguaucaucaccagaacgaacaaggaagcggcuacgccgcagaucucaaauccacccagaaugcuauugacaagaucacaaacaaaguuaauucugugauagagaagaugaacacucaguuuaccgccguggguaaggaguucaaucaccuggaaaaacggauugagaacuuaaauaagaaagucgaugacggguuccuggauaucuggacauacaacgcugaacuccuugugcuguuggagaaugaacgcacucuagacuaucaugauagcaacguaaagaaucuguacgagaaaguucgaaaccagcucaagaacaaugccaaggagaucggcaacggauguuuugaguucuaucacaaaugcgacaauaccuguauggaaucagugaagaacggcacauacgauuauccuaaauacagugaagaggcaaagcugaauagagaagagauugacggggucaaacuugaguccaccaggaucuaucaaauucuggccauauacagcacuguggcuucuucauugguccucgugguuagucugggagcgaucagcuuuuggaugugcuccaacgguucuuuacagugccggauuuguaucuga

SEQ ID NO: 135084 - RNA, 1701 nt, Artificial Sequence; identical to SEQ ID NO: 134483
  derived and/or modified CDS sequence (opt3) from hemagglutinin__InfluenzaA__AEL89691

SEQ ID NO: 135085 - RNA, 1701 nt, Artificial Sequence
  derived and/or modified CDS sequence (opt3) from hemagglutinin__InfluenzaA__AEL89701
augaaggccauccuggugguccuccuuuacaccuucgcuacagcaaacgccgacacucugugcauuggcuaucacgcgaauaacagcacggauaccguugacacaguguuggagaaaaauguaacugugacccauuccgucaacuuacuggaagauaagcacaaugggaaacuauguaagcucagaggaguggcuccccugcaucuugguaaaugcaacauagccggcuggauccuggggaauccugagugugaaucuuugucaacagcaaguagcugguccuacauuguugagaccucuucgucagacaacggaacuugcuauccaggcgauuuuaucgacuacgaggagcucagggagcagcugagcaguguguccucuuucgaacgguuugagauuuucccgaagacaagcuccuggcccaaucacgauucaaacaagggugucaccacggccuguccucaugcuggggcaaaaaguuuuuauaagaaucugaucuggcucgugaaaaagggaaacagcuacccaaaauuaucuaaguccuauauaaaugacaagggcaaagaaguacugguucuuuggggcauccaccaucccccuacuucagccgaucaacagaacuuguaccagaaugcugacgccuacguguucgucgggaccagccgcuauaguaagaaauuuaagccagagauugcgauccgacccaaagugcgugaucaggagggaagaaugaacuacuauuggacacugguggaaccuggugacaagauuacuuucgaggcaaccggcaaccuagucguuccaagguacgccuuugcuauggaacggaaugccgggucuggaaucauaauuuccgauacaccggugcacgacugcaacaccacgugucaaacucccaaaggcgcaaucaauacaagccucccuuuccagaacauucacccaaucaccaucgguaagugccccaaguauguaaaaucgacuaagcugcgccuugcuacagggcugagaaaugugccuucuauucaguccaggggauuguuuggcgccauagcgggcuucaucgaagggggauggaccgguauggucgacggcugguacggguaucaucaccagaacgaacaaggaucaggcuacgccgcagaucucaaaaguacgcagaaugcuauugacgguaucaccaacaaggugaauagcguuauagagaaaaugaacacacaguuuacugccguggggaaggaguucaaucaccuggaaaagcggauugagaacuuaaauaaaaaggucgaugacggcuuccuggauaucuggaccuacaacgcugaacuccuugugcuguuggagaaugaacgcacacuagacuaucaugauuccaacguaaagaaccuguacgagaagguucgaucucagcucaaaaauaacgccaaggagaucggaaauggcuguuuugaguucuaucacaagugcgacaacacuuguauggaaagcgugaaaaaugggaccuacgauuauccaaaguacucagaagaggcaaaacugaacagagaagagauugacggagucaaacuugagaguacaaugaucuaucaaauucuggccauauacuccaccguggcuagcucuuugguccucgugguuucacugggugcgaucaguuuuuggaugugcagcaauggcuccuuacagugcaggauuuguaucuga

SEQ ID NO: 135086 - RNA, 1701 nt, Artificial Sequence; identical to SEQ ID NO: 135085
  derived and/or modified CDS sequence (opt3) from hemagglutinin__InfluenzaA__AEL89711

SEQ ID NO: 135087 - RNA, 1701 nt, Artificial Sequence; identical to SEQ ID NO: 134483
  derived and/or modified CDS sequence (opt3) from hemagglutinin__InfluenzaA__AEL89721

SEQ ID NO: 135088 - RNA, 1701 nt, Artificial Sequence
  derived and/or modified CDS sequence (opt3) from hemagglutinin__InfluenzaA__AEL89741
augaaggccauccuggugguccuccuuuacaccuucgcuacaacuaacgcagacacgcugugcauuggcuaucacgccaauaacagcaccgauacaguugacacuguguuggagaaaaauguaaccgugacacauuccgucaacuuacuggaagauaagcacaaugggaaacuauguaagcucagaggaguggcgccccugcaucuugguaaaugcaacauagcuggcuggauccuggggaauccugagugugaaucuuugucaaccgccaguagcugguccuacauuguugagacuucuucgucagacaacggaacaugcuauccaggcgauuuuaucgacuacgaggagcucagggagcagcugagcaguguguccucuuucgaacgguuugagauuuucccgaagaccagcuccuggcccaaucacgauucaaacaagggugucacggcagccuguccucaugcuggggcaaaaaguuuuuauaagaaucugaucuggcucgugaaaaagggaaacagcuacccaaaauuaucuaaguccuauauaaaugacaagggcaaagaaguacugguucuuuggggcauccaccaccccucaacuaccgccgaucaacagagcuuguaccagaacgcugacacauacguguucgucgggaccagucgcuauucuaagaaauuuaagccugagauugccauccgaccaaaagugcgugaucaggagggaagaaugaauuacuauuggacucugguggaacccggugacaagauuacauucgaggcgaccggcaaccuagucguuccuagguacgcauuugccauggaacggaacgcuggguccggaaucauaauuagcgauacgccagugcaugacugcaauacuacaugucaaaccccgaaaggcgccaucaacacuucgcuccccuuccagaauauucacccuaucacaaucgguaagugcccaaaguauguaaaaucuaccaagcugcgccuugcaacggggcugagaaacgugcccuccauucagucaaggggauuguuuggcgcuauagccggcuucaucgaagggggauggaccgguauggucgacggcugguacggguaucaucaccagaaugaacaaggaaguggcuacgcggccgaucucaaaagcacacagaacgcaauugacaagaucacuaauaaagugaacuccguuauagagaagaugaauacccaguuuacagcuguggguaaggaguucaaccaccuggaaaaacggauugagaauuuaaacaagaaagucgaugacggguuccuggauaucuggacuuacaaugccgaacuccuugugcuguuggagaacgaacgcacccuagacuaucaugauucuaauguaaagaaccuguacgagaaaguucgaaaccagcucaagaauaacgcuaaggagaucggcaauggauguuuugaguucuaucacaaaugcgacaacacauguauggaaagcgugaagaauggcaccuacgauuauccuaaauacucagaagaggccaagcugaacagagaagagauugacggggucaaacuugagaguacuaggaucuaucaaauucuggcaauauacuccacgguggccagcucuuugguccucgugguuucacugggagcuaucaguuuuuggaugugcagcaaugguuccuuacagugccggauuuguaucuga

SEQ ID NO: 135089 - RNA, 1701 nt, Artificial Sequence; identical to SEQ ID NO: 133632
  derived and/or modified CDS sequence (opt3) from hemagglutinin__InfluenzaA__AEL89751

SEQ ID NO: 135090 - RNA, 1701 nt, Artificial Sequence
  derived and/or modified CDS sequence (opt3) from hemagglutinin__InfluenzaA__AEL89761
augaaggccauccuggugguccuccuuuacaccuucgcuacagcaaacgccgacacucugugcauuggcuaucacgcgaauaacagcacggauaccguugacacaguguuggagaaaaauguaacugugacccauuccgucaacuuacuggaagauaagcacaaugggaaacuauguaagcucagaggaguggcuccccugcaucuugguaaaugcaacauagccggcuggauccuggggaauccugagugugaaucuuugucaacagcaaguagcugguccuacauuguugagaccucuucgucagacaacggaacuugcuauccaggcgauuuuaucgacuacgaggagcucagggagcagcugagcaguguguccucuuucgaacgguuugagauuuucccgaagacaagcuccuggcccaaucacgauucaaacaagggugucaccacggccuguccucaugcuggggcaaaaaguuuuuauaagaaucugaucuggcucgugaaaaagggaaacagcuacccaaaauuaucuaaguccuauauaaaugacaagggcaaagaaguacugguucuuuggggcauccaccaucccccuacuucagccgaucaacagagcuuguaccagaacgcugacgccuacguguucgucgggaccagucgcuauucuaagaaauuuaagccagagauugcgauccgacccaaagugcgugaucaggagggaagaaugaauuacuauuggacacugguggaaccuggugacaagauuacuuucgaggcaaccggcaaccuagucguuccaagguacgccuuugcuauggaacggaacgccggguccggaaucauaauuagcgauacaccggugcacgacugcaauaccacgugucaaacucccaaaggcgcaaucaacacaucgcucccuuuccagaauauucacccaaucaccaucgguaagugccccaaguauguaaaaucuacuaagcugcgccuugcuacagggcugagaaacgugccuuccauucagucaaggggauuguuuggcgccauagcgggcuucaucgaagggggauggaccgguauggucgacggcugguacggguaucaucaccagaaugaacaaggaaguggcuacgccgcagaucucaaaagcacgcagaacgcuauugacgguaucaccaauaaggugaacuccguuauagagaaaaugaauacacaguuuacugccguggggaaggaguucaaccaccuggaaaagcggauugagaauuuaaacaaaaaggucgaugacggcuuccuggauaucuggaccuacaaugcugaacuccuugugcuguuggagaacgaacgcacacuagacuaucaugauucuaauguaaagaaccuguacgagaagguucgaagccagcucaaaaacaaugccaaggagaucggaaacggcuguuuugaguucuaucacaagugcgacaauacuuguauggaaucagugaaaaacgggaccuacgauuauccaaaguacagugaagaggcaaaacugaauagagaagagauugacggagucaaacuugaguccacaaugaucuaucaaauucuggccauauacagcaccguggcuucuucauugguccucgugguuagucugggugcgaucagcuuuuggaugugcuccaacggcucuuuacagugcaggauuuguaucuga

SEQ ID NO: 135091 - RNA, 1701 nt, Artificial Sequence; identical to SEQ ID NO: 134968
  derived and/or modified CDS sequence (opt3) from hemagglutinin__InfluenzaA__AEL89771

SEQ ID NO: 135092 - RNA, 1701 nt, Artificial Sequence; identical to SEQ ID NO: 135090
  derived and/or modified CDS sequence (opt3) from hemagglutinin__InfluenzaA__AEL89781

SEQ ID NO: 135093 - RNA, 1701 nt, Artificial Sequence; identical to SEQ ID NO: 134483
  derived and/or modified CDS sequence (opt3) from hemagglutinin__InfluenzaA__AEL89791

SEQ ID NO: 135094 - RNA, 1701 nt, Artificial Sequence
  derived and/or modified CDS sequence (opt3) from hemagglutinin__InfluenzaA__AEL89801
augaaggccauccuggugguccuccuuuacaccuucgcuacagcaaacgccgacacucugugcauuggcuaucacgcgaauaacagcacggauaccguugacacaguguuggagaaaaauguaacugugacccauuccgucaacuuacuggaagauaagcacaaugggaaacuauguaagcucagaggaguggcuccccugcaucuugguaaaugcaacauagccggcuggauccuggggaauccugagugugaaucuuugucaacagcaaguagcugguccuacauuguugagaccucuucgucagacaacggaacuugcuauccaggcguguuuaucgauuacgaggagcucagggagcagcugagcagugucuccucuuucgaacgguuugagauuuucccgaagacaagcuccuggcccaaucacgacucaaacaagggugugaccgccgcuuguccucaugcaggggccaaaaguuuuuauaagaaucugaucuggcucguuaaaaagggaaacagcuacccaaaauuaucuaaguccuauauaaaugauaagggcaaagaaguacuggugcuuuggggcauccaccaccccucaacgacugcugaccaacagagcuuguaccagaacgccgaugcguacgucuucguggggaccagucgcuauucuaagaaauuuaagccugagauugcagugcgaccaaaaguccgugaccaggagggaagaaugaauuacuauuggacacugguugaacccggugauaagaucacuuucgaggccaccggcaaccuagugguaccuagguacgcuuuugccauggaacggaacgcaggguccggaauuaucauaagcgacacaccagugcaugauugcaauaccacgugucaaacuccgaaaggcgcuauuaacacaucgcuccccuuccagaauauccacccuauuaccaucgguaagugcccaaaguaugucaaaucuacuaagcugcgccuugccacagggcugagaaacgugcccuccauccagucaaggggauuguuuggcgcgauugccggcuucauagaagggggauggaccgguaugguugacggcugguacggguaucaucaccagaaugaacaaggaaguggcuacgcagcugaccucaaaagcacgcagaacgccaucgauaagauuaccaauaaagugaacuccgucaucgagaagaugaauacacaguuuacugcuguggguaaggaguucaaccaccuggaaaaacggauagagaauuuaaacaagaaaguagacgauggguuccuggacauuuggaccuacaaugccgaacuccuuguucuguuggagaacgaacgcacacuagauuaucaugacucuaaugugaagaaccuguacgagaaaguccgaaaccagcucaagaauaacgcaaaggagaucggcaauggauguuuugaguucuaucacaaaugcgauaacacuuguauggaaagcgugaagaauggcaccuacgacuauccuaaauacucagaagaggccaagcugaacagagaagagaucgauggggucaaacuugagaguacaaggauuuaucaaauccuggcuauuuacuccaccguggcgagcucuuugauacucguugugucacugggagcaaucaguuuuuggaugugcagcaaugguuccuuacagugccggauuuguaucuga

SEQ ID NO: 135095 - RNA, 1701 nt, Artificial Sequence
  derived and/or modified CDS sequence (opt3) from hemagglutinin__InfluenzaA__AEL89812
augaaggccauccuggugguccuccuuuacaccuucgcuacagcaaacgccgacacucugugcauuggcuaucacgcgaauaacagcacggauaccguugacacaguguuggagaagaauguaacugugacccauuccgucaacuuacuggaagauaagcacaaugggaaacuauguaagcucagaggaguggcuccccugcaucuugguaaaugcaacauagccggcuggauccuggggaauccugagugugaaucuuugucaacagcaaguagcugguccuacauuguugagaccucuucgucagacaacggaacuugcuauccaggcgauuuuaucgacuacgaggagcucagggagcagcugagcaguguguccucuuucgaacgguuugagauuuucccgaagacaagcuccuggcccaaucacgauucaaacaagggugucaccacggccuguccucaugcuggggcaaaaaguuuuuauaagaaucugaucuggcucgugaaaaagggaaacagcuacccaaaauuaucuaaguccuauauaaaugacaagggcaaagaaguacugguucuuuggggcauccaccaucccccuacuucagccgaucaacagagcuuguaccagaacgcugacgccuacguguucgucgggaccagucgcuauucuaagaaauuuaagccagagauugcgauccgacccaaagugcgugaucaggagggaagaaugaauuacuauuggacacugguggaaccuggugacaagauuacuuucgaggcaaccggcaaccuagucguuccaagguacgccuuugcuauggaacggaacgccggguccggaaucauaauuagcgauacaccggugcacgacugcaaugcaaccugucaaacgcccaaaggcguaaucaacacuucgcucccuuuccagaauauucacccaaucacaaucgguaagugccccaaguaugugaaaucuaccaagcugcgccuugcuacugggcugagaaacgucccuuccauucagucaaggggauuguuuggcgccauagcgggcuucaucgaagggggauggacagguaugguggacggcugguacggguaucaucaccagaaugaacaaggaaguggcuacgccgcagaucucaaaagcacccagaacgcuauugacgguaucacgaauaagguuaacuccgugauagagaaaaugaauacccaguuuacagccgucgggaaggaguucaaccaccuggaaaagcggauugagaauuuaaacaaaaagguggaugacggcuuccuggauaucuggacuuacaaugcugaacuccuuguacuguuggagaacgaacgcacccuagacuaucaugauucuaauguuaaaaaccuguacgagaaggugcgaagccagcucaaaaacaaugccaaggagaucggaaacggcuguuuugaguucuaucacaagugcgacaauacauguauggaaucagucaaaaacgggacuuacgauuauccaaaguacagugaagaggcaaaacugaauagagaagagauugacggagugaaacuugaguccaccaugaucuaucaaauucuggccauauacagcacagucgcuucuucauuggugcucguugugagucugggugcgaucagcuuuuggaugugcuccaacggcucuuuacagugcaggauuuguaucuga

SEQ ID NO: 135096 - RNA, 1701 nt, Artificial Sequence; identical to SEQ ID NO: 134483
  derived and/or modified CDS sequence (opt3) from hemagglutinin__InfluenzaA__AEL89832

SEQ ID NO: 135097 - RNA, 1701 nt, Artificial Sequence
  derived and/or modified CDS sequence (opt3) from hemagglutinin__InfluenzaA__AEL89842
augaaggccauccuggugguccuccuuuacacccuggcuacagcaaacgccgacacuuugugcauuggcuaucacgcgaauaacagcacggauaccguugacacaguguuagagaaaaauguaacugugacccauuccgucaaccugcuagaagauaagcacgacgggaaacucuguaagcugagaggaguggcuccccuucaucuggguaaaugcaauauagccggcuggaucuuggggaacccugagugugaaucucucucaacagcaaguagcugguccuacauuguugagaccucuucgucagauaauggaacuugcuauccaggcgacuucaucgauuacgaggagcugagggagcagcugagcaguguguccucuuuugaacgguucgagauuuuuccgaagacaagcuccuggcccaaccacgacucaaauaagggugucaccgccgcuuguccucaugcaggggccaaaaguuucuauaagaaccucaucugguuagugaaaaagggaaauagcuacccaaaacugucuaaguccuauauaaacgauaagggcaaagaaguacuuguuuuguggggcauccaccaccccucaacgagcgcugaccaacagagucuguaccagaaugccgaugcguacguguuugucgggacuucucgcuauuccaagaaauucaagccugagauugcaauccgaccaaaagugcgugaccaggagggaagaaugaacuacuauuggacccuaguggaacccggugauaagauuacauuugaggccacuggcaaucucgucguuccuagguacgcuuucgccauggaacggaacgcagggagcggaaucauaauuucggacaccccagugcaugacugcaacgcuacaugucaaaccccgaaaggcgccaucaauacgucucugcccuuucagaacguacacccuauuacuaucgguaagugcccaaaguaugugaaauccacaaaacuucgccuggcgaccggguugagaaauguccccucaauccagaguaggggacucuucggcgccauugcaggcuuuauagaagggggauggacugguaugguggauggcugguacggguaucaucaccagaacgaacaaggaagcggcuacgcugccgaccugaaguccacacagaaugcuaucgauaagauuaccaacaaaguuaauucugugaucgagaagaugaacacgcaguucaccgccgucgguaaggaguuuaaucacuuagaaaaacggauagagaaccugaauaagaaaguggacgauggguuccucgacauuuggacauacaacgcagaacuucugguauugcuagagaaugaacgcacucuggauuaucaugacagcaacguuaagaaucucuacgagaaagugcgaucacagcugaagaacaacgccaaggagaucggcaauggauguuucgaauuuuaucacaaaugcgauaacaccuguauggagagugucaagaauggcacauacgacuauccuaaauacuccgaagaggcuaaacuuaacagagaagagaucgauggggugaagcuggagagcacuaggauuuaucaaaucuuggcgauuuacucuaccgucgcaucaagucucgugcugguugugagcuuaggagccauauccuucuggaugugcucuaaugguucgcugcagugccggaucuguauuuga

SEQ ID NO: 135098 - RNA, 1701 nt, Artificial Sequence
  derived and/or modified CDS sequence (opt3) from hemagglutinin__InfluenzaA__AEL89852
augaaggccauccuggugguccuccuuuacaccuucgcuacagcaaacgccgacacucugugcauuggcuaucacgcgaauaacagcacggauaccguugacacaguguuggagaaaaauguaacugugacccauuccgucaacuuacuggaagauaagcacaaugggaaacuauguaagcucagaggaguggcuccccugcaucuugguaaaugcaacauagccggcuggauccuggggaauccugagugugaaucuuugucaacagcaaguagcugguccuacauuguugagaccucuucgucagacaacggaacuugcuauccaggcgauuuuaucaauuacgaggagcucagggagcagcugagcaguguguccucuuucgaacgguuugagauuuucccgaagacaagcuccuggcccaaccacgacucaaauaagggugucaccgccgcuuguccucaugcaggggccaaaaguuuuuauaagaaccugaucuggcucgugaaaaagggaaauagcuacccaaaauuaucuaaguccuauauaaacgauaagggcaaagaaguacugguucuuuggggcauccaccaccccucaacgagcgcugaccaacagaguuuguaccagaaugccgaugcguacguguucgucgggacuucuaaguauuccaaaaaguuuaaaccugagauugcagugcgcccaaaggugcgagaccaggagggacguaugaacuacuauuggacccuggucgaacccggugauaaaaucacauucgaggccacuggcaaccuacucguuccuagauacgcuuuugccauggaaaggaaugcagggagcggaauuaucauaucggacaccccagugcaugauugcaacacaaccugucaaacgccgaagggcgcuauuaauacuucucugcccuuccagaacauccacccuauuacaaucgguaagugcccaaaauauguaaaguccaccaaacuucggcuggccacuggguugcgcaaugugcccucaauccagaguagaggacucuuuggcgcgauugccggcuucauagaagggggauggacagguauggucgacggcugguacggguaucaucaccagaacgaacaaggaagcggcuacgcagcugaccugaaguccacccagaaugccaucgauaaaauuacgaacaagguaaauucuguuaucgagaagaugaacacccaguuuacagcuguggguaaagaguucaaucacuuagaaaagaggauagagaaccugaauaaaaaggucgacgauggguuccucgacauuuggacuuacaacgccgaacuucugguguugcuagagaaugaacggacccuggauuaucaugacagcaacgugaaaaaccucuacgagaagguucgcucacagcugaagaauaacgcaaaagagaucggcaauggauguuuugaguucuaucacaagugcgauaacacauguauggaaagugugaaaaauggcacuuacgacuauccuaaguacuccgaagaggccaaacuuaaccgagaagagaucgauggggucaagcuggagagcaccagaauuuaucaaaucuuggcuauuuacucuacaguggcgucaagucucguccuggugguuagcuuaggagcaauauccuuuuggaugugcucuaaugguucgcugcagugcaggaucuguauuuga

SEQ ID NO: 135099 - RNA, 1701 nt, Artificial Sequence; identical to SEQ ID NO: 134502
  derived and/or modified CDS sequence (opt3) from hemagglutinin__InfluenzaA__AEL93568

SEQ ID NO: 135100 - RNA, 1701 nt, Artificial Sequence; identical to SEQ ID NO: 134483
  derived and/or modified CDS sequence (opt3) from hemagglutinin__InfluenzaA__AEL93578

SEQ ID NO: 135101 - RNA, 1701 nt, Artificial Sequence
  derived and/or modified CDS sequence (opt3) from hemagglutinin__InfluenzaA__AEL93598
augaaggccauccuggugguccuccuuuacaccuucgcuacagcaaacgccgacacucugugcauuggcuaucacgcgaauaacagcacggauaccguugacacaguguuggagaaaaauguaacugugacccauuccgucaacuuacuggaagauaagcacaaugggaaacuauguaagcucagaggaguggcuccccugcaucuugguaaaugcaacauagccggcuggauccuggggaauccugagugugaaucuuugucaacagcaaguagcugguccuacauuguugagaccucuucgucagacaacggaacuugcuauccaggcguguuuaucgauuacgaggagcucagggagcagcugagcagugucuccucuuucgaacgguuugagauuuucccgaagacaagcuccuggcccaaucacgacucaaacaagggugugaccgccgcuuguccucaugcaggggccaaaaguuuuuauaagaaucugaucuggcucguuaaaaagggaaacagcuacccaaaauuaucuaaguccuauauaaaugauaagggcaaagaaguacuggugcuuuggggcauccaccaccccucaacgacugcugaccaacagagcuuguaccagaacgccgaugcguacgucuucguggggaccagucgcuauucuaagaaauuuaagccugagauugcaauccgaccaaaagugcgugaccaggagggaagaaugaauuacuauuggacacuggucgaacccggugauaagauuacuuucgaggccaccggcaaccuaguugugccuagguacgcuuuugccauggaacggaacgcaggguccggaaucauaauuagcgacacaccaguacaugauugcaauaccacgugucaaacuccgaaaggcgcuaucaacacaucgcuccccuuccagaauauucacccuaucaccaucgguaagugcccaaaguaugugaaaucuacuaagcugcgccuugccacagggcugagaaacguccccuccauucagucaaggggauuguuuggcgcgauagccggcuucaucgaagggggauggaccgguaugguggacggcugguacggguaucaucaccagaaugaacaaggaaguggcuacgcagcugaccucaaaagcacgcagaacgccauugauaagaucaccaauaaaguuaacuccgugauagagaagaugaauacacaguuuacugcugucgguaaggaguucaaccaccuggaaaaacggauugagaauuuaaacaagaaaguggacgauggguuccuggacaucuggaccuacaaugccgaacuccuuguacuguuggagaacgaacgcacacuagauuaucaugacucuaauguuaagaaccuguacgagaaagugcgaaaccagcucaagaauaacgcaaaggagaucggcaauggauguuuugaguucuaucacaaaugcgauaacacuuguauggaaagcgucaagaauggcaccuacgacuauccuaaauacucagaagaggccaagcugaacagagaagagauugauggggugaaacuugagaguacaaggaucuaucaaauucuggcuauauacuccaccgucgcgagcucuuuggugcucguugugucacugggagcaaucaguuuuuggaugugcagcaaugguuccuuacagugccggauuuguaucuga

SEQ ID NO: 135102 - RNA, 1701 nt, Artificial Sequence
  derived and/or modified CDS sequence (opt3) from hemagglutinin__InfluenzaA__AEL93618
augaaggccauccugguggucaugcucuacaccuucgcuacagcaaacgccgacacucuuugcauuggcuaucacgcgaauaacagcacggauaccguugacacagugcuggagaaaaauguaacugugacccauuccgucaacuuguuagaagauaagcacaaugggaaacuguguaagcuaagaggaguggcuccccuccaucuggguaaaugcaacauagccggcuggauccuugggaauccugagugugaaucucugucaacagcaaguagcugguccuacauuguugagaccucuucgucagacaacggaacuugcuauccaggcgauuuuaucgacuacgaagaguugagggagcagcucagcaguguguccucuuucgaacgguuugagauuuucccgaagacaagcuccuggcccaaucacgauucaaacaagggugucaccgccgcuuguccucaugcaggggccaaaaguuuuuauaagaaucugaucuggcuggugaaaaagggaaacagcuacccaaaacucucuaaguccuauauaaaugacaagggcaaagaaguauuaguucuguggggcauccaccaccccucaacgacugcugaucaacagagccuuuaccagaacgccgacaccuacguguucgucgggacaagucgcuauucuaagaaauuuaagccugagauugcgauccgaccaaaagugcgugaucaggagggaagaaugaauuacuauuggacuuugguggaacccggugacaagauuaccuucgaggcaacaggcaaccuggucguuccuagguacgccuuugcuauggaacggaacgccggguccggaaucauaauuagcgauaccccagugcaugacugcaauacgacuugucaaacaccgaaaggcgcaaucaacaccucgcuacccuuccagaauauucacccuaucacuaucgguaagugcccaaaguauguaaaaucuacaaagcuccgccuggcuaccgggcuuagaaacgugcccuccauucagucaaggggacuguuuggcgccauagcgggcuucaucgaagggggauggacggguauggucgacggcugguacggguaucaucaccagaaugaacaaggaaguggcuacgccgcagauuugaaaagcacccagaacgcuauugacaagaucacaaauaaagugaacuccguuauagagaagaugaauacucaguuuaccgccguggguaaggaguucaaccaccucgaaaaacggauugagaaucugaacaagaaagucgaugacggguucuuagauaucuggacauacaaugcugaacugcucgugcuucuggagaacgaacgcacuuuggacuaucaugauucuaauguaaagaaccuauacgagaaaguucgaaaccagcugaagaauaacgccaaggagaucggcaauggauguuuugaguucuaucacaaaugcgacaacaccuguauggagagcgugaagaauggcacauacgauuauccuaaauacucagaagaggcaaagcucaacagagaagagauugacggggucaaacuggagaguaccaggaucuaucaaauucuugccauauacuccacuguggcuagcucucuggucuuggugguuucacucggagcgaucaguuuuuggaugugcagcaaugguucccugcagugccggauuuguaucuga

SEQ ID NO: 135103 - RNA, 1701 nt, Artificial Sequence; identical to SEQ ID NO: 134483
  derived and/or modified CDS sequence (opt3) from hemagglutinin__InfluenzaA__AEL93628

SEQ ID NO: 135104 - RNA, 1701 nt, Artificial Sequence; identical to SEQ ID NO: 134918
  derived and/or modified CDS sequence (opt3) from hemagglutinin__InfluenzaA__AEL93638

SEQ ID NO: 135105 - RNA, 1701 nt, Artificial Sequence
  derived and/or modified CDS sequence (opt3) from hemagglutinin__InfluenzaA__AEL94870
augaaggccauccuggugguccuccuuuacaccuucgcuacagcaaacgccgacacucugugcauuggcuaucacgcgaauaacagcacggauaccguugacacaguguuggagaagaauguaacugugacccauuccgucaacuuacuggaagauaagcacaaugggaaacuauguaagcucagaggaguggcuccccugcaucuugguaaaugcaacauagccggcuggauccuggggaauccugagugugaaucuuugucaacagcaaguagcugguccuacauuguugagaccucuucgucagacaacggaacuugcuauccaggcgauuuuaucgacuacgaggagcucagggagcagcugagcaguguguccucuuucgaacgguuugagauuuucccgaagacaagcuccuggcccgaucacgacucaaauaagggugucaccgccgcuuguccucaugcaggggccaaaaguuuuuauaagaaccugaucuggcucgugaaaaagggaaauagcuacccaaaauuaucuaaguccuauauaaacgauaagggcaaagaaguacugguucuuuggggcauccaccaccccucaacgagcgcugaccaacagaguuuguaccagaaugccgaugcguacguguucgucgggacuucucgcuauuccaagaaauuuaagccugagauugcaauccgaccaaaagugcgugaccaggagggaagaaugaacuacuauuggacccugguggaacccggugauaagauuacauucgaggccacuggcaaucuagucguuccuagguacgcuuuugccauggaacggaacgcagggagcggaaucauaauuucggacaccccagcucaugacugcaacacaaccugucaaacgccgaaaggcgccaucaauacuucucuccccuuccagaacauucacccuaucacaaucgguaagugcccaaaguaugugaaauccaccaagcugcgccuugcgacugggcugagaaauguacccucaauucagaguaggggauuguuuggcgccauagcaggcuucaucgaagggggauggacagguaugguggauggcugguacggguaucaucaccagaacgaacaaggaagcggcuacgcugccgaccucaaauccacccagaaugcuauugauaagaucacgaacaaagucaauucugugauaaagaagaugaacacccaguuuacagccguugguaaagaguucaaucaccuggagaagcggauugaaaacuuaaauaaaaagguggacgauggguuccuggacaucuggacuuacaacgcagagcuccuuguccuguuggaaaaugagcgcacccuagauuaucaugacagcaacgugaaaaaucuguacgaaaagguacgaucacagcucaagaacaacgccaaagagaucggcaauggauguuuugaguucuaucacaagugcgauaacacauguauggaaaguguuaaaaauggcacuuacgacuauccuaaguacuccgaggaagcuaaacugaacagagaggaaauugauggggugaaacuugagagcaccaggaucuaucaaauucuggcgauauacucuacagucgcaucaaguuuggugcucgucgugagccugggagccaucuccuuuuggaugugcucuaaugguucguuacagugccggauuuguaucuga

SEQ ID NO: 135106 - RNA, 1701 nt, Artificial Sequence
  derived and/or modified CDS sequence (opt3) from hemagglutinin__InfluenzaA__AEL95426
augaaggccauccuggugguccuccuuuacaccuucgcuacagcaaacgccgacacucugugcauuggcuaucacgcgaauaacagcacggauaccguugacacaguguuggagaaaaauguaacugugacccauuccgucaacuuacuggaagauaagcacaaugggaaacuauguaagcucagaggaguggcuccccugcaucuugguaaaugcaacauagccggcuggauccuggggaauccugagugugaaucuuugucaacagcaaguagcugguccuacauuguugagaccucuucgucagacaacggaacuugcuauccaggcgauuuuaucgacuacgaggagcucagggagcagcugagcaguguguccucuuucgaacgguuugagauuuucccgaagacaagcuccuggcccaaucacgauucaaacaagggugucaccgccgcuuguccucaugcaggggccaaaaguuuuuauaagaaucugaucuggcucgugaaaaagggaaacagcuacccaaaauuaucuaaguccuauauaaaugacaagggcaaagaaguacugguucuuuggggcauccaccaccccucaacgacugcugaucaacagagcuuguaccagaacgccgacaccuacguguucgucgggacaagucgcuauucuaagaaauuuaagccugagauugcgacucgaccaaaagugcgugaucaggagggaagaaugaauuacuauuggacccugguggaacccggugacaagaucacauucgaggcaaccggcaaccuagucguuccuagguacgccuuugcuauggaacggaacgccggguccggaauuaucauaagcgauacgccagugcaugacugcaauacuacaugucaaaccccgaaaggcgcaauuaacacuucgcuccccuuccagaauauccacccuauuacaaucgguaagugcccaaaguauguaaaaucuaccaagcugcgccuugcuacggggcugagaaacgugcccuccauccagucaaggggauuguuuggcgccauugcgggcuucauagaagggggauggaccgguauggucgacggcugguacggguaucaucaccagaaugaacaaggaaguggcuacgccgcagaucucaaaagcacacagaacgcuaucgacaagauuacuaauaaagugaacuccguuaucgagaagaugaauacccaguuuacagccguggguaaggaguucaaccaccuggaaaaacggauagagaauuuaaacaagaaagucgaugacggguuccuggauauuuggacuuacaaugcugaacuccuugugcuguuggagaacgaacgcacccuagacuaucaugauucuaauguaaagaaccuguacgagaaaguucgaaaccagcucaagaauaacgccaaggagaucggcaauggauguuuugaguucuaucacaaaugcgacaacacauguauggaaagcgugaagaauggcaccuacgauuauccuaaauacucagaagaggcaaagcugaacagagaagagaucgacggggucaaacuugagaguacuaggauuuaucaaauccuggccauuuacuccacgguggcuagcucuuugguccucgugguuucacugggagcgauaaguuuuuggaugugcagcaaugguuccuuacagugccggaucuguauuuga

SEQ ID NO: 135107 - RNA, 1701 nt, Artificial Sequence
  derived and/or modified CDS sequence (opt3) from hemagglutinin__InfluenzaA__AEL97631
augaaggccauccuggugguccuccuuuacaccuucgcuacagcaaacgccgacacucugugcauuggcuaucacgcgaauaacagcacggauaccguugacacaguguuggagaaaaauguaacugugacccauuccgucaacauauuagaagauaagcacaaugggaaacuguguaagcuaagaggaguggcuccccuccaucuggguaaaugcaacaucgccggcuggauucuugggaauccugagugugaaucucugucaacagcaaguagcugguccuacaucguugagaccucuucgucagacaacggaacuugcuauccaggcgauuuuauugacuacgaagaguugagggagcagcucagcaguguguccucuuucaagcgguuugaaaucuucccgaagacaagcuccuggcccaaucacgauucaaacaaaggugucaccgccgcuuguccucaugcaggggccaagaguuuuuauaaaaaucugauauggcuggugaagaaaggaaacagcuacccaaagcucucuaaguccuauaucaaugacaaaggcaaggagguauuaguucuguggggcauucaccaccccucaacgagcgcugaucaacagagucuuuaccagaacgccgacgcguacguguucgucgggacuucucgcuauuccaaaaaguuuaaaccugaaaucgcaauucgaccaaaggugcgugaucaggagggaagaaugaauuacuauuggaccuugguggagcccggugacaaaaucacauucgaagccacuggcaaccuggucguuccuagguacgcuuuugccauggagcggaacgcagggagcggaauaauuaucucggauaccccagugcaugacugcaauacaaccugucaaacgccgaagggcgcuauuaacacuucucuacccuuccagaauauccacccuacaaccaucgguaagugcccaaaauauguaaaguccacuaaacuccgccuggccacagggcuuagaaacgugcccucaauucagaguaggggacuguuuggcgcgauagccggcuucaucgaagggggauggaccgguauggucgacggcugguacggguaucaucaccagaaugagcaaggaagcggcuacgcagcugauuugaaguccacgcagaacgccauugacgaaaucaccaauaaagugaacucuguuauagagaagaugaauacacaguuuacugcuguggguaaggaguucaaccaccucgaaaaacggauugagaaucugaacaagaaagucgaugacggguucuuagauaucuggaccuacaaugccgaacugcucgugcuucuggagaacgaacgcacauuggacuaucaugauagcaauguaaagaaccuauacgagaaaguucgaucacagcugaagaacaaugcaaaggagaucggcaacggauguuuugaguucuaucacaaaugcgacaauacuuguauggaaagugugaagaacggcaccuacgauuauccuaaauacuccgaagaggccaagcucaauagagaagagauugacggggucaaacuggagagcacaaggaucuaucaaauucuugcuauauacucuaccguggcgucaagucuggucuuggugguuagccucggagcaaucuccuuuuggaugugcucuaacgguucgcugcagugccggauuuguaucuga

SEQ ID NO: 135108 - RNA, 1701 nt, Artificial Sequence
  derived and/or modified CDS sequence (opt3) from hemagglutinin__InfluenzaA__AEL99664
augaaggccauccuggugguccuccuuuacaccuucgcuacagcaaacgccgacacucugugcauuggcuaucacgcgaauaacagcacggauaccguugacacaauauuggagaaaaaugugacuguaacccauuccgugaacuuacuggaagauaagcacaaugggaaacuauguaagcucagaggagucgcuccccugcaucuugguaaaugcaacaucgccggcuggauucuggggaauccugagugugaaucuuugucaacagcaaguagcugguccuacaucguggagaccucuucgucagacaacggaacuugcuauccaggcgauuuuauugacuacgaagaacucagggagcagcugagcaguguuuccucuuucaagcgguuugaaaucuucccgaagacaagcuccuggcccaaucacgauucaaacaaaggugugaccgccgcuuguccucaugcaggggccaagaguuuuuauaaaaaucugauauggcucgucaagaaaggaaacagcuacccaaaguuaucuaaguccuauaucaaugacaaaggcaaggaggugcugguacuuuggggcauucaccaccccucaacgagcgcugaucaacagaguuuguaccagaacgccgacgcguacguuuucguggggacuucucgcuauuccaaaaaguuuaaaccugaaaucgcaauucgaccaaagguccgugaucaggagggaagaaugaauuacuauuggacccugguggagcccggugacaaaaucacauucgaagccacuggcaaccuaguggucccuagguacgcuuuugccauggagcggaacgcagggagcggaauaauuaucucggauaccucuguucaugacugcaauacaaccugucaaacgccaaagggcgcuauuaacacuucccucccguuccagaauauccaccccaucacaauugguaagugcccuaaauaugugaagucaaccaaacugcgccuugccacugggcugagaaacguaccaaguauacagagcaggggauuguuuggcgcgaucgccggcuucauugaagggggauggacagguaugguggacggcugguacggguaucaucaccagaaugagcaaggauccggcuacgcagcugaucucaagucuacccagaacgccaucgacgaaauaacgaauaaagucaacagcgugauugagaagaugaauacccaguuuacagcuguugguaaggaguucaaccaccuggaaaaacggaucgagaauuuaaacaagaaaguggaugacggguuccuggauaucuggacuuacaaugccgaacuccuuguccuguuggagaacgaacgcacccuagacuaucaugauucaaaugugaagaaccuguacgagaaaguacgaagucagcucaagaacaaugcaaaggagauuggcaacggauguuuugaguucuaucacaaaugcgacaauacauguauggaguccguuaagaacggcacuuacgauuaucccaaauacagcgaagaggccaagcugaauagagaagagaucgacggggugaaacuugagucuaccaggauuuaucaaauacuggcuaucuacucaacagucgcgaguagcuuggugcucgucgugucccugggagcaauuucuuuuuggaugugcucgaacgguagcuuacagugccggaucuguaucuga

SEQ ID NO: 135109 - RNA, 1701 nt, Artificial Sequence
  derived and/or modified CDS sequence (opt3) from hemagglutinin__InfluenzaA__AEL99674
augaaggccauccuggugguccuccuuuacaccuucgcuacagcaaacgccgacacucugugcauuggcuaucacgcgaauaacagcacggauaccguugacacaguguuggagaaaaauguaacugugacccauuccgucaacuuacuggaagauaagcacaaugggaaacuauguaagcucagaggaguggcuccccugcaucuugguaaaugcaacauagccggcuggauccuggggaauccugagugugaaucuuugucaacagcaaguagcugguccuacauuguugagaccucuucgucagacaacggaacuugcuauccaggcgauuuuaucgacuacgaggagcucagggagcagcugagcaguguguccucuuucgaacgguuugagauuuucccgaagacaagcuccuggcccaaucacgauucaaacaagggugucaccgccgcuuguccucaugcaggggccaaaaguuuuuauaagaaucugaucuggcucgugaaaaagggaaacagcuacccaaaauuaucuaaguccuauauaaaugacaagggcaaagaaguacugguucuuuggggcauccaccaccccucaacgagcgcugaucaacagaguuuguaccagaacgccgacgcguacguguucgucgggacuucucgcuauuccaagaaauuuaagccugagauugcaauccgaccaaaagugcgugaucaggagggaagaaugaauuacuauuggacccugguggaacccggugacaagauuaucuucgaggccacaggcaaccuagucguuccuagguacgcuuuugccauggaacggaacgcagggagcggaauaauuaucucggauacuccagugcaugacugcaauaccacaugucaaaccccgaaaggcgcuauuaacacgucucuccccuuccagaauauccacccuaucacuauugguaagugcccaaaguauguaaaauccacaaagcugcgccuugccaccgggcugagaaacgugcccucaauacagaguaggggauuguuuggcgcgaucgccggcuucauugaagggggauggacugguauggucgacggcugguacggguaucaucaccagaaugaacaaggaagcggcuacgcagcugaucucaaauccacacagaacgccaucgacgagauaaccaauaaggugaacucuguuauugagaaaaugaauacgcaguuuaccgcuguggguaaggaguucaaccaccuggaaaagcggaucgaaaauuuaaacaaaaaggucgaugacggguuccuggauaucuggacauacaaugccgagcuccuugugcuguuggaaaacgagcgcacucuagacuaucaugauagcaauguaaagaaccuguacgagaagguucgaucacagcucaaaaacaaugcaaaggaaauuggcaacggauguuuugaguucuaucacaagugcgacaauaccuguauggaaagugugaaaaacggcacauacgauuauccuaaguacuccgaggaagccaaacugaauagagaggagaucgacggggucaaacuugaaagcacuaggauuuaucaaauacuggcuaucuacucuaccguggcgucaaguuugguccucgugguuagccugggagcaauuuccuuuuggaugugcucuaacgguucguuacagugccggaucuguaucuga

SEQ ID NO: 135110 - RNA, 1689 nt, Artificial Sequence; identical to SEQ ID NO: 134319
  derived and/or modified CDS sequence (opt3) from hemagglutinin__InfluenzaA__AEM53455

SEQ ID NO: 135111 - RNA, 1689 nt, Artificial Sequence; identical to SEQ ID NO: 129668
  derived and/or modified CDS sequence (opt3) from hemagglutinin__InfluenzaA__AEM53468

SEQ ID NO: 135112 - RNA, 1698 nt, Artificial Sequence; identical to SEQ ID NO: 130163
  derived and/or modified CDS sequence (opt3) from hemagglutinin__InfluenzaA__AEM60037

SEQ ID NO: 135113 - RNA, 1698 nt, Artificial Sequence
  derived and/or modified CDS sequence (opt3) from hemagglutinin__InfluenzaA__AEM60058
augaaggugaaacugcucguccuucugugcaccuucacagccacuuacgcugacacgaucuguauuggcuaucacgcaaacaauagcaccgauacaguugacacuguguuggagaagaacguaaccgugacacauuccgucaauuuacuggaagagucucacaacgggaaacuaugccuccugaagggaauagcgccccuucagcuggguaauuguucaguggccggcuggaucuuggggaacccugaaugcgagcuccugauuaguaaagaaagcugguccuacaucguugagaccccaaauccggagaacggaacuuguuaucccggcuacuuugcugauuaugaagaacugagagaacaacucucuucggugagcucauucgagagguuugagauuuucccuaaggaaaguuccuggccaaaucauacagucaccggugugucugccagcugcucccacaacggggagucaaguuuuuaccggaauuuacuguggcuuacgggaaagaacggcuuguaucccaaucugagcaaaucuuacgcaaacaauaaggaaaaagacguucuaguacucuggggcgugcaucacccuccaaacaucggggaucagcgcgcccuguaccacacugagaacgcuuaugucuccguggugucaagccauuacagucgacguuucacccccgaaauagcaaagagaccuaaagucagggaccaggagggacggaucaauuauuacuggacacuucuggagccaggugauacuauuaucuuugaagccaacggcaauuugauugcuccgcgcuucgccuuugcgcucgggagaggauucggcucugguaucauaaccuccaacgcacccauggacaagugugaugccaagugccagacaccucaaggggcuauuaauagcucgcugccauuucagaacguucaccccgugaccaucggagaguguccuaaauauguaaggucuacgaaguuacggauggugacuggccugcgcaauauuccauccauccagucacgaggccucuucggggccaucgcaggauuuauugaagguggcuggacagggauggucgacggaugguacggcuaucaucaccagaacgagcaagguaguggguacgcugccgaucagaaaagcacccagaaugcgauaaacggcaucacuaauaaggugaacuccguuauugagaaaaugaauacacaguucaccgccgugggaaaggaguucaacaaacuugagagaaggauggaaaaucugaacaagaaggucgacgauggcuuuuuggacaucuggacguacaacgcagagcuacuggugcuccuggaaaaugagcggacccuugacuuccacgauucuaacguuaaaaaucuguaugaaaagguaaaaagccaauugaagaacaaugcuaaagagauagggaacggaugcuuugaguucuaccauaaguguaaugacgaaugcauggagucagugaagaacgguacauaugauuaccccaaauauagugaagaguccaagcucaaucgugagaaaauugacggcgucaagcuggaaagcauggggguguaccagaucuuagccaucuauucuacugucgcuucaagucuggugcuacucguuagccugggagccauuuccuuuuggaugugcucuaacggcucgcuucagugucgcaucugcauuuga

SEQ ID NO: 135114 - RNA, 1701 nt, Artificial Sequence
  derived and/or modified CDS sequence (opt3) from hemagglutinin__InfluenzaA__AEM60069
augaagaccaucauugcccugagcuacauauucugccucguguuugcucagaaacuucccggcaacgacaauuccacagcaacucuguguuuggggcaccaugccgucccuaacggaacguuaguuaagaccaucacaaaugaucaaauugaggugacuaacgcgaccgaacugguacagucuucaaguacagguagaaucugcgacagcccacacaggauucuagauggcaaaaauuguacccucaucgacgcucugcuuggggauccgcauugcgacggauuccagaacgagaagugggaucuguuuguggaacgguccaaagccuauucuaauuguuaccccuaugacgucccugauuacgcaucguugcgcucacucguggccagcaguggcacucuggaguucauaaacgaagacuuuaauuggacagguguuacccaguccgggggaucuuaugcuugcaagcgaggcagcgugaaguccuucuuuucacgucugaacuggcuccacgagagugaguacaaauauccagcauuaaaugucacgaugcccaacaauggcaaguucgauaaacuguacaucuggggagugcaucacccuagcacugacagagaacaaaccaaccuuuacguaagggccucugggcggguuacaguguccacuaagcgcucacagcagaccgucauuccaaauaucgguagcagacccugggugaggggcuugaguucucggauuuccaucuauuggacaauagugaaaccuggggauauucugcuaaucaacagcaccggaaaccucauugcuccacgcggcuacuuuaagauccgaacggguaagucgucuaucaugagauccgacgccccgauugggacuuguucaagugagugcauaacacccaauggaagcaucccuaacgacaaaccauuccagaaugucaacaagauuaccuauggcgcgugucccagguacguuaaacaaaauacucugaaacuugcaacaggcaugcggaacgugccugaaaagcagacccgugggaucuuuggagccauagcugguuucauugagaauggcugggaggggaugguagauggaugguauggcuuucgccaccagaacuccgaagguacggggcaggccgcagaccugaagucuacccaagcugccaucgaucagaucaauggcaaauugaacagacucauugagaagacaaaugaaaaguuccaucagaucgagaaagaguucagcgaaguggagggaaggauucaagaccuggaaaaguacgucgaggauacuaaaauagacuuauggucauauaacgcggaacugcucguggcccuugagaaucagcacaccaucgaucugacagacagugaaaugaacaaguuguuugagaaaacucggaagcagcuacgagagaaugcagaagauaugggcaacgggugcuucaagauuuaccauaaaugugacaacgcuugcaucggauccauccgcaaugguaccuacgaucacgacguuuauagagacgaggcccugaacaauagguuucagauuaagggcguggaacucaaaagcggguacaaggauuggauacuguggaucucuuucgcuauuucaugcuuucuucugugugucguguugcucggauucaucaugugggccugccaaaaaggcaacauucgguguaauaucugcauauga

SEQ ID NO: 135115 - RNA, 1701 nt, Artificial Sequence
  derived and/or modified CDS sequence (opt3) from hemagglutinin__InfluenzaA__AEM92308
augaaggccauccuggugguccuccuuuacaccuucgcuacagcaaacgccgacacucugugcauuggcuaucacgcgaauaacagcacggauaccguugacacaguguuggagaaaaauguaacugugacccauuccgucaacuuacuggaagauaagcacaaugggaaacuauguaagcucagaggaguggcuccccugcaucuugguaaaugcaacauagccggcuggauccuggggaauccugagugugaaucuuugucaacagcaaguagcugguccuacauuguugagaccucuucgucagacaacggaacuugcuauccaggcgauuuuaucgacuacgaagaacucagggagcagcugagcaguguguccucuuucgaacgguuugagauuuucccgaagacaagcuccuggcccaaucacgauucaaacaagggugucaccgccgcuuguccucaugcaggggccaaaaguuuuuauaagaaucugaucuggcucgugaaaaagcgcaacagcuacccaaaauuaucuaaguccuauauaaaugacaagggaaaagaaguacugguucuuuggggcauccaccaccccucaacgagcgcugaucaacagaguuuguaccagaacgccgacgcguacguguucgucgggucuucccgauauagcaagaaauuuaagccugagauugcaauccguccaaaagugagagaucaggagggcaggaugaauuacuauuggacucugguggaacccggagacaagauuaccuucgaggccacagaaaaccuagucguuccucgguacgcuuuugccauggagcgcaacgcagguucgggcaucauaauuucugauacuccagugcaugacugcaauaccacaugucaaaccccgaaaggggcuaucaacacgucccuccccuuccagaauauucacccuaucacuaucggaaagugcccaaaguauguaaaaucaacaaagcugagacuugccaccggccugaggaacgugcccaguauucagagccgggguuuguuuggggcgauagccggauucaucgaaggcggcuggacugggauggucgacggaugguacgguuaucaucaccagaaugagcaaggcuccggguacgcagcugaucucaaaucuacacagaacgccauugacgagaucaccaauaaggugaacagcguuauagaaaagaugaauacgcaguuuaccgcugugggaaaggaguucaaccaccuggaaaagcgcauugagaauuuaaacaaaaaggucgaugacggcuuccuggauaucuggacauacaaugccgaacuccuugugcuguuggagaacgagcgaacucuagacuaucaugauucaaauguuaaaaaccuguacgaaaagguaagaagucagcucaaaaacaaugcaaaggagguggguaacggguguuuugaguucuaucacaagugcgacaauaccuguauggaguccgucaaaaacggcacauacgauuauccuaaguacagcgaagaggccaaacugaauagggaggaaaucgacggagugaaacuugagucuacucggauuuaucaaauccuggcuauuuacucaaccgcggcaaguagcuugguccucgugguuucccugggcgccauaucuuuuuggaugugcucgaacgggagcuuacagugccguaucuguauuuga

SEQ ID NO: 135116 - RNA, 1701 nt, Artificial Sequence
  derived and/or modified CDS sequence (opt3) from hemagglutinin__InfluenzaA__AEM92318
augaaggccauccuggugguccuccuuuacaccuucgcuacagcaaacgccgacacucugugcauuggcuaucacgcgaauaacagcacggauaccguugacacaguguuggagaaaaauguaacugugacccauuccgucgauuuacuggaagacaagcacaacgggaaacuauguaagcucagaggaguggcuccccugcaucuugguaaaugcaauauagccggcuggauccuggggaacccugagugugaaucuuugucaacagcaaguagcugguccuacauuguugagaccucuucgucagauaauggaacuugcuauccaggcgacuuuaucgauuacgaagaacucagggagcagcugagcaguguguccucuuucgaacgguuugagauuuucccgaagacaagcuccuggcccaaccacgacucaaauaagggugucaccgccgcuuguccucaugcaggggaaaagaguuuuuauaagaaccugaucuggcucgugaaaaagggaaauagcuacccaaaauuaaacaagucuuauauaaaugauaagggcaaagagguacugguucuuuggggcauccaccaccccuccacgucagccgaccaacagagcuuguaccagaacgcugaugccuacguguucgucgggaccagucgcuauucuaagaaauuuaagccugagauugcgauccgaccaaaagugcgugaccaggaaggaagaaugaauuacuauuggacucugguggagcccggugauaagauuacauucgaagcaacuggcaaccuagucguuccuagguacgccuuugcuauggagcggaacgccggguccggaaucauaauuagcgacaccccaauccaugacugcaauacaaccugucaaacgccgaaaggcgcaauuaacacuucgcuccccuuccagaauauccacccuaucacaauugguaagugcccaaaguaugugaaaucuaccaagcugcgccuugcuacugggcugagaaacguacccuccauacagucaaggggauuguuuggcgccaucgcgggcuucauugaagggggauggacagguaugguggauggcugguacggguaucaucaccagaaugagcaaggaaguggcuacgccgcagaccucaaaagcacccagaacgcuaucgaugagauaacgaauaaggucaacuccgugauugagaaaaugaauacccaguuuacagccguugguaaggaguucaaccaccuggaaaagcggaucgagaauuuaaacaaaaagguggacgauggguuccuggacaucuggacuuacaaugcugaacuccuuguccuguuggagaacgagcgcacccuagauuaucaugacucuaaugugaaaaaccuguacgaaaagguacgaaaccagcucaaaaauaacgccaaggagauuggcaauggauguuuugaguucuaucacaagugcgauaacacauguauggaaagcguuaaaaauggcacuuacgacuauccuaaguacucagaagaggcaaaacugaacagagaggaaaucgauggggugaaacuugagaguaccaggauuuaucaaauacuggccaucuacuccacagucgcuagcucuuuggugcucgucgugucacugggagcgauuaguuuuuggaugugcagcaaugguuccuuacagugccggaucuguaucuga

SEQ ID NO: 135117 - RNA, 1701 nt, Artificial Sequence
  derived and/or modified CDS sequence (opt3) from hemagglutinin__InfluenzaA__AEM92328
augaaggccauccuggugguccuccuuuacaccuucgcuacagcaaacgccgacacucugugcauuggcuaucacgcgaauaacagcacggauaccguugacacaguguuggagaaaaauguaacugugacccauuccgucaacuuacuggaagauaagcacaaugggaaacuauguaagcucagaggaguggcuccccugcaucuugguaaaugcaacauagccggcuggauccuggggaauccugagugugaaucuuugucaacagcaaguagcugguccuacauuguugagaccucuucgucagacaacggaacuugcuauccaggcgauuuuaucgacuacgaggagcucagggagcagcugagcaguguguccucuuucgaacgguuugagauuuucccgaagacaagcuccuggcccaaucacgauucaaacaagggugucaccgccgcuuguccucaugcaggggccaaaaguuuuuauaagaaucugaucuggcucgugaaaaagggaaacagcuacccaaaauuaaauauaucuuauaucaacgacaagggcaaggaaguacugguucuuuggggcauucaccaccccuccacgacugcugaucaacagucauuguaccagaaugccgacgcguacguguucgucgggaccagccgcuauaguaaaaaguuuaaaccugagaucgcaauucgaccaaaggugcgugaucaggagggaagaaugaacuacuauuggacacugguggaacccggugacaaaaucacuuucgaggccaccggcaaccuagucguuccuagguacgcuuuugccauggaacggaaugcagggucuggaauaauuaucuccgauacaccagugcaugacugcaacaccacgugucaaacuccgaagggcgcuauuaauacaagccuccccuuccagaacauccacccuaucaccauugguaaaugcccaaaguauguaaagucgacuaaacugcgccuugccacagggcugagaaaugugcccucuauacaguccaggggauuguuuggcgcgaucgccggcuucauugaagggggauggaccgguauggucgacggcugguacggguaucaucaccagaacgaacaaggaucaggcuacgcagcugaucucaagaguacgcagaaugccaucgacaaaauaaccaacaaggugaauagcguuauugagaaaaugaacacacaguuuacugcuguggguaaggaguucaaucaccuggaaaagcggaucgagaacuuaaauaaaaaggucgaugacggguuccuggauaucuggaccuacaacgccgaacuccuugugcuguuggagaaugaacgcacacuagacuaucaugauuccaacguaaagaaccuguacgagaagguucgaaaucagcucaaaaacaaugcaaaggagauuggcaacggauguuuugaguucuaucacaagugcgacaauacuuguauggaaucugugaaaaacggcaccuacgauuauccuaaguacagcgaagaggccaaacugaauagagaagagaucgacggggucaaacuugagucaacaaggauuuaucaaauacuggcuaucuacaguaccguggcguccagcuugguccucgugguuucucugggagcaauuucauuuuggaugugcaguaacgguagcuuacagugccggaucuguaucuga

SEQ ID NO: 135118 - RNA, 1701 nt, Artificial Sequence
  derived and/or modified CDS sequence (opt3) from hemagglutinin__InfluenzaA__AEM92348
augaaggccauccuggugguccuccuuuacaccuucgcuacagcaaacgccgacacucugugcauuggcuaucacgcgaauaacagcacggauaccguugacacaguguuggagaaaaauguaacugugacccauuccgucgauuuacuggaagacaagcacaacgggaaacuauguaagcucagaggaguggcuccccugcaucuugguaaaugcaauauagccggcuggauccuggggaacccugagugugaaucuuugucaacagcaaguagcugguccuacauuguugagaccucuucgucagauaauggaacuugcuauccaggcgacuuuaucgauuacgaagaacucagggagcagcugagcaguguguccucuuucgaacgguuugagauuuucccgaagacaagcuccuggcccaaccacgacucaaauaagggugucaccgccgcuuguccucaugcaggggaaaagaguuuuuauaagaaccugaucuggcucgugaaaaagggaaauagcuacccaaaauuaaacaagucuuauauaaaugauaagggcaaagagguacugguucuuuggggcauccaccaccccuccacgucagccgaccaacagagcuuguaccagaacgcugaugccuacguguucgucgggaccagucgcuauucuaagaaauuuaagccugagauugcgauccgaccaaaagugcgugaccaggaaggaagaaugaauuacuauuggacucugguggagcccggugauaagauuacauucgaagcaacuggcaaccuagucguuccuagguacgccuuugcuauggagcggaacgccggguccggaaucauaauuagcgacaccccaauccaugacugcaauacaaccugucaaacgccgaaaggcgcaauuaacacuucgcuccccuuccagaauauccacccuaucacaauugguaagugcccaaaguaugugaaaucuaccaagcugcgccuugcuacugggcugagaaacguacccuccauacagucaaggggauuguuuggcgccaucgcgggcuucauugaagggggauggacagguaugguggauggcugguacggguaucaucaccagaaugagcaaggaaguggcuacgccgcagaccucaaaagcacccagaacgcuaucgaugagauaacgaauaaggucaacuccgugauugagaaaaugaauacccaguuuacagccguugguaaggaguucaaccaccuggaaaagcggaucgagaauuuaaacaaaaagguggacgauggguuccuggacaucuggacuuacaaugcugaacuccuuguccuguuggagaacgagcgcacccuagauuaucaugacucuaaugugaaaaaccuguacgaaaagguaaaaagccagcucaagaacaaugccaaggagauuggcaacggauguuuugaguucuaucacaaaugcgauaauacauguauggaaucaguuaagaacggcacuuacgacuauccuaaauacagugaagaggcaaagcugaaucgagagaaaaucgauggggugaaacuugaauccaccagaauuuaucaaauacuggccaucuacagcacagucgcuucuucauuggugcucgucgugagucugggagcgauuagcuuuuggaugugcuccaacgguucuuuacagugcaggaucuguaucuga

SEQ ID NO: 135119 - RNA, 1701 nt, Artificial Sequence
  derived and/or modified CDS sequence (opt3) from hemagglutinin__InfluenzaA__AEM92358
augaaggccauccuggugguccuccuuuacaccuucgcuacagcaaacgccgacacucugugcauuggcuaucacgcgaauaacagcacggauaccguugacacaguguuggagaagaauguaacugugacccauuccgucaacuuacuggaagauaagcacaaugggaaacuauguaagcucagaggaguggcuccccugcaucuugguaaaugcaacauagccggcuggauccuggggaauccugagugugaaucuuugucaacagcaaguagcugguccuacauuguugagaccucuucgucagacaacggaacuugcuauccaggcgauuuuaucaauuacgaagaacucagggagcagcugagcaguguguccucuuucgaacgguuugagauuuucccgaagacaagcuccuggcccaaccacgacucaaauaagggugucaccgccgcuuguccucaugcaggggccaaaaguuuuuauaagaaccugaucuggcucgugaaagaaggaaauagcuacccaaaguuaucuaaauccuauauaaacgauaagggcaaggagguacugguucuuuggggcauccaccaccccucaacgacuaccgaccaacagagcuuguaccagaaugcugaugccuacguguucgucgggacaagucgcuauucuaaaaaguuuaaaccugagauugcgauccgaccaaagaugcgugaccaggaaggaagaaugaacuacuauuggacucugguggagcccggugauaaaauuaccuucgaagcaacaggcaaccuaguggucccuagguacgccuuugcuauggagcggaaugccggguccggaaucauaauuagcgacaccccaguucaugauugcaacacgacuugucaaacaccgaagggcgcaaucaauaccucgcuccccuuccagaacauucacccuaucacuaucgguaaaugcccaaaguaugugaagucuacaaaacugcgccuugcuaccgggcugagaaauguacccuccauucagucaaggggauuguuuggcgccauagcgggcuucaucgaagggggauggacggguaugguggacggcugguacggguaucaucaccagaacgagcaaggaaguggcuacgccgcagaccucaagagcacccagaaugcuauugauaaaaucacaaacaaggucaauuccgugauagagaaaaugaacacucaguuuaccgccguugguaaggaguucaaucaccuggagaagcggauugaaaacuuaaauaaaaagguggacgauggguuccuggacaucuggacauacaacgcugagcuccuuguccuguuggaaaaugagcgcacucuagauuaucaugacucuaacgugaaaaaccuguacgagaagguacgaaaucagcucaaaaacaaugccaaggaaaucggcaacggauguuuugaguucuaucacaagugcgauaauaccuguauggaaagcguuaaaaacggcacauacgacuauccuaaguacucagaggaagcaaaacugaauagagaggagauugauggggugaaacuugaaaguaccaggaucuaucaaauucuggccauauacuccacugucgcuagcucuuuggugcucgucgugucacugggagcgaucaguuuuuggaugugcagcaacgguuccuuacagugccggauuuguaucuga

SEQ ID NO: 135120 - RNA, 1701 nt, Artificial Sequence
  derived and/or modified CDS sequence (opt3) from hemagglutinin__InfluenzaA__AEM92368
augaaggccauccuggugguccuccuuuacaccuucgcuacagcaaacgccgacacucugugcauuggcuaucacgcgaauaacagcacggauaccguugacacaguguuggagaaaaauguaacugugacccauuccgucaacuuacuggaagauaagcacaaugggaaacuauguaagcucagaggaguggcuccccugcaucuugguaaaugcaacauagccggcuggauccuggggaauccugagugugaaucuuugucaacagcaaguagcugguccuacauuguugagaccucuucgucagacaacggaacuugcuauccaggcgauuuuaucgacuacgaggagcucagggagcagcugagcaguguguccucuuucgaacgguuugagauuuucccgaagacaagcuccuggcccaaucacgauucaaacaagggugucaccgccgcuuguccucaugcaggggccaaaaguuuuuauaagaaucugaucuggcucgugaaaaagggaaacagcuacccaaaauuaaauaagucuuauauaaacgacaagggcaaagaaguacugguucuuuggggcauccaccaccccuccacgacugcugaucaacagucauuguaccagaaugccgacgcguacguguucgucgggaccagccgcuauaguaagaaauuuaagccugagauugcaauccgaccaaaagugcgugaucaggagggaagaaugaacuacuauuggacacugguggaacccggugacaagauuacuuucgaggccaccggcaaccuagucguuccuagguacgcuuuugccauggaacggaaugcagggucuggaaucauaauuuccgauacaccagugcaugacugcaacaccacgugucaaacuccgaaaggcgcuaucaauacaagccuccccuuccagaacauucacccuaucaccaucgguaagugcccaaaguauguaaaaucgacuaagcugcgccuugccacagggcugagaaaugugcccucuauucaguccaggggauuguuuggcgcgauagccggcuucaucgaagggggauggaccgguauggucgacggcugguacggguaucaucaccagaacgaacaaggaucaggcuacgcagcugaucucaaaaguacgcagaaugccauugacaagaucaccaacaaagugaauagcguuauagagaagaugaacacacaguuuacugcuguggguaaggaguucaaucaccuggaaaaacggauugagaacuuaaauaagaaagucgaugacggguuccuggauaucuggaccuacaacgccgaacuccuugugcuguuggagaaugaacgcacacuagacuaucaugauuccaacguaaagaaccuguacgagaaaguucgaaaucagcucaagaacaaugcaaaggagaucggcaacggauguuuugaguucuaucacaaaugcgacaauacuuguauggaaucugugaagaacggcaccuacgauuauccuaaauacagcgaagaggccaagcugaauagagaagagauugacggggucaaacuugagucaacaaggaucuaucaaauucuggcuauauacaguaccguggcguccagcuugguccucgugguuucucugggagcaaucucauuuuggaugugcaguaacgguagcuuacagugccggauuuguaucuga

SEQ ID NO: 135121 - RNA, 1701 nt, Artificial Sequence
  derived and/or modified CDS sequence (opt3) from hemagglutinin__InfluenzaA__AEM92378
augaaggccauccuggugguccuccuuuacaccuucgcuacagcaaacgccgacacucugugcauuggcuaucacgcgaauaacagcacggauaccguugacacaguguuggagaaaaauguaacugugacccauuccgucaacuuacuggaagauaagcacaaugggaaacuauguaagcucagaggaguggcuccccugcaucuugguaaaugcaacauagccggcuggauccuggggaauccugagugugaaucuuugucaacagcaaguagcugguccuacauuguugagaccucuucgucagacaacggaacuugcuauccaggcgauuuuaucgacuacgaggagcucagggagcagcugaauagcgugaguuccuucgaacgguuugagauuuucccgaagacaucuagcuggcccaaccacgauuccaauaagggugucaccgccgcuuguccucaugcaggggccaaaucauuuuauaagaaccugaucuggcucgugaaaaagggaaauaguuacccaaaauuaaacaagagcuauauaaaugacaagggcaaagaaguacugguucuuuggggcauccaccaccccucuacgacugcugaucaacaguccuuguaccagaacgccgacgcguacguguucgucgggaccucacgcuauagcaagaaauuuaagccugagauugcaauccgaccaaaagugcgugaucaggagggaagaaugaacuacuauuggacacugguggaacccggugacaagauuacuuucgaggccaccggcaaucuagucguuccuagguacgcuuuugccauggaacggaacgcagggaguggaaucauaauuucugauacaccagugcaugacugcaauaccacgugucaaacuccgaaaggcgcuaucaacacaucccuccccuuccagaauauucacccuaucaccaucgguaagugcccaaaguauguaaaaagcacuaagcugcgccuugccacagggcugagaaacgugcccucgauucagucuaggggauuguuuggcgcgauagccggcuucaucgaagggggauggaccgguauggucgacggcugguacggguaucaucaccagaaugaacaaggauccggcuacgcagcugaucucaaaucaacgcagaacgccauugacaagaucaccaauaaagugaacaguguuauagagaagaugaauacacaguuuacugcuguggguaaggaguucaaccaccuggaaaaacggauugagaauuuaaacaagaaagucgaugacggguuccuggauaucuggaccuacaaugccgaacuccuugugcuguuggagaacgaacgcacacuagacuaucaugauagcaacguaaagaaucuguacgagaaaguucgaaaccagcucaagaauaacgcaaaggagaucggcaauggauguuuugaguucuaucacaaaugcgacaacacuuguauggaauccgugaagaauggcaccuacgauuauccuaaauacucugaagaggccaagcugaacagagaagagauugacggggucaaacuugagagcacaaggaucuaucaaauucuggcuauauacucaaccguggcgaguuccuugguccucgugguuagccugggagcaaucucuuuuuggaugugcucaaaugguaguuuacagugccggauuuguaucuga

SEQ ID NO: 135122 - RNA, 1701 nt, Artificial Sequence
  derived and/or modified CDS sequence (opt3) from hemagglutinin__InfluenzaA__AEM92407
augaaggccauccuggugguccuccuuuacaccuucgcuacagcaaacgccgacacucugugcauuggcuaucacgcgaauaacagcacggauaccguugacacaguguuggagaagaauguaacugugacccauuccgucaacuuacuggaagauaagcacaaugggaaacuauguaagcucagaggaguggcuccccugcaucuugguaaaugcaacauagccggcuggauccuggggaauccugagugugaaucuuugucaacagcaaacaguuggagcuacauuguugagaccuccucuucggacaauggaacuugcuauccaggcgauuuuaucgacuacgaggagcucagggagcagcugucaagcgugaguuccuucgaacgguuugagauuuucccgaagacaaacucuuggcccaaucacgauagcaacaagggugucaccgccgcuuguccucaugcaggggccaaauccuuuuauaagaaucugaucuggcucgugaaaaagggaaacucauacccaaaauuaaguaagagcuauauaaaugacaagggcaaagaaguacugguucuuuggggcauccaccaccccucuacguccacugaucaacagucauuguaccagaacgcugacgccuacguguucgucgggaccagccgcuauaguaagaaauuuaagccugagauugcgauccgaccaaaagugcguaaccaggagggaagaaugaauuacuauuggacacugguggaacccggugauaagauuacuuucgaggcaaccggcaaccuagucguuccuagguacgccuuuacaaucgaacggaaugcugggucuggaauaauuaucuccgacaccccaauucaugauugcaacacgacuugucaaacaccgaaaggcgccaucaauaccagccuccccuuccagaacauccacccuauuacuauagguaagugcccaaaguaugugaaaucgacaaagcugcgccuugcaaccgggcugagaaauguacccucuauccaguccaggggauuguuuggcgcuauugccggcuucaucgaagggggauggacggguaugguggacggcugguacggguaucaucaccagaacgaacaaggaucaggcuacgcggccgaccucaaaaguacccagaaugcaauagaugagauuacaaacaaggucaauagcgugaucgagaaaaugaacacucaguuuaccgcuguugguaaggaguucaaucaccuggaaaagcggaucgaaaacuuaaauaaaaagguggacgauggguuccuggacauuuggacacauaacgccgagcuccuuguccuguuggaaaacgagcgcacucuagauuaccacgacuccaaugugaaaaaccuguaugagaagguacgaucucagcucaaaaauaacgcuaaggaaaucggcaauggauguuuugaguucuaccauaagugcgauaacaccuguauggaaagcguuaaaaauggcacauaugacuacccuaaguauucagaggaagccaaacugaacagagaggagauugauggggugaaacuugaaaguaccaggauauaccaaauccuggcaauuuauuccacugucgccagcucuuuggugcucgucgugucacugggagcuaucaguuuuuggaugugcagcauggguuccuuacagugccggaucuguauuuga

SEQ ID NO: 135123 - RNA, 1701 nt, Artificial Sequence
  derived and/or modified CDS sequence (opt3) from hemagglutinin__InfluenzaA__AEM92417
augaaggccauccuggugguccuccuuuacaccuucgcuacagcaaacgccgacacucugugcauuggcuaucacgcgaauaacagcacggauaccguugacacaguguuggagaaaaauguaacugugacccauuccgucaacauauuagaagauaagcacaaugggaaacuguguaagcuaagaggaguggcuccccuccaucuggguaaaugcaacaucgccggcuggauucuugggaauccugagugugaaucucugucaacagcaaguagcugguccuacaucguugagaccucuucgucagacaacggaacuugcuauccaggcgauuuuauugacuacgaagaguugagggagcagcucagcaguguguccucuuucgaacgguuugagaucuucccgaaggccagcuccuggcccaaucacgauucaaacaagggugucacagcugcauguccucaugccggggcuaaaaguuuuuauaagaaucugauauggcuggugaaaaaggaaaacagcuacccaaaacucucuaaguccuauaucaaugacaagggaaaagagguauuaguucuguggggcauucaccaccccucaaccagcgccgaucaacagagucuuuaccagaacgcggacgcauacguguucgucgggucuucccgcuauagcaagaaauuuaagccugagaucgccauucgaccaaaagugcgugaucaggaaggcagaaugaauuacuauuggacguugguggagcccggagacaagaucacuuucgaagcuaccgguaaccuggucguuccuagguacgccuuugcaauggagcggaacgcuggcucggggauaauuaucucugauacaccagugcaugacugcaauacuaccugucaaacaccgaaaggagccauuaacaccucccuacccuuccagaauauccacccuaucacgauuggcaagugcccaaaguauguaaaaucaacuaagcuccgccuggcgacaggucuuagaaacgugcccaguauacagagcagggggcuguuuggagccaucgcaggcuucauugaaggcggguggaccggaauggucgacgguugguacggcuaucaucaccagaaugagcaaggguccggauacgcugccgauuugaaaucuacucagaacgcuaucgacgagauaacaaauaaggugaacagcguuauugaaaagaugaauacccaguuuacggccgugggcaaagaguucaaccaccucgaaaagcggaucgagaaucugaacaaaaaggucgaugacgguuucuuagauaucuggaccuacaaugcagaacugcucgugcuucuggagaacgagcgcacauuggacuaucaugauucaaauguuaaaaaccuauacgaaaagguacgaagucagcugaaaaacaaugccaaggagauugggaacggcuguuuugaguucuaucacaagugcgacaauacuuguauggaauccgugaaaaacggaaccuacgauuauccuaaguacagcgaagaggcuaaacucaauagagaggaaaucgacggcgucaagcuggagucuacaaggauuuaucaaauacuugcgaucuacucaacuguggcaaguagccuggucuuggugguuucccucggggccauuucuuuuuggaugugcucgaacggaagccugcagugccggaucuguaucuga

SEQ ID NO: 135124 - RNA, 1701 nt, Artificial Sequence
  derived and/or modified CDS sequence (opt3) from hemagglutinin__InfluenzaA__AEM92428
augaaggccauccuggugguccuccuuuacaccuucgcuacagcaaacgccgacacucugugcauuggcuaucacgcgaauaacagcacggauaccguugacacaguguuggagaaaaauguaacugugacccauuccgucaacuuacuggaagauaagcacaaugggaaacuauguaagcucagaggaguggcuccccugcaucuugguaaaugcaacauagccggcuggauccuggggaauccugagugugaaucuuugucaacagcaaguagcugguccuacauuguugagaccucuucgucagacaacggaacuugcuauccaggcgauuuuaucgacuacgaggagcucagggagcagcugagcaguguguccucuuucgaacgguuugagauuuucccgaagacaagcuccuggcccaaucacgauucaaacaagggugucaccgccgcuuguccucaugcaggggccaaaaguuuuuauaagaaucugaucuggcucgugaaaaagggaaacagcuacccaaaauuaucuaaguccuauauaaaugacaagggcaaagaaguacugguucuuuggggcauccaccaccccucaacgagcgcugaucaacagaguuuguaccagaacgccgacgcguacguguucgucgggacuucucgcuauuccaagaaauuuaagccugagauugcaauccgaccaaaagugcgugaucaggagggaagaaugaauuacuauuggacccugguggaacccggugacaagauuacauucgaggccacuggcaaccuagucguuccuagguacgcuuuugccauggaacggaacgcagggagcggaaucauaauuucggauaccccagugcaugacugcaauacaaccugucaaacgccgaaaggcgcuaucaacacuucucuccccuuccagaauauucacccuaucacaaucgguaagugcccaaaguauguaaaauccaccaagcugcgccuugccacugggcugagaaacgugcccucaauucagaguaggggauuguuuggcgcgauagccggcuucaucgaagggggauggacagguauggucgacggcugguacggguaucaucaccagaaugaacaaggaagcggcuacgcagcugaucucaaauccacccagaacgccauugacgagaucacgaauaaggugaacucuguuauagagaaaaugaauacccaguuuacagcuguggguaaggaguucaaccaccuggaaaagcggauugaaaauuuaaacaaaaaggucgaugacggguuccuggauaucuggacuuacaaugccgagcuccuugugcuguuggaaaacgagcgcacccuagacuaucaugauagcaauguaaagaaccuguacgagaagguucgaucacagcucaaaaacaaugcaaaggaaaucggcaacggauguuuugaguucuaucacaagugcgacaauauguguauggaaagugugaaaaacggcacauacgauuauccuaaguacuccgaggaagccaaacugaauagagaggagauugacggggucaaacuugaaagcacuaggaucuaucaaauucuggcuauauacucuaccguggcgucaaguuugguccucgugguuagccugggagcaaucuccuuuuggaugugcucuaacgguucguuacagugccggauuuguaucuga

SEQ ID NO: 135125 - RNA, 1701 nt, Artificial Sequence
  derived and/or modified CDS sequence (opt3) from hemagglutinin__InfluenzaA__AEM92438
augaaggccauccuggugguccuccuuuacaccuucgcuacagcaaacgccgacacucugugcauuggcuaucacgcgaauaacagcacggauaccguugacacaguguuggagaaaaauguaacugugacccauuccgucaacuuacuggaagauaagcacaaugggaaacuauguaagcucagaggaguggcuccccugcaucuugguaaaugcaacauagccggcuggauccuggggaauccugagugugaaucuuugucaacagcaaguagcugguccuacauuguugagaccucuucgucagacaacggaacuugcuauccaggcgauuuuaucgacuacgaagaacucagggagcagcugagcaguguguccucuuucgaacgguuugagauuuucccgaagacaagcuccuggcccaaucacgauucaaacaagggugucaccgccgcuuguccucaugcaggggccaaaggauuuuauaagaaucugaucuggcucgugaaaaagggcaacaguuacccaaaauuaagcaagucuuauauaaaugacaagggcaaagaaguacugguucuuugggggauccaccaccccuccacgacugcugaucaacagucauuguaccagaacgccgacaccuacguguucgucggaacaagccgcuauaguaagaaauuuaagccugagauugcgauccgaccaaaagugcgugaucaggaggguagaaugaauuacuauuggacucugguggaacccggcgacaagauuaccuucgaggcaacagggaaccuagucguuccuagguacgccuuugcuauggaacggaacgccggaucuggcaucauaauuuccgauaccccagugcaugacugcaauacgacuugucaaacaccgaaaggugcaaucaacaccagccuccccuuccagaauauucacccuaucacuaucgggaagugcccaaaguauguaaaaucgacaaagcugcgccuugcuaccggacugagaaacgugcccucuauucaguccaggggcuuguuuggcgccauagcgggguucaucgagggagguuggacgggcauggucgacgggugguacggauaucaucaccagaaugaacaaggcucagguuacgccgcagaucucaaaaguacccagaacgcuauugacaagaucacaaauaaagugaacagcguuauagagaagaugaauacucaguuuaccgccguggggaaggaguucaaccaccuggaaaaacggauugagaauuuaaacaagaaagucgaugacggcuuccuggauaucuggacauacaaugcugaacuccuugugcuguuggagaacgaacgcacucuagacuaucaugauuccaauguaaagaaccuguacgagaaaauccgaaaccagcucaagaauaacgccaaggagauuggaaauggcuguuuugaguucuaucacaaaugcgacaacaccuguauggagucuguuaagaaugggacauacgauuauccuaaauacagcgaagaggcaaagcugaacagagaagagaucgacggagugaaacuugagucaaccaggauuuaucaaauacuggccaucuacaguacugucgcuuccagcuuggugcucgucgugucucugggugcgauuucauuuuggaugugcaguaauggcagcuuacagugccggaucuguaucuga

SEQ ID NO: 135126 - RNA, 1701 nt, Artificial Sequence; identical to SEQ ID NO: 134857
  derived and/or modified CDS sequence (opt3) from hemagglutinin__InfluenzaA__AEM92448

SEQ ID NO: 135127 - RNA, 1701 nt, Artificial Sequence; identical to SEQ ID NO: 134857
  derived and/or modified CDS sequence (opt3) from hemagglutinin__InfluenzaA__AEM92458

SEQ ID NO: 135128 - RNA, 1701 nt, Artificial Sequence
  derived and/or modified CDS sequence (opt3) from hemagglutinin__InfluenzaA__AEM92468
augaaggccauccuggugguccuccuuuacaccuucgcuacagcaaacgccgacacucugugcauuggcuaucacgcgaauaacagcacggauaccguugacacaguguuggagaaaaauguaacugugacccauuccgucaacuuacuggaagauaagcacaaugggaaacuauguaagcucagaggaguggcuccccugcaucuugguaaaugcaacauagccggcuggauccuggggaauccugagugugaaucuuugucaacagcaaguagcugguccuacauuguugagaccucuucgucagacaacggaacuugcuauccaggcgauuuuaucaauuacgaagaacucagggagcagcugagcaguguguccucuuucgaacgguuugagauuuucccgaagacaagcuccuggcccaaccacgacucaaauaagggugucaccgccgcuuguccucaugcaggggccaaaaguuuuuauaagaaccugaucuggcucgugaaaaagggaaauagcuacccaaaauuaucuaaguccuauauaaacgauaagggcaaagaaguacugguucuuuggggcauccaccaccccucaacgagcgcugaccaacagaguuuguaccagaaugccgaugcguacguguucgucgggacuucuaaguauuccaaagaguuuaagccugagauugcagugcgcccaaaagugcgagaccaggaaggacguaugaacuacuauuggacccuggucgagcccggugauaagaucacauucgaagccacuggcaaccuacucguuccuagauacgcuuuugccauggagaggaaugcagggagcggaauuaucauaucggacaccccagugcaugauugcaacacaauuugucaaaccccgaaaggcgcuaucaauacgucucugcccuuccagaacauucacccuaucacuaucgguaagugcccaaaguauguaaaauccacaaaacuucggcuggccaccggguugcgcaaugugcccucaauucagaguagaggacucuuuggcgcgauagccggcuucaucgaagggggauggacugguauggucgacggcugguacggguaucaucaccagaacgagcaaggaagcggcuacgcagcugaccugaaguccacacagaaugccauugauaagaucaccaacaaaguuaauucugugauagagaagaugaacacgcaguuuaccgcuguggguaaggaguucaaucacuuagagaaaaggauugaaaaccugaauaagaaagucgacgauggguuccucgacaucuggacauacaacgccgagcuucugguguugcuagaaaaugagcggacucuggauuaucaugacagcaacguaaagaaccucuacgagaaaguucgcucacagcugaagaauaacgcaaaggaaaucggcaauggauguuuugaguucuaucacaaaugcgauaacaccuguauggaaagugugaagaauggcacauacgacuauccuaaauacuccgaggaagccaaacuuaaccgagaggagauugauggggucaagcuggaaagcacuagaaucuaucaaauuuuggcuauauacucuaccguggcgucaagucucguccuggugguuagcuuaggagcaaucuccuuuuggaugugcucuaaugguucgcugcagugcaggauuuguaucuga

SEQ ID NO: 135129 - RNA, 1701 nt, Artificial Sequence
  derived and/or modified CDS sequence (opt3) from hemagglutinin__InfluenzaA__AEM92478
augaaggccauccuggugguccuccuuuacaccuucgcuacagcaaacgccgacacucugugcauuggcuaucacgcgaauaacagcacggauaccguugacacaguguuggagaaaaauguaacugugacccauuccgucaacuuacuggaagauaagcacaaugggaaacuauguaagcucagaggaguggcuccccugcaucuugguaaaugcaacauagccggcuggauccuggggaauccugagugugaaucuuugucaacagcaaguagcugguccuacauuguugagaccucuucgucagacaacggaacuugcuauccaggcgauuuuaucaauuacgaggagcucagggagcagcugagcaguguguccucuuucgaacgguuugagauuuucccgaagacaagcuccuggcccaaccacgacucaaauaagggugucaccgccgcuuguccucaugcaggggccaaaaguuuuuauaagaaccugaucuggcucgugaaaaagggaaauagcuacccaaaauuaucuaaguccuauauaaacgauaagggcaaagaaguacugguucuuuggggcauccaccaccccucaacgagcgcugaccaacagaguuuguaccagaaugccgaugcguacguguucgucgggacuucuaaguauuccaaaaaguuuaaaccugagauugcagugcgcccaaaggugcgagaccaggagggacguaugaacuacuauuggacccuggucgaacccggugauaaaaucacauucgaggccacuggcaaccuacucguuccuagauacgcuuuugccauggaaaggaaugcagggagcggaauuaucauaucggacaccccagugcaugauugcaacacaauuugucaaaccccgaagggcgcuaucaauacgucucugcccuuccagaacauucacccuaucacuaucgguaagugcccaaaauauguaaaguccacaaaacuucggcuggccaccggguugcgcaaugugcccucaauucagaguagaggacucuuuggcgcgauagccggcuucaucgaagggggauggacugguauggucgacggcugguacggguaucaucaccagaacgaacaaggaagcggcuacgcagcugaccugaaguccacacagaaugccauugauaaaaucaccaacaagguaaauucuguuauagagaagaugaacacgcaguuuaccgcuguggguaaagaguucaaucacuuagaaaagaggauugagaaccugaauaaaaaggucgacgauggguuccucgacaucuggacauacaacgccgaacuucugguguugcuagagaaugaacggacucuggauuaucaugacagcaacgugaaaaaccucuacgagaagguucgcucacagcugaagaauaacgcaaaagagaucggcaauggauguuuugaguucuaucacaagugcgauaacaccuguauggaaagugugaaaaauggcacauacgacuauccuaaguacuccgaagaggccaaacuuaaccgagaagagauugauggggucaagcuggagagcacuagaaucuaucaaauuuuggcuauauacucuaccguggcgucaagucucguccuggugguuagcuuaggagcaaucuccuuuuggaugugcucuaaugguucgcugcagugcaggauuuguaucuga

SEQ ID NO: 135130 - RNA, 1701 nt, Artificial Sequence
  derived and/or modified CDS sequence (opt3) from hemagglutinin__InfluenzaA__AEM92498
augaaggccauccuggugguccuccuuuacaccuucgcuacagcaaacgccgacacucugugcauuggcuaucacgcgaauaacagcacggauaccguugacacaguguuggagaaaaauguaacugugacccauuccgucaacuuacuggaagauaagcacaaugggaaacuauguaagcucagaggaguggcuccccugcaucuugguaaaugcaacauagccggcuggauccuggggaauccugagugugaaucuuugucaacagcaaacaguuggagcuacauuguugagaccuccucuucggacaauggaacuugcuauccaggcgauuuuaucgacuacgaggagcucagggagcagcugucaagcgugaguuccuucgaacgguuugagauuuucccgaagacaaacucuuggcccaaucacgauagcaacaagggugucaccgccgcuuguccucaugcaggggccaaauccuuuuauaagaaucugaucuggcucgugaaaaagggaaacucauacccaaaauuaaguaagagcuauauaaaugacaagggcaaagaaguacugguucuuuggggcauccaccaccccucuacguccgcugaucaacagucauuguaccagaacgccgacgcguacguguucgucgggacuagccgcuauaguaagaaauuuaagccugagauugcaauccgaccaaaagugcgugaucaggagggaagaaugaacuacuauuggacccugguggaacccggugacaagauuacauucgaggccacuggcaaucuagucguuccuagguacgcuuuugccauggaacggaacgcagggucuggaaucauaauuuccgauaccccagcucaugacugcaauacaaccugucaaacgccgaaaggcgccaucaacacuagccuccccuuccagaauauucacccuaucacaaucgguaagugcccaaaguaugugaaaucgaccaagcugcgccuugcgacugggcugagaaacguacccucuauucaguccaggggauuguuuggcgccauagcaggcuucaucgaagggggauggacagguaugguggacggcugguacggguaucaucaccagaaugaacaaggaucaggcuacgcugccgaucucaaaaguacccagaacgcuauugacaagaucacgaauaaagucaacagcgugauagagaagaugaauacccaguuuacagccguugguaaggaguucaaccaccuggaaaaacggauugagaauuuaaacaagaaaguggaugacggguuccuggauaucuggacuuacaaugcagaacuccuuguccuguuggagaacgaacgcacccuagacuaucaugauuccaacgugaagaaucuguacgagaaaguacgaucucagcucaagaacaaugccaaggagaucggcaacggauguuuugaguucuaucacaaaugcgacaauacauguauggaaagcguuaagaacggcacuuacgauuauccuaaauacucagaagaggcuaagcugaauagagaagagauugacggggugaaacuugagaguaccaggaucuaucaaauucuggcgauauacuccacagucgcaagcucuuuggugcucgucgugucacugggagccaucaguuuuuggaugugcagcaacgguuccuuacagugccggauuuguaucuga

SEQ ID NO: 135131 - RNA, 1701 nt, Artificial Sequence
  derived and/or modified CDS sequence (opt3) from hemagglutinin__InfluenzaA__AEM92518
augaaggccauccuggugguccuccuuuacaccuucgcuacagcaaacgccgacacucugugcauuggcuaucacgcgaauaacagcacggauaccguugacacaguguuggagaaaaauguaacugugacccauuccgucaacuuacuggaagauaagcacaaugggaaacuauguaagcucagaggaguggcuccccugcaucuugguaaaugcaacauagccggcuggauccuggggaauccugagugugaaucuuugucaacagcaaguagcugguccuacauuguugagaccucuucgucagacaacggaacuugcuauccaggcgauuuuaucgacuacgaagaacucagggagcagcugagcaguguguccucuuucgaacgguuugagauuuucccgaagacaagcuccuggcccaaucacgauucaaacaagggugucaccacggccuguccucaugcuggggcaaaaaguuuuuauaagaaucugaucuggcucgugaaaaagggaaacagcuacccaaaauuaucuaaguccuauauaaaugacaagcgcaaagaaguacugguucuuuggggcauccaccaucccccuacuucagccgaucaacagagcuuguaccagaacgcugacgccuacguguucgucggcaccagucgauauucuaagaaauuuaagccagagauugcgauccgucccaaagugagagaucaggaggggaggaugaauuacuauuggacacugguggaaccuggagacaagauuacuuucgaggcaaccgguaaccuagucguuccacgguacgccuuugcuauggaacgcaacgccggcuccgggaucauaauuagcgauacaccggugcacgacugcaaugcaaccugucaaacgcccaaaggagcuaucaacacuucgcucccuuuccagaauauucacccaaucacaaucggcaagugccccaaguauguaaaaucuaccaagcugagacuugccacuggucugaggaacgugccuuccauucagucacggggguuguuuggagcgauagccggcuucaucgagggcggguggacaggaauggucgacgguugguacggcuaucaucaccagaaugaacaagggaguggauacgcagcugaucucaaaagcacccagaacgccauugacgagaucacgaauaaggugaacuccguuauagagaaaaugaauacccaguuuacagcugugggcaaggaguucaaccaccuggagaagcgcauugaaaauuuaaacaaaaaggucgaugacgguuuccuggauaucuggacuuacaaugccgagcuccuugugcuguuggaaaacgagcgaacccuagacuaucaugauucuaaaguaaagaaucuguacgagaaaguuagaagccagcucaagaacaacgcaaaggaaaucgggaauggcuguuuugaguucuaucacaaaugcgacaacacauguauggaaucagugaagaauggaacuuacgauuauccaaaauacagugaggaagccaagcugaacagggaggagauugacggcgucaaacuugaauccacccggaucuaucaaauucuggcuauauacagcacaguggcgucuucauugguccucgugguuagucugggggcaaucagcuuuuggaugugcuccaauggaucuuuacagugccguauuuguaucuga

SEQ ID NO: 135132 - RNA, 1701 nt, Artificial Sequence
  derived and/or modified CDS sequence (opt3) from hemagglutinin__InfluenzaA__AEM92528
augaaggccauccuggugguccuccuuuacaccuucgcuacagcaaacgccgacacucugugcauuggcuaucacgcgaauaacagcacggauaccguugacacaguguuggagaaaaauguaacugugacccauuccgucaacuuacuggaagauaagcacaaugggaaacuauguaagcucagaggaguggcuccccugcaucuugguaaaugcaacauagccggcuggauccuggggaauccugagugugaaucuuugucaacagcaaguagcugguccuacauuguugagaccucuucgucagacaacggaacuugcuauccaggcgauuuuaucgacuacgaggagcucagggagcagcugagcaguguguccucuuucgaacgguuugagauuuucccgaagacaagcuccuggcccaaucacgauucaaacaagggugucaccgccgcuuguccucaugcaggggccaaaaguuuuuauaagaaucugaucuggcucgugaaaaagggaaacagcuacccaaaauuaaauaagucuuauauaaacgacaagggcaaagaaguacugguucuuuggggcauccaccaccccuccacgucagcugaucaacagagcuuguaccagaaugccgacgcguacguguucgucgggacuucccgcuauucuaagaaauuuaagccugagauugcaauccgaccaaaagugcgugaucaggagggaagaaugaacuacuauuggacccugguggaacccggugacaagauuacauucgaggccacuggcaaccuagucguuccuagguacgcuuuugccauggaacggaaugcaggguccggaaucauaauuagcgauaccccagugcaugacugcaacacaaccugucaaacgccgaaaggcgcuaucaauacuucgcuccccuuccagaacauucacccuaucacaaucgguaagugcccaaaguauguaaaaucuaccaagcugcgccuugccacugggcugagaaaugugcccuccauucagucaaggggauuguuuggcgcgauagccggcuucaucgaagggggauggacagguauggucgacggcugguacggguaucaucaccagaacgaacaaggaaguggcuacgcagcugaucucaaaagcacccagaaugccauugacaagaucacgaacaaagugaauaguguuauagagaagaugaacacccaguuuacagcuguggguaaggccuucaaucaccuggagaaacggauugaaaacuuaaauaagaaagucgaugacggguuccuggauaucuggacuuacaacgcagagcuccuugugcuguuggaaaaugagcgcacccuagacuaucaugauucuaacguaaagaaccuguacgaaaaaguucgaaaucagcucaagaacaaugccaaggagaucggcaacggauguuuugaguucuaucacaaaugcgacaauacauguauggaaagcgugaagaacggcacuuacgauuauccuaaauacucagaggaagcuaagcugaauagagaggaaauugacggggucaaacuugagaguaccaggaucuaucaaauucuggcgauauacuccacaguggcaagcucuuugguccucgugguuucacugggagccaucaguuuuuggaugugcagcaacgguuccuuacagugccggauuuguaucuga

SEQ ID NO: 135133 - RNA, 1701 nt, Artificial Sequence
  derived and/or modified CDS sequence (opt3) from hemagglutinin__InfluenzaA__AEM92548
augaaggccauccuggugguccuccuuuacaccuucgcuacagcaacugccgacacgcugugcauuggcuaucacgcgaacaauagcaccgauacaguugacacuguguuggagaaaaacguaaccgugacacauuccgucaauuuacuggaagauaagcacaacgggaaacuauguaagcucagaggaguggcuccccugcaucuugguaaaugcaauauagccggcuggauccuggggaacccugagugugaaucuuugucaaccgcaaguagcugguccuacauuguugagacuucuucgucagacaauggaacaugcuauccaggcgauuuuaucaacuacgaggagcucagggagcagcugagcaguguguccucuuucgaacgguuugagauuuucccgaagaccagcuccuggcccaaucacgacucaaacaagggugucacggccgcuuguccucaugcaggggccaaaaguuuuuauaagaaucugaucuggcucgugaaaaagggaaacagcuacccaaaauuaucuaaguccuauauaaaugauaagggcaaagaaguacugguucuuuggggcauccaccaccccucaacuagcgcugaccaacagaguuuguaccagaacgccgaugcguacguguucgucgggaccucucgcuauuccaagaaauuuaagccugagauugcaauccgaccaaaagugcgugaccaggagggaagaaugaauuacuauuggacacugguggaacccggugauaagauuacuuucgaggccaccggcaaccuagucguuccuagguacgcuuuugccauggaacggaacgcagggagcggaaucauaauuucggacacaccagugcaugauugcaauaccacgugucaaacuccgaaaggcgcuaucaacacaucucuccccuuccagaauauucacccuaucaccaucgguaagugcccaaaguauguaaaauccacuaagcugcgccuugccacagggcugagaaacgugcccucaauucagaguaggggauuguuuggcgcgauagccggcuucaucgaagggggauggaccgguauggucgacggcugguacggguaucaucaccagaaugaacaaggaagcggcuacgcagcugaccucaaauccacgcagaacgccauugauaagaucaccaauaaagugaacucuguuauagagaagaugaauacacaguuuacugcuguggguaaggaguucaaccaccuggaaaaacggauugagaauuuaaacaagaaagucgacgauggguuccuggacaucuggaccuacaaugccgaacuccuugugcuguuggagaacgaacgcacacuagauuaucaugacagcaauguaaagaaccuguacgagaaaguucgaaaccagcucaagaauaacgcaaaggagaucggcaauggauguuuugaguucuaucacaaaugcgauaacacuuguauggaaucagugaagaauggcaccuacgacuauccuaaauacagugaagaggccaagcugaacagagaagagauugauggggucaaacuugaguccacaaggaucuaucaaauucuggcuauauacagcaccguggcgucuucauugguccucgugguuagucugggagcaaucagcuuuuggaugugcuccaaugguucuuuacagugccggauuuguaucuga

SEQ ID NO: 135134 - RNA, 1701 nt, Artificial Sequence
  derived and/or modified CDS sequence (opt3) from hemagglutinin__InfluenzaA__AEM92558
augaaggccauccuggugguccuccuuuacaccuucgcuacagcaaacgccgacacucugugcauuggcuaucacgcgaauaacagcacggauaccguugacacaguguuggagaaaaauguaacugugacccauuccgucaacuuacuggaagauaagcacaaugggaaacuauguaagcucagaggaguggcuccccugcaucuugguaaaugcucuauagccggcuggauccuggggaacccugagugugaaucauugaguacagcaagcuccuggucuuacauuguugagaccucgucaagcgacaauggaacuugcuauccaggcgauuuuaucaacuacgaggagcucagggagcagcugaguuccgugucuagcuucgaacgguuugagauuuucccgaagacauccucauggcccaaucacgacaguaacaagggugucaccgccgcuuguccucaugcaggggccaagagcuuuuauaaaaaucugaucuggcucgugaaaaagggaaacucuuacccaaaauuauccaagucauauauaaaugauaagggcaaagaaguacugguucuuuggggcauccaccaccccagcacgacugcugaccaacagaguuuguaccagaacgccgaugcguacguguucgucgggaccucucgcuauuccaagaaauuuaagccugagauugcaauccgaccaaaagugcgugaccaggagggaagaaugaauuacuauuggacacugguggaacccggugauaagauuacuuucgaggccaccggcaaccuagucguuccuagguacgcuuuugccauggaacggaacgcagggagcggaaucauaauuucggacacaccagugcaugauugcaauaccacgugucaaacuccgaaaggcgcuaucaacacaucucuccccuuccagaauauucacccuaucaccaucgguaagugcccaaaguauguaaaauccacuaagcugcgccuugccacagggcugagaaacgugcccucaauucagaguaggggauuguuuggcgcgauagccggcuucaucgaagggggauggaccgguauggucgacggcugguacggguaucaucaccagaaugaacaaggaagcggcuacgcagcugaccucaaauccacgcagaacgccauugauaagaucaccaauaaagugaacucuguuauagagaagaugaauacacaguuuacugcuguggguaaggaguucaaccaccuggaaaaacggauugagaauuuaaacaagaaagucgacgauggguuccuggacaucuggaccuacaaugccgaacuccuugugcuguuggagaacgaacgcacacuagauuaucaugacagcaauguaaagaaccuguacgagaaaguucgaaaccagcucaagaauaacgcaaaggagaucggcaauggauguuuugaguucuaucacaaaugcgauaacacuuguauggaaucagugaagaauggcaccuacgacuauccuaaauacagugaagaggccaagcugaacagagaagagauugauggggucaaacuugaguccacaaggaucuaucaaauucuggcuauauacagcaccguggcgucuucauugguccucgugguuagucugggagcaaucagcuuuuggaugugcuccaaugguucuuuacagugccggauuuguaucuga

SEQ ID NO: 135135 - RNA, 1701 nt, Artificial Sequence; identical to SEQ ID NO: 135134
  derived and/or modified CDS sequence (opt3) from hemagglutinin__InfluenzaA__AEM92568

SEQ ID NO: 135136 - RNA, 1701 nt, Artificial Sequence
  derived and/or modified CDS sequence (opt3) from hemagglutinin__InfluenzaA__AEM92578
augaaggccauccuggugguccuccuuuacaccuucgcuacagcaaacgccgacacucugugcauuggcuaucacgcgaauaacagcacggauaccguugacacaguguuggagaaaaauguaacugugacccauuccgucaacuuacuggaagauaagcacaaugggaaacuauguaagcucagaggaguggcuccccugcaucuugguaaaugcaacauagccggcuggauccuggggaauccugagugugaaucuuugucaacagcaaguagcugguccuacauuguugagaccucuaucucggacaacggaacuugcuauccaggcgauuuuauuaauuacgaggagcucagggagcagcugucaagcgugaguuccuucgaacgguuugagaucuucccgaagacaucuagcuggcccaaccacgacuccaauaagggugucaccgccgcuuguccucaugcaggggccaaaucauuuuauaagaaccugauauggcucgugaaaaagggaaauaguuacccaaaauuaagcaagucuuauaucaacgauaagggcaaagaaguacugguucuuuggggcauucaccaccccuccacgucagcugaccaacagagcuuguaccagaaugccgaugcguacguguucgucgggacuucccgcuauucuaagaaauuuaagccugagaucgcaauucgaccaaaagugcgugaccaggagggaagaaugaacuacuauuggacccugguggaacccggugauaagaucacauucgaggccacuggcaaccuagucguuccuagguacgcuuuugccauggaacggaaugcaggguccggaauaauuaucagcgacaccccagugcaugauugcaacacaaccugucaaacgccgaaaggcgcuauuaauacuucgcuccccuuccagaacauccacccuaucacaauugguaagugcccaaaguauguaaaaucuaccaagcugcgccuugccacugggcugagaaaugugcccuccauacagucaaggggauuguuuggcgcgaucgccggcuucauugaagggggauggacagguauggucgacggcugguacggguaucaucaccagaacgaacaaggaaguggcuacgcagcugaccucaaaagcacccagaaugccaucgauaagauaacgaacaaagugaauaguguuauugagaagaugaacacccaguuuacagcuguggguaaggaguucaaucaccuggaaaaacggaucgagaacuuaaauaagaaagucgacgauggguuccuggacaucuggacuuacaacgccgaacuccuugugcuguuggagaaugaacgcacccuagauuaucaugacucuaacguaaagaaccuguacgagaaaguucgaaaucagcucaagaacaaugcaaaggagauuggcaacggauguuuugaguucuaucacaaaugcgauaauacauguauggaaagcgugaagaacggcacuuacgacuauccuaaauacucagaagaggccaagcugaauagagaagagaucgauggggucaaacuugagaguaccaggauuuaucaaauacuggcuaucuacuccacaguggcgagcucuuugguccucgugguuucacugggagcaauuaguuuuuggaugugcagcaacgguuccuuacagugccggaucuguaucuga

SEQ ID NO: 135137 - RNA, 1701 nt, Artificial Sequence
  derived and/or modified CDS sequence (opt3) from hemagglutinin__InfluenzaA__AEM92608
augaaggccauccuggugguccuccuuuacaccuucgcuacagcaaacgccgacacucugugcauuggcuaucacgcgaauaacagcacggauaccguugacacaguguuggagaaaaauguaacugugacccauuccgucaacuuacuggaagauaagcacaaugggaaacuauguaagcucagaggaguggcuccccugcaucuugguaaaugcaacauagccggcuggauccuggggaauccugagugugaaucuuugucaacagcaaguagcugguccuacauuguugagaccucuucgucagacaacggaacuugcuauccaggcgauuuuaucgacuacgaggagcucagggagcagcugagcaguguguccucuuucgaacgguuugagauuuucccgaagacaagcuccuggcccaaucacgauucaaacaagggugucaccgccgcuuguccucaugcaggggccaaaaguuuuuauaagaaucugaucuggcucgugaaaaagggaaacagcuacccaaaauuaucuaaguccuauauaaaugacaagggcaaagaaguacugguucuuuggggcauccaccaccccucaacgacugcugaucaacagagcuuguaccagaacgccgacgcguacguguucgucgggaccagucgcuauucuaagaaauuuaagccugagauugcaauccgaccaaaagugcgugaucaggagggaagaaugaauuacuauuggacacugguggaacccggugacaagauuacuuucgaggccaccggcaaccuagucguuccuagguacgcuuuugccauggaacggaacgcaggguccggaaucauaauuagcgauacaccagugcaugacugcaauaccacgugucaaacuccgaaaggcgcuaucaacacaucgcuccccuuccagaauauucacccuaucaccaucgguaagugcccaaaguauguaaaaucuacuaagcugcgccuugccacagggcugagaaacgugcccuccauucagucaaggggauuguuuggcgcgauagccggcuucaucgaagggggauggaccgguauggucgacggcugguacggguaucaucaccagaaugaacaaggaaguggcuacgcagcugaucucaaaagcacgcagaacgccauugacaagaucaccaauaaagugaacuccguuauagagaagaugaauacacaguuuacugcuguggguaaggaguucaaccaccuggaaaaacggauugagaauuuaaacaagaaagucgaugacggguuccuggauaucuggaccuacaaugccgaacuccuugugcuguuggagaacgaacgcacacuagacuaucaugauucuaauguaaagaaccuguacgagaaaguucgaaaccagcucaagaauaacgcaaaggagaucggcaauggauguuuugaguucuaucacaaaugcgacaacacuuguauggaaagcgugaagaauggcaccuacgauuauccuaaauacucagaagaggccaagcugaacagagaagagauugacggggucaaacuugagaguacaaggaucuaucaaauucuggcuauauacuccaccguggcgagcucuuugguccucgugguuucacugggagcaaucaguuuuuggaugugcagcaaugguuccuuacagugccggauuuguaucuga

SEQ ID NO: 135138 - RNA, 1701 nt, Artificial Sequence
  derived and/or modified CDS sequence (opt3) from hemagglutinin__InfluenzaA__AEM92618
augaaggccauccuggugguccuccuuuacaccuucgcuacagcaaacgccgacacucugugcauuggcuaucacgcgaauaacagcacggauaccguugacacaguguuggagaaaaauguaacugugacccauuccgucaacuuacuggaagauaagcacaaugggaaacuauguaagcucagaggaguggcuccccugcaucuugguaaaugcaacauagccggcuggauccuggggaauccugagugugaaucuuugucaacagcaaacaguuggagcuacauuguugagaccuccucuucggacaauggaacuugcuauccaggcgauuuuaucgacuacgaggagcucagggagcagcugucaagcgugaguuccuucgaacgguuugagauuuucccgaagacaaacucuuggcccaaucacgauagcaacaagggugucaccgccgcuuguccucaugcaggggccaaauccuuuuauaagaaucugaucuggcucgugaaaacgggaaacucauacccaaaguuaaguaaaagcuauauaaaugacaagggcaaggaaguacugguucuuuggggcauccaccaccccucuacuuccgcugaucaacagucauuguaccagaacgccgacgcguacguguucgucgggaccagccgcuauagucgaaaauuuaagccugagauugcaauccguccaaaagugagagaucaggagggaaggaugaacuacuauuggacacugguggaacccggugacaagauuacuuucgaggccaccggcaaucuagucguuccucgguacgcuuuugccauggaacgcaacgcagggucuggaaucauaauuuccgauacaccagcucaugacugcaauaccacgugucaaacuccgaaaggcgccaucaacacaagccuccccuuccagaauauucacccuaucaccaucgguaagugcccaaaauaugugaagucgacuaagcugagacuugcgacagggcugaggaacguacccucuauucagucccggggauuguuuggcgccauagcaggcuucaucgaagggggauggaccgguaugguggacggcugguacggguaucaucaccagaaugaacaaggaucaggcuacgcugccgaucucaaaaguacgcagaacgcuauugacaagaucaccaauaaagucaacagcgugauagagaagaugaauacacaguuuacugccguugguaaagaguucaaccaccuggaaaagcgcauugagaauuuaaacaagaaaguggaugacggguuccuggauaucuggaccuacaaugcagaacuccuuguccuguuggagaacgaacgaacacuagacuaucaugauuccaacgugaagaaucuguacgagaaaguaagaucucagcucaagaacaaugccaaagagaucggcaacggauguuuugaguucuaucacaagugcgacaauacuuguauggaaagcguuaagaacggcaccuacgauuauccuaaauacucagaagaggcuaagcugaauagggaagagauugacggggugaaacuugagaguacacggaucuaucaaauucuggcgauauacuccaccgucgcaagcucuuuggugcucgucgugucacugggagccaucaguuuuuggaugugcagcaacgguuccuuacagugccguauuuguaucuga

SEQ ID NO: 135139 - RNA, 1701 nt, Artificial Sequence
  derived and/or modified CDS sequence (opt3) from hemagglutinin__InfluenzaA__AEM92638
augaaggccauccuggugguccuccuuuacaccuucgcuacagcaaacgccgacacucugugcauuggcuaucacgcgaauaacagcacggauaccguugacacaguguuggagaaaaauguaacugugacccauuccgucaacauauuagaagauaagcacaaugggaaacuguguaagcuaagaggaguggcuccccuccaucuggguaaaugcaacaucgccggcuggauucuugggaauccugagugugaaucucugucaacagcaaguagcugguccuacaucguugagaccucuucgucagacaacggaacuugcuauccaggcgauuuuauugacuacgaagaguugagggagcagcucagcaguguguccucuuucgaacgguuugagaucuucccgaagacaagcuccuggcccaaucacgauaccaacaagggugucacggccgcuuguccucaugcaggggccaaaucauuuuauaagaaucugauauggcuggugaaaaagggaaacaguuacccaaaacucagcaagucuuauaucaaugacaagggcaaagaaguauuaguucuguggggcauucaccaccccuccacuucagcugaucaacagagccuuuaccagaacgccgacgcguacguguucgucgggaguucucgcuauuccaagaaauuuaagccugagaucgcaauucgaccaaaagugcgugaucaggagggaagaaugaauuacuauuggaccuugguggaacccggugacaagaucacauucgaggccacuggcaaccuggucguuccuagguacgcuuuugccauggaaaagaacgcagggagcggaauaauuaucucggauaccccagugcaugacugcaauacaaccugucaaacgccgaaaggcgcuauuaacacuucucuacccuuccagaauauccacccuaucacaauugguaagugcccaaaauauguaaaguccaccaaacuccggcuggccacugggcuucgcaacgugcccucaauacagaguagaggacuguuuggcgcgaucgccggcuucauugaagggggauggacagguauggucgacggcugguacggguaucaucaccagaaugaacaaggaagcggcuacgcagcugauuugaaguccacccagaacgccaucgacgagauaacgaauaaagugaacucuguuauugagaagaugaauacccaguuuacagcuguggguaaggaguucaaccaccucgagaaaaggaucgaaaaucugaacaagaaagucgaugacggguucuuagauaucuggacuuacaaugccgagcugcucgugcuucuggaaaacgagcggaccuuggacuaucaugauagcaauguaaagaaccuauacgagaaaguucgcucacagcugaagaacaaugcaaaggaagugggcaacggauguuuugaguucuaucacaaaugcgacaauacauguauggaaagugucaagaacggcacuuacgauuauccuaaauacuccgaggaagccaagcucaaucgagaggagauugacggggugaaacuggaaagcaccagaaucuaucaaauucuugcuauauacucuacagcggcaucaagucuggucuuggugguuagccucggagccaucuccuuuuggaugugcucuaacgguucgcugcagugcaggauuuguaucuga

SEQ ID NO: 135140 - RNA, 1701 nt, Artificial Sequence
  derived and/or modified CDS sequence (opt3) from hemagglutinin__InfluenzaA__AEM92648
augaaggccauccuggugguccuccuuuacaccuucgcuacagcaaacgccgacacucugugcauuggcuaucacgcgaauaacagcacggauaccguugacacaguguuggagaaaaauguaacugugacccauuccgucaacauauuagaagauaagcacaaugggaaacuguguaagcuaagaggaguggcuccccuccaucuggguaaaugcaacaucgccggcuggauucuugggaauccugagugugaaucucugucaacagcaaguagcugguccuacaucguugagaccucuucgucagacaacggaacuugcuauccaggcgauuuuauugacuacgaagaguugagggagcagcucagcaguguguccucuuucgaacgguuugagaucuucccgaagacaagcuccuggcccaaucacgauaccaacaagggugucacggccgcuuguccucaugcaggggccaaaucauuuuauaagaaucugauauggcuggugaaagaaggaaacaguuacccaaagcucagcaaaucuuauaucaaugacaagggcaaggagguauuaguucuguggggcauucaccaccccuccacuucagcugaucaacagagccuuuaccagaacgccgacgcguacguguucgucgggaguucucgcuauuccaaaaaguuuaaaccugagaucgcaauucgaccaaaggugcgugaucaggaaggaagaaugaauuacuauuggaccuugguggagcccggugacaaaaucacauucgaagccacuggcaaccuggucguuccuagguacgcuuuugccauggagaagaacgcagggagcggaauaauuaucucggauaccccagugcaugacugcaauacaaccugucaaacgccgaaaggcgcuauuaacacuucucuacccuuccagaauauccacccuaucacaauugguaagugcccaaaguauguaaaauccaccaagcuccggcuggccacugggcuucgcaacgugcccucaauacagaguagaggacuguuuggcgcgaucgccggcuucauugaagggggauggacagguauggucgacggcugguacggguaucaucaccagaaugagcaaggaagcggcuacgcagcugauuugaaauccacccagaacgccaucgacgagauaacgaauaaggugaacucuguuauugaaaagaugaauacccaguuuacagcuguggguaaagaguucaaccaccucgaaaagaggaucgagaaucugaacaaaaaggucgaugacggguucuuagauaucuggacuuacaaugccgaacugcucgugcuucuggagaacgagcggaccuuggacuaucaugauagcaauguuaaaaaccuauacgaaaagguacgcucacagcugaaaaacaaugcaaaggaggugggcaacggauguuuugaguucuaucacaagugcgacaauacauguauggaaagugucaaaaacggcacuuacgauuauccuaaguacuccgaagaggccaaacucaaucgagaggaaauugacggggugaagcuggagagcaccagaaucuaucaaauucuugcuauauacucuacagcggcaucaagucuggucuuggugguuagccucggagccaucuccuuuuggaugugcucuaacgguucgcugcagugcaggauuuguaucuga

SEQ ID NO: 135141 - RNA, 1701 nt, Artificial Sequence; identical to SEQ ID NO: 133581
  derived and/or modified CDS sequence (opt3) from hemagglutinin__InfluenzaA__AEM98407

SEQ ID NO: 135142 - RNA, 1701 nt, Artificial Sequence; identical to SEQ ID NO: 133581
  derived and/or modified CDS sequence (opt3) from hemagglutinin__InfluenzaA__AEM98418

SEQ ID NO: 135143 - RNA, 1701 nt, Artificial Sequence; identical to SEQ ID NO: 133581
  derived and/or modified CDS sequence (opt3) from hemagglutinin__InfluenzaA__AEM98429

SEQ ID NO: 135144 - RNA, 1701 nt, Artificial Sequence
  derived and/or modified CDS sequence (opt3) from hemagglutinin__InfluenzaA__AEN55398
augaaggccauccuggugguccuccuuuacaccuucgcuacagcaaacgccgacacucugugcauuggcuaucacgcgaauaacagcacggauaccguugacacaguguuggagaaaaauguaacugugacccauuccgucaacuuacuggaagauaagcacaaugggaaacuauguaagcucagaggaguggcuccccugcaucuugguaaaugcaacauagccggcuggauccuggggaauccugagugugaaucuuugucaacagcaaguagcugguccuacauuguugagaccucuucgucagacaacggaacuugcuauccaggcaauuuuaucgauuacgaggagcucagggagcagcugagcaguguguccucuuucgaacgguuugagauuuucccgaagacaagcuccuggcccgaccacgauucaaacaagggugucaccgccgcuuguccucaugcaggggccaaaaguuuuuauaagaaucugaucuggcucgugaaaaagggaaacagcuacccaaaauuaucuaaguccuauauaaaugacaagggcaaagaaguacugguucuuuggggcauccaccaccccucaacgagcgcugaucaacagaguuuguaccagaacgccgacgcguacguguucgucgggacuucucgcuauuccaagaaauuuaagccugagauugcaauccgaccaaaagugcgugaucaggagggaagaaugaauuacuauuggacccugguggaacccggugacaagauuacauucgaggccacuggcaaccuagucgcuccuagguacgccuuugcaauggaacggaacgcugggagcggaaucauaauuucggauaccccaguucaugacugcaauacaaccugucaaacgccgaaaggcgccaucaacacuucucuccccuuccagaauauucacccuaucacaaucgguaagugcccaaaguaugugaaauccaccaagcugcgccuuguaacugggcugagaaacgugcccucaauucagaguaggggauuguuuggcgcgauagccggcuucaucgaagggggauggacagguauggucgacggcugguacggguaucaucaccagaaugaacaaggaagcggcuacgcagcugaucucaaauccacccagaacgccauugacaagaucacgaauaaagugaacucuguuauagagaagaugaauacccaguuuacagcuguggguaaggaguucaaccaccuggaaaaacggauugagaauuuaaacaagaaagucgaugacggguuccuggauaucuggacuuacaaugccgaacuccuugugcuguuggagaacgaacgcacccuagacuaucaugauagcaauguaaagaaccuguacgagaaaguucgaucacagcucaagaacaaugcaaaggagaucggcaacggauguuuugaguucuaucacaaaugcgacaauacauguauggaaagugugaagaacggcacuuacgauuauccuaaauacuccgaagaggccaagcugaauagagaagagauugacggggucaaacuugagagcaccaggaucuaucaaauucuggcuauauacucuacaguggcgucaaguuugguccucgugguuagccugggagcaaucuccuuuuggaugugcucuaacgguucguuacagugccggauuuguaucuga

SEQ ID NO: 135145 - RNA, 1701 nt, Artificial Sequence; identical to SEQ ID NO: 134968
  derived and/or modified CDS sequence (opt3) from hemagglutinin__InfluenzaA__AEN55408

SEQ ID NO: 135146 - RNA, 1701 nt, Artificial Sequence; identical to SEQ ID NO: 134483
  derived and/or modified CDS sequence (opt3) from hemagglutinin__InfluenzaA__AEN55418

SEQ ID NO: 135147 - RNA, 1701 nt, Artificial Sequence; identical to SEQ ID NO: 133632
  derived and/or modified CDS sequence (opt3) from hemagglutinin__InfluenzaA__AEN55463

SEQ ID NO: 135148 - RNA, 1701 nt, Artificial Sequence
  derived and/or modified CDS sequence (opt3) from hemagglutinin__InfluenzaA__AEN55473
augaaggccauccuggugguccuccuuuacaccuucgcuacagcaaacgccgacacucugugcauuggcuaucacgcgaauaacagcacggauaccguugacacaguguuggagaaaaauguaacugugacccauuccgucaacuuacuggaagauaagcacaaugggaaacuauguaagcucagaggaguggcuccccugcaucuugguaaaugcaacauagccggcuggauccuggggaauccugagugugaaucuuugucaacagcaaguagcugguccuacauuguugagaccucuucgucagacaacggaacuugcuauccaggcgauuuuaucgacuacgaggagcucagggagcagcugagcaguguguccucuuucgaacgguuugagauuuucccgaagacaagcuccuggcccaaucacgauucaaacaagggugucaccgccgcuuguccucaugcaggggccaaaaguuuuuauaagaaucugaucuggcucgugaaaaagggaaacagcuacccaaaauuaucuaaguccuauauaaaugacaagggcaaagaaguacugguucuuuggggcauccaccaccccucaacgacuaccgaucaacagagcuuguaccagacagcugacacuuacguguucgucgggaccagucgcuauucuaagaaauuuaagccugagauugccauccgaccaaaagugcgugaucaggagggaagaaugaacuacuauuggacacugguggaacccggugacaagauuaccuucgaggcgacgggcaaucuagucguuccuagguacgcauuugccauggaacggaacgcuggguccggaaucauaauuagcgauacuccagugcaugacugcaacacaaccugucaaacuccgaaaggcgccaucaauacaucgcuccccuuccagaacauucacccuaucaccaucgguaagugcccaaaguauguaaaaucuacgaagcugcgccuugcaaccgggcugagaaaugugcccuccauucagucaaggggauuguuuggcgcuauagccggcuucaucgaagggggauggacagguauggucgacggcugguacggguaucaucaccagaacgaacaaggaaguggcuacgcggccgaucucaaaagcacucagaaugcaauugacaagaucaccaacaaaguuaauuccgugauagagaagaugaacacacaguuuacugcuguggguaaggaguucaaucaccuggaaaaacggauugagaacuuaaauaagaaagucgaugacggguuccuggauaucuggaccuacaacgccgaacuccuugugcuguuggagaaugaacgcacacuagacuaucaugauucuaacguaaagaaucuguacgagaaaguucgaaaccagcucaagaccaacgcuaaggagaucggcaauggauguuuugaguucuaucacaaaugcgacaacacuuguauggaaagcgugaagaauggcacguacgauuauccuaaauacucagaagaggccaagcugaacagagaagagauugacggggucaaacuugagaguacaaggaucuaucaaauucuggcaauauacuccaccguggccagcucuuugguccucgugguuucacugggagcuaucaguuuuuggaugugcagcaaugguuccuuacagugccggauuuguaucuga

SEQ ID NO: 135149 - RNA, 1701 nt, Artificial Sequence; identical to SEQ ID NO: 134483
  derived and/or modified CDS sequence (opt3) from hemagglutinin__InfluenzaA__AEN55483

SEQ ID NO: 135150 - RNA, 1701 nt, Artificial Sequence; identical to SEQ ID NO: 135090
  derived and/or modified CDS sequence (opt3) from hemagglutinin__InfluenzaA__AEN55493

SEQ ID NO: 135151 - RNA, 1701 nt, Artificial Sequence; identical to SEQ ID NO: 134483
  derived and/or modified CDS sequence (opt3) from hemagglutinin__InfluenzaA__AEN55503

SEQ ID NO: 135152 - RNA, 1701 nt, Artificial Sequence
  derived and/or modified CDS sequence (opt3) from hemagglutinin__InfluenzaA__AEN55513
augaaggccauccuggugguccuccuuuacaccuucgcuacagcaaacgccgacacucugugcauuggcuaucacgcgaauaacagcacggauaccguugacacaguguuggagaaaaauguaacugugacccauuccgucaacuuacuggaagauaagcacaaugggaaacuauguaagcucagaggaguggcuccccugcaucuugguaaaugcaacauagccggcuggauccuggggaauccugagugugaaucuuugucaacagcaaguagcugguccuacauuguugagaccucuucgucagacaacggaacuugcuauccaggcgauuuuaucgacuacgaggagcucagggagcagcugagcaguguguccucuuucgaacgguuugagauuuucccgaagacaagcuccuggcccaaucacgauucaaacaagggugucaccgccgcuuguccucaugcaggggccaaaaguuuuuauaagaaucugaucuggcucgugaaaaagggaaacagcuacccaaaauuaucuaaguccuauauaaaugacaagggcaaagaaguacugguucuuuggggcauccaccaccccucaacgacugcugaucaacagaacuuguaccagaaugccgacaccuacguguucgucgggacaagccgcuauaguaagaaauuuaagccugagauugcgauccgaccaaaagugcgugaucaggagggaagaaugaacuacuauuggacucugguggaacccggugacaagauuaccuucgaggcaacaggcaaccuagucguuccuagguacgccuuugcuauggaacggaaugccgggucuggaaucauaauuuccgauaccccagugcaugacugcaacacgacuugucaaacaccgaaaggcgcaaucaauaccagccuccccuuccagaacauucacccuaucacuaucgguaagugcccaaaguauguaaaaucgacaaagcugcgccuugcuaccgggcugagaaaugugcccucuauucaguccaggggauuguuuggcgccauagcgggcuucaucgaagggggauggacggguauggucgacggcugguacggguaucaucaccagaacgaacaaggaucaggcuacgccgcagaucucaaaaguacccagaaugcuauugacaagaucacaaacaaagugaauagcguuauagagaagaugaacacucaguuuaccgccguggguaaggaguucaaucaccuggaaaaacggauugagaacuuaaauaagaaagucgaugacggguuccuggauaucuggacauacaacgcugaacuccuugugcuguuggagaaugaacgcacucuagacuaucaugauuccaacguaaagaaccuguacgagaaaguucgaaaucagcucaagaacaaugccaaggagaucggcaacggauguuuugaguucuaucacaaaugcgacaauaccuguauggaaucugugaagaacggcacauacgauuauccuaaauacagcgaagaggcaaagcugaauagagaagagauugacggggucaaacuugagucaaccaggaucuaucaaauucuggccauauacaguacuguggcuuccagcuugguccucgugguuucucugggagcgaucucauuuuggaugugcaguaacgguagcuuacagugccggauuuguaucuga

SEQ ID NO: 135153 - RNA, 1701 nt, Artificial Sequence; identical to SEQ ID NO: 134483
  derived and/or modified CDS sequence (opt3) from hemagglutinin__InfluenzaA__AEN55523

SEQ ID NO: 135154 - RNA, 1701 nt, Artificial Sequence; identical to SEQ ID NO: 133272
  derived and/or modified CDS sequence (opt3) from hemagglutinin__InfluenzaA__AEN68904

SEQ ID NO: 135155 - RNA, 1701 nt, Artificial Sequence; identical to SEQ ID NO: 130717
  derived and/or modified CDS sequence (opt3) from hemagglutinin__InfluenzaA__AEN68905

SEQ ID NO: 135156 - RNA, 1701 nt, Artificial Sequence; identical to SEQ ID NO: 130717
  derived and/or modified CDS sequence (opt3) from hemagglutinin__InfluenzaA__AEN68906

SEQ ID NO: 135157 - RNA, 1701 nt, Artificial Sequence; identical to SEQ ID NO: 131819
  derived and/or modified CDS sequence (opt3) from hemagglutinin__InfluenzaA__AEN68907

SEQ ID NO: 135158 - RNA, 1701 nt, Artificial Sequence; identical to SEQ ID NO: 130717
  derived and/or modified CDS sequence (opt3) from hemagglutinin__InfluenzaA__AEN68908

SEQ ID NO: 135159 - RNA, 1701 nt, Artificial Sequence
  derived and/or modified CDS sequence (opt3) from hemagglutinin__InfluenzaA__AEN68909
augaaggccauccuggugguccuccuuuacaccuucgcuacagcaaacgccgacacucugugcguuggcuaucacgcgaauaacagcacggauaccguggacacaguauuggagaaaaaugugacugucacccauuccgugaacuuacuggaagauaagcacaaugggaaacuauguaagcucagaggaguugcuccccugcaucuugguaaaugcaacauugccggcuggauacuggggaauccugagugugaaucuuugucaacagcaaguagcugguccuacaucguggagaccucuucgucagacaacggaacuugcuauccaggcgauuuuauugacuacgaggagcucagggagcagcugagcagugucuccucuuucgaacgguuugagaucuucccgaagacaagcuccuggcccaaucacgauucaaacaagggugugaccgccgcuuguccucaugcaggggccaaaaguuuuuauaagaaucugauuuggcucguaaagaagggaaacagcuacccaaaauuaucuaaguccuauaucaaugacaagggcaaagaaguucuggugcuuuggggcauacaccaccccucaacgagcgcugaucaacagaguuuguaccagaacgccgacgcguacgucuucguggggacuucucgcuauuccaagaaauuuaagccugagaucgcaauucgaccaaaagugcgugaucaggagggaagaaugaauuacuauuggacccuggucgaacccggugacaagaucacauucgaggccacuggcaaccuaguugugccuagguacgcuuuugccauggaacggaacgcagggagcggaauuaucauaucggauaccccaguacaugacugcaauacaaccugucaaacgccgaaaggcgcuauuaacacuucucuccccuuccagaauauccacccuauuacaaucgguaagugcccaaaguaugugaaauccaccaagcugcgccuugccacugggcugagaaacguccccucaauccagaguaggggauuguuuggcgcgauugccggcuucauagaagggggauggacagguaugguggacggcugguacggguaucaucaccagaaugaacaaggaagcggcuacgcagcugaucucaaauccacccagaacgccaucgacgagauuacgaauaagguuaacucugugaucgagaaaaugaauacccaguuuacagcugucgguaaggaguucaaccaccuggaaaagcggauagaaaauuuaaacaaaaagguggaugacggguuccuggauauuuggacuuacaaugccgagcuccuuguacuguuggaaaacgagcgcacccuagacuaucaugauagcaauguuaaaaaccuguacgagaaggugcgaucacagcucaaaaacaaugcaaaggaaaucggcaacggauguuuugaguucuaucacaagugcgacaauacauguauggaaagugucaaaaacggcacuuacgauuauccuaaguacuccgaggaagccaaacugaauagagaggagaucgacggggugaaacuugaaagcaccaggauuuaucaaauccuggcuauuuacucuacagucgcgucaaguuuggugcucguugugagccugggagcaauauccuuuuggaugugcucuaacgguucguuacagugccggaucuguauuuga

SEQ ID NO: 135160 - RNA, 1701 nt, Artificial Sequence
  derived and/or modified CDS sequence (opt3) from hemagglutinin__InfluenzaA__AEN68910
augaaggccauccuggugguccuccuuuacaccuucgcuacagcaaacgccgacacucugugcguuggcuaucacgcgaauaacagcacggauaccguggacacaguauuggagaaaaaugugacugucacccauuccgugaacuuacuggaagauaagcacaaugggaaacuauguaagcucagaggaguugcuccccugcaucuugguaaaugcaacauugccggcuggauacuggggaauccugagugugaaucuuugucaacagcaaguagcugguccuacaucguggagaccucuucgucagacaacggaacuugcuauccaggcgauuuuauugacuacgaagaacucagggagcagcugagcagugucuccucuuucgaacgguuugagaucuucccgaagacaagcuccuggcccaaucacgauucaaacaagggugugaccgccgcuuguccucaugcaggggccaaaaguuuuuauaagaaucugauuuggcucguaaagaagggaaacagcuacccaaaauuaucuaaguccuauaucaaugacaagggcaaagaaguucuggugcuuuggggcauacaccaccccucaacgagcgcugaucaacagaguuuguaccagaacgccgacgcguacgucuucguggggacuucucgcuauuccaagaaauuuaagccugagaucgcaauucgaccaaaagugcgugaucaggagggaagaaugaauuacuauuggacccuggucgaacccggugacaagaucacauucgaggccacuggcaaccuaguugugccuagguacgcuuuugccauggaacggaacgcagggagcggaauuaucauaucggauaccccaguacaugacugcaauacaaccugucaaacgccgaaaggcgcuauuaacacuucucuccccuuccagaauauccacccuauuacaaucgguaagugcccaaaguaugugaaagggaccaagcugcgccuugccacuggacugagaaacguccccuccauccagucaaggggcuuguuuggcgcgauugccggguucauagagggagguuggacaggcaugguggacgggugguacggauaucaucaccagaaugaacaaggcagugguuacgcagcugaucucaaaagcacccagaacgccaucgacgagauuacgaauaagguuaacuccgugaucgagaaaaugaauacccaguuuacagcugucgggaaggaguucaaccaccuggagaagcggauagaaaauuuaaacaaaaagguggaugacggcuuccuggauauuuggacuuacaaugccgagcuccuuguacuguuggaaaacgagcgcacccuagacuaucaugauucuaauguuaaaaaccuguacgagaaggugcgaagccagcucaaaaacaaugcaaaggaaaucggaaacggcuguuuugaguucuaucacaagugcgacaauacauguauggaaucagucaaaaacgggacuuacgauuauccuaaguacagugaggaagccaaacugaauagagaggagaucgacggagugaaacuugaauccaccaggauuuaucaaauccuggcuauuuacagcacagucgcgucuucauuggugcucguugugagucugggugcaaucagcuuuuggaugugcuccaacggcucuuuacagugccggauauguauuuga

SEQ ID NO: 135161 - RNA, 1701 nt, Artificial Sequence; identical to SEQ ID NO: 132833
  derived and/or modified CDS sequence (opt3) from hemagglutinin__InfluenzaA__AEN68911

SEQ ID NO: 135162 - RNA, 1701 nt, Artificial Sequence; identical to SEQ ID NO: 130717
  derived and/or modified CDS sequence (opt3) from hemagglutinin__InfluenzaA__AEN68912

SEQ ID NO: 135163 - RNA, 1701 nt, Artificial Sequence; identical to SEQ ID NO: 130808
  derived and/or modified CDS sequence (opt3) from hemagglutinin__InfluenzaA__AEN68913

SEQ ID NO: 135164 - RNA, 1701 nt, Artificial Sequence; identical to SEQ ID NO: 133383
  derived and/or modified CDS sequence (opt3) from hemagglutinin__InfluenzaA__AEN68914

SEQ ID NO: 135165 - RNA, 1701 nt, Artificial Sequence; identical to SEQ ID NO: 130717
  derived and/or modified CDS sequence (opt3) from hemagglutinin__InfluenzaA__AEN68915

SEQ ID NO: 135166 - RNA, 1701 nt, Artificial Sequence; identical to SEQ ID NO: 130717
  derived and/or modified CDS sequence (opt3) from hemagglutinin__InfluenzaA__AEN68916

SEQ ID NO: 135167 - RNA, 1701 nt, Artificial Sequence
  derived and/or modified CDS sequence (opt3) from hemagglutinin__InfluenzaA__AEN68917
augaaggccauccugggcgugcuccuuuacaccuucgcuacagcaaacgccgacacucugugcauuggguaucacgcgaauaacagcacggauaccgucgacacaguuuuggagaaaaaugugacuguaacccauuccgugaacuuacuggaagauaagcacaauggaaaacuauguaagcucagaggugucgcuccccugcaucuuggcaaaugcaacauagccggguggauccugggaaauccugagugugaaucuuugucaacagcaaguagcugguccuacauuguggagaccucuucgucagacaacggcacuugcuauccaggugauuuuaucgacuacgaagaacucagggagcagcugagcaguguuuccucuuucgaacgguuugagauuuucccgaagacaagcuccuggcccaaucacgauucaaacaagggggugaccgccgcuuguccucaugcaggagccaaaaguuuuuauaagaaucugaucuggcucgucaaaaagggcaacagcuacccaaaauuaucuaaguccuauauaaaugacaagggcaaagaagugcugguacuuugggggauccaccaccccucaacgagcgcugaucaacagaguuuguaccagaacgccgacgcguacguuuucgugggaacuucucgcuauuccaagaaauuuaagccugagauugcaauccgaccaaaaguccgugaucaggaggguagaaugaauuacuauuggacccugguggaacccggcgacaagauuacauucgaggccacugggaaccuaguggucccuagguacgcuuuugccauggaacggaacgcaggaagcggcaucauaauuucggauaccccaguucaugacugcaauacaaccugucaaacgccgaaaggugcuaucaacacuucucuccccuuccagaauauucacccugugacaaucgggaagugcccaaaguauguaaaauccaccaagcugcgccuugccacuggacugagaaacgugcccucaauccagaguaggggcuuguuuggcgcgauugccggguucauagagggagguuggacaggcauggucgacgggugguacggauaucaucaccagaaugaacaaggcagcgguuacgcagcugaucucaaauccacccagaacgccaucgacaagauuacgaauaaagugaacucuguuaucgagaagaugaauacccaguuuacagcuguggggaaggaguucaaccaccuggaaaaacggauagagaauuuaaacaagaaagucgaugacggcuuccuggauauuuggacuuacaaugccgaacuccuugugcuguuggagaacgaacgcacccuagacuaucaugauagcaauguaaagaaccuguacgagaaaguucgaucacagcucaagaacaaugcaaaggagaucggaaacggcuguuuugaguucuaucacaaaugcgacaauacauguauggagagugugaagaacgggacuuacgauuauccuaaauacuccgaagaggccaagcugaauagagaagagaucgacggagucaaacuugagagcaccaggauuuaucaaauccuggcuauuuacucuacaguggcgucaaguuugguccucgugguuagccugggugcaauauccuuuuggaugugcucuaacggcucguuacagugccggaucuguauuuga

SEQ ID NO: 135168 - RNA, 1701 nt, Artificial Sequence
  derived and/or modified CDS sequence (opt3) from hemagglutinin__InfluenzaA__AEN68918
augaaggccauccuggugguccuccuuuacaccuucgcuacagcaaacgccgacacucugugcauuggcuaucacgcgaauaacagcacggauaccguugacacaguguuggagaagaauguaacugugacccauuccgucaacuuacuggaagauaagaauaacgggaaacuauguaagcucagaggaguggcuccccugcaccuugguaaaugcaauauagccggcuggauccuggggaacccugagugugaaucuuugucaacagcaaguagcugguccuacauuguugagaccucuucgucagacaauggaacuugcuauccaggcgauuuuaucgacuacgaggagcucagggagcagcugagcaguguguccucuuucgaacgguuugagauguucccgaagacaagcuccuggcccaaccaugauucaaauaagggugucaccgccgcuuguccucacgcaggggccaaaaguuuuuauaagaaccugauuuggcucgugaaaaagggaaauagcuacccaaaauuaucuaaguccuauaucaacgacaagggcaaagaaguacugguucuuuggggcauacaucaccccucaacgagcgcugaucaacagaguuuguaccagaaugccgacgcguacguguucgucgggacuucucgcuauuccaagaaauuuaagccugagaucgcaauucgaccaaaagugcgugaucaggagggaagaaugaacuacuauuggacccugguggaacccggugacaagaucacauucgaggccacuggcaaccuagucguuccuagguacgcuuuugccauggaacggaaugcagggagcggaauuaucauaucggauaccccagugcacgacugcaacacaaccugucaaacgccgaaaggcgcuauuaauacuucucuccccuuccagaacauccauccuauuacaaucgguaagugcccaaaguauguaaaauccaccaagcugcgccuugccacugggcugagaaaugugcccucaauccagaguaggggauuguuuggcgcgauugccggcuucauagaagggggauggacagguauggucgacggcugguacggguaucaccaucagaacgaacaaggaagcggcuacgcagcugaucucaaauccacccagaaugccaucgacgagauuacgaacaagguaaauucuguuaucgagaaaaugaacacccaguuuacagcuguggguaaggaguucaaucaccuggaaaagcggauagaaaacuuaaauaaaaaggucgaugacggguuccuggauauuuggacuuacaacgccgagcuccuugugcuguuggaaaaugagcgcacccuagacuaucacgauagcaacgugaaaaaccuguacgagaagguucgaucacagcucaaaaauaacgcaaaggaagugggcaauggauguuuugaguucuaucauaagugcgacaacacauguauggaaagugucaaaaauggcacuuacgauuauccuaaguacuccgaggaagccaaacugaacagagaggagaucgacggggugaaacuugaaagcaccaggaucuaucaaauucuggcuaucuacucuacagucgcgucaaguuuggugcucguugugagccugggagcaauuuccuuuuggaugugcucuaaugguucguuacagugccggauauguaucuga

SEQ ID NO: 135169 - RNA, 1701 nt, Artificial Sequence; identical to SEQ ID NO: 133632
  derived and/or modified CDS sequence (opt3) from hemagglutinin__InfluenzaA__AEN68919

SEQ ID NO: 135170 - RNA, 1701 nt, Artificial Sequence; identical to SEQ ID NO: 132881
  derived and/or modified CDS sequence (opt3) from hemagglutinin__InfluenzaA__AEN68920

SEQ ID NO: 135171 - RNA, 1701 nt, Artificial Sequence; identical to SEQ ID NO: 131881
  derived and/or modified CDS sequence (opt3) from hemagglutinin__InfluenzaA__AEN68921

SEQ ID NO: 135172 - RNA, 1701 nt, Artificial Sequence; identical to SEQ ID NO: 131877
  derived and/or modified CDS sequence (opt3) from hemagglutinin__InfluenzaA__AEN68922

SEQ ID NO: 135173 - RNA, 1701 nt, Artificial Sequence; identical to SEQ ID NO: 131881
  derived and/or modified CDS sequence (opt3) from hemagglutinin__InfluenzaA__AEN68923

SEQ ID NO: 135174 - RNA, 1701 nt, Artificial Sequence; identical to SEQ ID NO: 131881
  derived and/or modified CDS sequence (opt3) from hemagglutinin__InfluenzaA__AEN68924

SEQ ID NO: 135175 - RNA, 1701 nt, Artificial Sequence
  derived and/or modified CDS sequence (opt3) from hemagglutinin__InfluenzaA__AEN68925
augaaggccauccuggugguccuccuuuacaccuucgcuacagcaaacgccgacacucugugcauuggcuaucacgcgaauaacagcacggauaccguugacacaguguuggagaaaaauguaacugugacccauuccgucaacuuacuggaagauaagcacaaugggaaacuauguaagcucagaggaguggcuccccugcaucuugguaaaugcaacauagccggcuggauccuggggaauccugagugugaaucuuugucaacagcaaguagcugguccuacauuguugagaccucuucgucagacaacggaacuugcuauccaggcgauuuuaucgacuacgaagaacucagggagcagcugagcaguguguccucuuucgaacgguuugagauuuucccgaagacaagcuccuggcccaaucacgauucaaacaagggugucaccgccgcuuguccucaugcaggggccaaaaguuuuuauaagaaucugaucuggcucgugaaaaagggaaacagcuacccaaaauuaucuaaguccuauauaaaugacaagggcaaagaaguacugguucuuuggggcauccaccaccccucaacgagcgcugaucaacagaguuuguaccagaacgccgacgcguacguguucgucgagacuucucgcuauuccaagaaauuuaagccugagauugcaauccgaccaaaagugcgugaucaggaagggagaaugaauuacuauuggacccugguggagcccggagacaagauuacauucgaagccacugguaaccuagucguuccuagguacgcuuuugccauggagcggaacgcaggcagcgggaucauaauuucggauaccccagugcaugacugcaauacaaccugucaaacgccgaaaggagcuaucaacacuucucuccccuuccagaauauucacccuaucacaaucggcaagugcccaaaguauguaaaauccaccaagcugcgccuugccacuggucugagaaacgugcccucaauucagaguaggggguuguuuggagcgauagccggcuucaucgaaggcggguggacaggaauggucgacgguugguacggcuaucaucaccagaaugagcaagggagcggauacgcagcugaucucaaauccacccagaacgccauugacaagaucacgaauaaagugaacucuguuauagagaagaugaauacccaguuuacagcugugggcaaggaguucaaccaccuggagaaacggauugaaaauuuaaacaagaaagucgaugacgguuuccuggauaucuggacuuacaaugccgagcuccuugugcuguuggaaaacgagcgcacccuagacuaucaugauagcaauguaaagaaccuguacgagaaaguucgaucacagcucaagaacaaugcaaaggaaaucgggaacggcuguuuugaguucuaucacaaaugcgacaauacauguauggaaagugugaagaacggaacuuacgauuauccuaaauacuccgaggaagccaagcugaauagagaggagauugacggcgucaaacuugaaagcaccaggaucuaucaaauucuggcuauauacucuacaguggcgucaaguuugguccucgugguuagccugggggcaaucuccuuuuggaugugcucuaacggaucguuacagugccggauuuguaucuga

SEQ ID NO: 135176 - RNA, 1701 nt, Artificial Sequence
  derived and/or modified CDS sequence (opt3) from hemagglutinin__InfluenzaA__AEN68926
augaaggccauccuggugguccuccuuuacaccuucgcuacagcaaacgccgacacucugugcauuggcuaucacgcgaauaacagcacggauaccguugacacaguguuggagaaaaauguaacugugacccauuccgucaacuuacuggaagauaagcacaaugggaaacuauguaagcucagaggaguggcuccccugcaucuugguaaaugcaacauagccggcuggauccuggggaauccugagugugaaucuuuggcaacagccucaaguuggagcuacauuguugagaccuccaacucugacaauggaacuugcuauccaggcgauuuuaucgacuacgaggagcucagggagcagcugucgucagugagcaguuucgaacgguuugagauuuucccgaagacauccucuuggcccaaccacgauagcaauaagggugucaccgcugcauguccucaugccggggcuaaauccuuuuauaagaaccugaucuggcucgugaaaaagggaaauucauacccaaaauuaaguaagagcuauauaaacgacaagggccgcgaaguacugguucuuuggggcauccaccaccccucuacguccgccgaucaacagucauuguaccagaaugcggacacuuacguguucgucgggaccagccgauauaguaaaaaguuuaaaccugagauugcaauccguccaaaggugagagaucaggagggaaggaugaacuacuauuggacacugguggaacccggugacaaaauuacuuucgaggccaccggcaaccuagucguuccucgguacgcuuuugccauggaacgcaaugcagggucuggaaucauaauuuccgauacaccagugcaugacugcaacaccacgugucaaacuccgaagggcgcuaucaauacaagccuccccuuccagaacauucacccuaucaccaucgguaaaugcccaaaguauguaaagucgacuaaacugagacuugccacagggcugaggaaugugcccucuauucagucccggggauuguuuggcgcgauagccggcuucaucgaagggggauggaccgguauggucgacggcugguacggguaucaucaccagaacgaacaaggaucaggcuacgcagcugaucucaagaguacgcagaaugccauugacgagaucaccaacaaagugaauagcguuauagagaagaugaacacacaguuuacugcuguggguaaagaguucaaucaccuggaaaagcgcauugaaaacuuaaauaagaaagucgaugacggguuccuggauaucuggaccuacaacgccgagcuccuugugcuguuggaaaaugagcgaacacuagacuaucaugauuccaacguaaagaaccuguacgagaaaguuagaucucagcucaagaauaacgcaaaagaaaucggcaauggauguuuugaguucuaucacaagugcgacaacacuuguauggaaagcgugaagaauggcaccuacgauuauccuaaauacucagaggaagccaagcugaacagggaggagauugacggggucaaacuugaaaguacacggaucuaucaaauucuggcuauauacuccaccguggcgagcucuuugguccucgugguuucacugggagcaaucaguuuuuggaugugcagcaaugguuccuuacagugccguauuuguaucuga

SEQ ID NO: 135177 - RNA, 1701 nt, Artificial Sequence
  derived and/or modified CDS sequence (opt3) from hemagglutinin__InfluenzaA__AEN68927
augaaggccauccuggugguccuccuuuacaccuucgcuacagcaaacgccgacacucugugcauuggcuaucacgcgaauaacagcacggauaccguugacacaguguuggagaaaaauguaacugugacccauuccgucaacuuacuggaagauaagcacaaugggaaacuauguaagcucagaggaguggcuccccugcaucuugguaaaugcaacauagccggcuggauccuggggaauccugagugugaaucuuugucaacagcaaguagcugguccuacauuguugagaccucuucgucagacaacggaacuugcuauccaggcgauuuuaucgacuacgaggagcucagggagcagcugagcaguguguccucuuucgaacgguuugagauuuucccgaagacaagcuccuggcccgaucacgacucaaauaagggugucaccgccgcuuguccucaugcaggggccaaaaguuuuuauaagaaccugaucuggcucgugaaaaagggaaauagcuacccaaaauuaucuaaguccuauauaaacgauaagggcaaagaaguacugguucuuuggggcauccaccaccccucaacgagcgcugaccaacagaguuuguaccagaaugccgaugcguacguguucgucgggacuucucgcuauuccaagaaauuuaagccugagauugcaauccgaccaaaagugcgugaccaggagggaagaaugaacuacuauuggacccugguggaacccggugauaagauuacauucgaggccacuggcaaucuagucguuccuagguacgcuuuugccauggaacggaacgcagggagcggaaucauaauuucggacaccccagugcaugacugcaacacaaccugucaaacgccgaaaggcgcuaucaauacuucucuccccuuccagaacauucacccuaucacaaucgguaagugcccaaaguauguaaaauccaccaagcugcgccuugccacugggcugagaaaugugcccucaauucagaguaggggauuguuuggcgcgauagccggcuucaucgaagggggauggacagguauggucgauggcugguacggguaucaucaccagaacgaacaaggaagcggcuacgcagcugaccucaaauccacccagaaugccauugauaagaucacgaacaaaguuaauucugugauagagaagaugaacacccaguuuacagcuguggguaaggaguucaaucaccuggaaaaacggauugagaacuuaaauaagaaagucgacgauggguuccuggacaucuggacuuacaacgccgaacuccuugugcuguuggagaaugaacgcacccuagauuaucaugacagcaacguaaagaaucuguacgagaaaguucgaaaccagcucaagaacaaugcaaaggagaucggcaacggauguuuugaguucuaucacaaaugcgauaauacauguauggaaucagugaagaacggcacuuacgacuauccuaaauacagugaagaggccaagcugaauagagaagagauugauggggucaaacuugaguccaccaggaucuaucaaauucuggcuauauacagcacaguggcgucuucauugguccucgugguuagucugggagcaaucagcuuuuggaugugcuccaacgguucuuuacagugccggauuuguaucuga

SEQ ID NO: 135178 - RNA, 1701 nt, Artificial Sequence; identical to SEQ ID NO: 134303
  derived and/or modified CDS sequence (opt3) from hemagglutinin__InfluenzaA__AEN68928

SEQ ID NO: 135179 - RNA, 1701 nt, Artificial Sequence
  derived and/or modified CDS sequence (opt3) from hemagglutinin__InfluenzaA__AEN68929
augaaggccauccuggugguccuccuuuacaccuucgcuacagcaaacgccgacacucugugcauuggcuaucacgcgaauaacagcacggauaccguugacacaguguuggagaaaaauguaacugugacccauuccgucaacuuacuggaagauaagcacaaugggaaacuauguaagcucagaggaauagcuccccugcaucuugguaaaugcaacaucgccggcuggauucuggggaauccugagugugaaucuuugucaacagcaaguagcugguccuacaucguggagaccucuucgucagacaacggaacuugcuauccaggcgauuuuauugacuacgaggagcucagggagcagcugagcaguguuuccucuuucgaacgguuugagaucuucccgaagacaagcuccuggcccaaucacgauucaaacaagggugugaccgccgcuuguccucaugcaggggccaaaaguuuuuauaagaaucugauauggcucgucaaaaagggaaacagcuacccaaaauuaucuaaguccuauaucaaugacaagggcaaagaagugcugguacuuuggggcauucaccaccccucaacgagcgcugaucaacagaguuuguaccagaacgccgacgcguacguuuucguggggacuucucgcuauuccaagaaauuuaagccugagaucgcaauucgaccaaaaguccgugaucaggagggaagaaugaauuacuauuggacccugguggaacccggugacaagaucacauucgaggccacuggcaaccuaguggucccuagguacgcuuuugccauggaacggaacgcagggagcggaauaauuaucucggauaccccaguucaugacugcaauacaaccugucaaacgccgaaaggcgcuauuaacacuucucuccccuuccagaauauccacccuaucacaauugguaagugcccaaaguaugugaaauccaccaagcugcgccuugccacugggcugagaaacguacccucaauacagaguaggggauuguuuggcgcgaucgccggcuucauugaagggggauggacagguaugguggacggcugguacggguaucaucaccagaaugaacaaggaagcggcuacgcagcugaucucaaauccacccagaacgccaucgacaagauaacgaauaaagucaacucugugauugagaagaugaauacccaguuuacagcuguugguaaggaguucaaccaccuggaaaaacggaucgagaauuuaaacaagaaaguggaugacggguuccuggauaucuggacuuacaaugccgaacuccuuguccuguuggagaacgaacgcacccuagacuaucaugauagcaaugugaagaaccuguacgagaaaguacgaucacagcucaagaacaaugcaaaggagauuggcaacggauguuuugaguucuaucacaaaugcgacaauacauguauggaaaguguuaagaacggcacuuacgauuauccuaaauacuccgaagaggccaagcugaauagagaagagaucgacggggugaaacuugagagcaccaggauuuaucaaauacuggcuaucuacucuacagucgcgucaaguuuggugcucgucgugagccugggagcaauuuccuuuuggaugugcucuaacgguucguuacagugccggaucuguaucuga

SEQ ID NO: 135180 - RNA, 1701 nt, Artificial Sequence; identical to SEQ ID NO: 133632
  derived and/or modified CDS sequence (opt3) from hemagglutinin__InfluenzaA__AEN68930

SEQ ID NO: 135181 - RNA, 1701 nt, Artificial Sequence; identical to SEQ ID NO: 133632
  derived and/or modified CDS sequence (opt3) from hemagglutinin__InfluenzaA__AEN68931

SEQ ID NO: 135182 - RNA, 1701 nt, Artificial Sequence; identical to SEQ ID NO: 133632
  derived and/or modified CDS sequence (opt3) from hemagglutinin__InfluenzaA__AEN68932

SEQ ID NO: 135183 - RNA, 1701 nt, Artificial Sequence
  derived and/or modified CDS sequence (opt3) from hemagglutinin__InfluenzaA__AEN69426
augaaggccauccuggugguccuccuuuacaccuucgcuacaagcaacgcagacacucugugcauuggcuaucacgccaauaacuccacggauaccguugacacaguguuggagaaaaauguaacugugacccauucugucaacuuacuggaagauaagcacaaugggaaacuauguaagcucagaggaguggcgccccugcaucuugguaaaugcaacauagcuggcuggauccuggggaauccugagugugaaucauugaguacagccagcuccuggucuuacauuguugagaccucgucaagcgacaacggaacuugcuauccaggcaauuuuaucgauuacgaggagcucagggagcagcugaguuccgugucuagcuucgaacgguuugagauuuucccgaagacauccucauggcccgaccacgauaguaacaagggugucaccgcagccuguccucaugcuggggcaaagagcuuuuauaaaaaucugaucuggcucgugaaaaagggaaacucuuacccaaaauuauccaagucauauauaaaugacaagggcaaagaaguacugguucuuuggggcauccaccaccccagcacgagugccgaucaacagucuuuguaccagaacgcugacgccuacguguucgucgggacuucccgcuauagcaagaaauuuaagccugagauugcgauccgaccaaaagugcgugaucaggagggaagaaugaauuacuauuggacccugguggaacccggugacaagauuacauucgaggcaacuggcaaccuagucgccccuagguacgcuuuugccauggaacggaacgcagggucgggaaucauaauuucugauaccccaguucaugacugcaauacaaccugucaaacgccgaaaggcgcuaucaacacuucccuccccuuccagaauauucacccuaucacaaucgguaagugcccaaaguaugugaaaucaaccaagcugcgccuugccacugggcugagaaacguacccaguauucagagcaggggauuguuuggcgcgauagccggcuucaucgaagggggauggacagguaugguggacggcugguacggguaucaucaccagaaugaacaaggauccggcuacgcagcugaucucaaaucuacccagaacgccauugacaagaucacgaauaaagucaacagcgugauagagaagaugaauacccaguuuacagcuguugguaaggaguucaaccaccuggaaaaacggauugagaauuuaaacaagaaaguggaugacggguuccuggauaucuggacuuacaaugccgaacuccuuguccuguuggagaacgaacgcacccuagacuaucaugauucaaaugugaagaaccuguacgagaaaguacgaagucagcucaagaacaaugcaaaggagaucggcaacggauguuuugaguucuaucacaaaugcgacaauacauguauggaauccguuaagaacggcacuuacgauuauccuaaauacagcgaagaggccaagcugaauagagaagagauugacggggugaaacuugagucuaccaggaucuaucaaauucuggcuauauacucaacagucgcgaguagcuuggugcucgucgugucccugggagcaaucucuuuuuggaugugcucgaacgguagcuuacagugccggauuuguaucuga

SEQ ID NO: 135184 - RNA, 1701 nt, Artificial Sequence; identical to SEQ ID NO: 134968
  derived and/or modified CDS sequence (opt3) from hemagglutinin__InfluenzaA__AEN69475

SEQ ID NO: 135185 - RNA, 1701 nt, Artificial Sequence; identical to SEQ ID NO: 134968
  derived and/or modified CDS sequence (opt3) from hemagglutinin__InfluenzaA__AEN69481

SEQ ID NO: 135186 - RNA, 1701 nt, Artificial Sequence; identical to SEQ ID NO: 130970
  derived and/or modified CDS sequence (opt3) from hemagglutinin__InfluenzaA__AEO01032

SEQ ID NO: 135187 - RNA, 1701 nt, Artificial Sequence; identical to SEQ ID NO: 131070
  derived and/or modified CDS sequence (opt3) from hemagglutinin__InfluenzaA__AEO01033

SEQ ID NO: 135188 - RNA, 1701 nt, Artificial Sequence; identical to SEQ ID NO: 131070
  derived and/or modified CDS sequence (opt3) from hemagglutinin__InfluenzaA__AEO01034

SEQ ID NO: 135189 - RNA, 1701 nt, Artificial Sequence; identical to SEQ ID NO: 130704
  derived and/or modified CDS sequence (opt3) from hemagglutinin__InfluenzaA__AEO01035

SEQ ID NO: 135190 - RNA, 1701 nt, Artificial Sequence; identical to SEQ ID NO: 131070
  derived and/or modified CDS sequence (opt3) from hemagglutinin__InfluenzaA__AEO01036

SEQ ID NO: 135191 - RNA, 1701 nt, Artificial Sequence; identical to SEQ ID NO: 130959
  derived and/or modified CDS sequence (opt3) from hemagglutinin__InfluenzaA__AEO01037

SEQ ID NO: 135192 - RNA, 1701 nt, Artificial Sequence; identical to SEQ ID NO: 131070
  derived and/or modified CDS sequence (opt3) from hemagglutinin__InfluenzaA__AEO01038

SEQ ID NO: 135193 - RNA, 1701 nt, Artificial Sequence; identical to SEQ ID NO: 130897
  derived and/or modified CDS sequence (opt3) from hemagglutinin__InfluenzaA__AEO01039

SEQ ID NO: 135194 - RNA, 1701 nt, Artificial Sequence
  derived and/or modified CDS sequence (opt3) from hemagglutinin__InfluenzaA__AEO01040
augaaggccauccuggugguccuccuuuacaccuucgcuacagcaaacgccgacacucugugcauuggcuaucacgcgaauaacagcacggauaccguugacacaguguuggagaaaaauguaacugugacccauuccgucaacuuacuggaagauaagcacaaugggaaacuauguaagcucagaggaguggcuccccugcaucuugguaaaugcaacauagccggcuggauccuggggaauccugagugugaaucuuugucaacagcaaguagcugguccuacauuguugagaccucuucgucagacaacggaacuugcuauccaggcgauuuuaucgacuacgaagaacucagggagcagcugagcaguguguccucuuucgaacgguuugagauuuucccgaagacaagcuccuggcccaaucacgauucaaacaagggugucaccgccgcuuguccucaugcaggggccaaaaguuuuuauaagaaucugaucuggcucgugaaaaagggaaacagcuacccaaaauuaucuaaguccuauauaaaugacaagggcaaaaagguacugguucuuuggggcauccaccaccccucaacgagcgcugaucaacagaguuuguaccagaacgccgacgcguacguguucgucgggacuucucgcuauuccaaaaaguuuaaaccugaaauugcaauccgaccaaaggugcgugaucaggagggaagaaugaauuacuauuggacccugauugagcccggugacaaaaucacauucgaagccacuggcaaccuaguggucccuagguacgcuuuuaccauggagcggaacgccgggagcggaauaauuaucucggauacaccaguucaugacugcaauaccacgugucaaacuccgaagggcgcaauuaacacaucucuccccuuccagaauauccacccuaucaccauugguaagugcccaaaauaugugaaguccacuaaacugcgccuugcuacagggcugagaaacguacccucaauacagaguaggggauuguuuggcgccaucgcgggcuucauugaagggggauggaccgguaugguggacggcugguacggguaucaucaccagaaugagcaaggaagcggcuacgccgcagaucucaaguccacgcagaacgcuaucgacgaaauaaccaauaaagucaacucugugauugagaagaugaauacacaguuuacugccguugguaaggaguucaaccaccuggaaaaacggaucgagaauuuaaacaagaaaguggaugacggguuccuggauaucuggaccuacaaugcugaacuccuuguccuguuggagaacgaacgcacacuagacuaucaugauagcaaugugaagaaccuguacgagaaaguacgaucacagcucaagaacaaugccaaggagauuggcaacggauguuuugaguucuaucacaaaugcgacaauacuuguauggagaguguuaagaacggcaccuacgauuauccuaaauacuccgaagaggcaaagcugaauagagaagagaucgacggggugaaacuugagagcacaaggauuuaucaaauacuggccaucuacucuaccgucgcuucaaguuuggugcucgucgugagccugggagcgauuuccuuuuggaugugcucuaacgguucguuacagugccggaucuguaucuga

SEQ ID NO: 135195 - RNA, 1701 nt, Artificial Sequence; identical to SEQ ID NO: 130717
  derived and/or modified CDS sequence (opt3) from hemagglutinin__InfluenzaA__AEO01041

SEQ ID NO: 135196 - RNA, 1701 nt, Artificial Sequence; identical to SEQ ID NO: 131070
  derived and/or modified CDS sequence (opt3) from hemagglutinin__InfluenzaA__AEO01042

SEQ ID NO: 135197 - RNA, 1701 nt, Artificial Sequence
  derived and/or modified CDS sequence (opt3) from hemagglutinin__InfluenzaA__AEO01043
augaaggccauccuggugguccuccuuuacaccuucgcuacagcaaacgccgacacucugugcauuggcuaucacgcgaauaacagcacggauaccguugacacaguguuggagaaaaauguaacugugacccauuccgucaacuuacuggaagauaagcacaaugggaaacuauguaagcucagaggaguggcuccccugcaucuugguaaaugcaacauagccggcuggauccuggggaauccugagugugaaucuuugucaacagcaaguagcugguccuacauuguugagaccucuucgucaaacaauggaacuugcuauccaggcgacuuuaucgauuacgaagaacucagggagcagcugagcaguguguccucuuucgaacgguuugagauuuucccgaagacaagcuccuggcccaaccacgacucaaauaagggugucaccgccgcuuguccucaugcaggggccaaaaguuuuuauaagaaccugaucuggcucgugaaaaagggaaauagcuacccaaaauuaucuaaguccuauauaaacgauaagggcaaagaaguacugguucuuuggggcauccaccaccccucaacgagcgcugaccaacagaguuuguaccagaaugccgaugcguacguguucgucgggacuucucgcuauuccaagaaauuuaagccugagauugcaauccgaccaaaagugcgugagcaggaaggaagaaugaacuacuauuggacccugguggagcccggugacaagauuacauucgaagccacuggcaaccuagucguuccuagguacgcuuuugccauggagcggaaugcagggagcggaaucauaauuucggauaccccagugcaugacugcaacacaaccugucaaacgccgaaaggcgcuaucaauacuucucuccccuuccagaacauucacccuaucacaaucgguaagugcccaaaguauguaaaauccaccaagcugcgccuugccacugggcugagaaaugugcccucaauucagaguaggggauuguuuggcgcgauagccggcuucaucgaagggggauggacagguauggucgauggcugguacggguaucaucaccagaacgagcaaggaagcggcuacgcagcugaccucaaauccacccagaaugccauugacgagaucacgaacaagguaaauucuguuauagaaaagaugaacacccaguuuacagcuguggguaaggaguucaaucaccuggaaaagcggauugagaacuuaaauaaaaaggucgaugacggguuccuggauaucuggacuuacaacgccgaacuccuugugcuguuggagaaugagcgcacccuagacuaucaugauagcaacgugaaaaaccuguacgaaaagguucgaucacagcucaaaaauaacgcaaaggagaucggcaauggauguuuugaguucuaucacaagugcgacaacacauguauggagagugugaaaaauggcacuuacgauuauccuaaguacuccgaagaggccaaacugaacagagaggaaauugacggggucaaacuugagagcaccaggaucuaucaaauucuggcuauauacucuacaguggcgucaaguuugguccucgugguuagccugggagcaaucuccuuuuggaugugcucuaaugguucguuacagugccggauuuguaucuga

SEQ ID NO: 135198 - RNA, 1701 nt, Artificial Sequence; identical to SEQ ID NO: 130717
  derived and/or modified CDS sequence (opt3) from hemagglutinin__InfluenzaA__AEO01044

SEQ ID NO: 135199 - RNA, 1701 nt, Artificial Sequence
  derived and/or modified CDS sequence (opt3) from hemagglutinin__InfluenzaA__AEO01045
augaaggccauccuggugguccuccuuuacaccuucgcuacagcaaacgccgacacucugugcauuggcuaucacgcgaauaacagcacggauaccguugacacaguguuggagaaaaauguaacugugacccauuccgucaacuuacuggaagauaagcacaaugggaaacuauguaagcucagaggaguggcuccccugcaucuugguaaaugcaacauagccggcuggauccuggggaauuuggagugugaaucucucucaacagcaaguagcugguccuacauuguugagaccucuucgucagacaacggaacuugcuauccuggcgauuuuaucgacuacgaggagcugagggagcagcugagcaguguguccucuuucgaacgguuugagauuuucccaaagacaagcuccuggccgaaucacgauucaaacaagggugucaccgccgcuuguccccaugcaggggccaaaaguuuuuauaagaaucucaucugguuagugaaaaagggaaacagcuacccuaaacugucuaaguccuauauaaaugacaagggcaaagaaguacuuguuuuguggggcauccaccacccaucaacgagcgcugaucaacagagucuguaccagaacgccgacgcguacguguucgucgggacuucucgcuauuccaagaaauuuaagcccgagauugcaauccgaccuaaagugcgugaucaggagggaagaaugaauuacuauuggacccuaguggaaccaggugacaagauuacauucgaggccacuggcaaccucgucguucccagguacgcuuuugccauggaacggaacgcagggagcggaaucauaauuucggauaccccugugcaugacugcaauacaaccugucaaacgccaaaaggcgcuaucaacacuucucugccguuccagaauauucaccccaucacaaucgguaagugcccuaaguauguaaaauccaccaaacuucgccuggccacuggguugagaaacgugccaucaauucagaguaggggacucuuuggcgcgauagccggcuucaucgaagggggauggacagguauggucgacggcugguacggguaucaucaccagaaugaacaaggaagcggcuacgcagcugaucugaaauccacccagaacgccauugacgagaucacgaauaaggugaacucuguuauagagaaaaugaauacccaguuuacagcuguggguaaggaguucaaccacuuagaaaagcggauugaaaaucugaacaaaaaggucgaugacggguuccucgauaucuggacuuacaaugccgagcuucugguguugcuagaaaacgagcgcacccuggacuaucaugauagcaauguaaagaaccucuacgagaagguucgaucacagcugaaaaacaaugcaaaggaaaucggcaacggauguuuugaguucuaucacaagugcgacaauacauguauggaaagugugaaaaacggcacuuacgauuaucccaaguacuccgaggaagccaaacuuaauagagaggagauugacggggucaagcuggaaagcaccaggaucuaucaaauuuuggcuauauacucuacaguggcgucaagucucguccuggugguuagcuuaggagcaaucuccuuuuggaugugcucuaacgguucgcugcagugccggauuuguaucuga

SEQ ID NO: 135200 - RNA, 1701 nt, Artificial Sequence; identical to SEQ ID NO: 130717
  derived and/or modified CDS sequence (opt3) from hemagglutinin__InfluenzaA__AEO01046

SEQ ID NO: 135201 - RNA, 1701 nt, Artificial Sequence; identical to SEQ ID NO: 130717
  derived and/or modified CDS sequence (opt3) from hemagglutinin__InfluenzaA__AEO01047

SEQ ID NO: 135202 - RNA, 1701 nt, Artificial Sequence
  derived and/or modified CDS sequence (opt3) from hemagglutinin__InfluenzaA__AEO01048
augaaggccauccuggugguccuccuuuacaccuucgcuacagcaaacgccgacacucugugcauuggcuaucacgcgaauaacagcacggauaccguugacacaguguuggagaaaaauguaacugugacccauuccgucaacuuacuggaagauaagcacaaugggaaacuauguaagcucagaggaguggcuccccugcaucuugguaaaugcaacauagccggcuggauccuggggaauccugagugugaaucuuugucaacagcaaguagcugguccuacauuguugagaccucuucgucagacaacggaacuugcuauccaggcgauuuuaucgacuacgaggagcucagggagcagcugagcaguguguccucuuucgaacgguuugagauuuucccgaagacaagcuccuggcccaaucacgauucaaacaagggugucaccgccgcuuguccucaugcaggggccaaaaguuuuuauaagaaucugaucuggcucgugaaaaagggaaacagcuacccaaaauuaucuaaguccuauauaaaugacaagggcaaagaaguacugguucuuuggggcauccaccaccccucaacgagcgcugaucaacagaguuuguaccagaacgccgacgcguacguguucgucgggacuucucgcuauuccaagaaauuuaagccugagauugcaauccgaccaaaagugcgugaucaggagggaagaaugaauuacuauuggacccugguggaacccggugacaagauuacauucgaggccacuggcaaccuagucguuccuagguacgcuuuugccauggaacggaacgcagggagcggaaucauaauuucggauaccccagugcaugacugcaauacaaccugucaaacgccgaaaggcgcuaucaacacuucucuccccuuccagaauauucacccuaucacaaucgguaagugcccaaaguauguaaaauccaccaagcugcgccuugccacugggcugagaaacgugcccucaauucagaguaggggauuguuuggcgcgauagccggcuucaucgaagggggauggacagguauggucgacggcugguacggguaucaucaccagaaugaacaaggaagcggcuacgcagcugaucucaaauccacccagaacgccauugacgagaucacgaauaaggugaacucuguuauagagaaaaugaauacccaguuuacagcuguggguaaggaguucaaccaccuggaaaagcggauugaaaauuuaaacaaaaaggucgaugacggguuccuggauaucuggacuuacaaugccgagcuccuugugcuguuggaaaacgagcgcacccuagacuaucaugauagcaauguaaagaaccuguacgagaagguucgaucacagcucaaaaacaaugcaaaggaaaucggcaacggauguuuugaguucuaucacaagugcgacaauacauguauggaaagugugaaaaacggcacuuacgauuauccuaaguacuccgaggaagccaaacugaauagagaggagauugacggggucaaacuugaaagcaccaggaucuaucaaauucuggcuauauacucuacaguggcgucaaguuugguccucgugguuagccugggagcaaucuccuuuuggaugugcucuaacgguucguuacagugcaaaauuuguaucuga

SEQ ID NO: 135203 - RNA, 1701 nt, Artificial Sequence; identical to SEQ ID NO: 131615
  derived and/or modified CDS sequence (opt3) from hemagglutinin__InfluenzaA__AEO01049

SEQ ID NO: 135204 - RNA, 1701 nt, Artificial Sequence; identical to SEQ ID NO: 130717
  derived and/or modified CDS sequence (opt3) from hemagglutinin__InfluenzaA__AEO01050

SEQ ID NO: 135205 - RNA, 1701 nt, Artificial Sequence; identical to SEQ ID NO: 131070
  derived and/or modified CDS sequence (opt3) from hemagglutinin__InfluenzaA__AEO01051

SEQ ID NO: 135206 - RNA, 1701 nt, Artificial Sequence
  derived and/or modified CDS sequence (opt3) from hemagglutinin__InfluenzaA__AEO01052
augaaggccaucauugugguccugcucuacaccuucgcuacagcaaacgccgacacucuuugcauaggcuaucacgcgaauaacagcacggauaccguugacacagugcuggagaaaaauguaacugugacccauuccgucaacuuguuagaagauaagcacaaugggaaacuguguaagcuaagaggaguggcuccccuccaucuggguaaaugcaacaucgccggcuggauucuugggaauccugagugugaaucucugucaacagcaaguagcugguccuacaucguugagaccucuucgucagacaacggaacuugcuauccaggcgauuuuauugacuacgaagaguugagggagcagcucagcaguguguccucuuucgaacgguuugagaucuucccgaagacaagcuccuggcccaaucacgauucaaacaagggugucaccgccgcuuguccucaugcaggggccaaaaguuuuuauaagaaucugauauggcuggugaaaaagggaaacagcuacccaaaacucucuaaguccuauaucaaugacaagggcaaagaaguauuaguucuguggggcauucaccaccccucaacgagcgcugaucaacagagucuuuaccagaacgccgacgcguacguguucgucgggacuucucgcuauuccaagaaauuuaagccugagaucgcaauucgaccaaaagugcgugaucaggagggaagaaugaauuacuauuggaccuugguggaacccggugacaagaucacauucgaggccacuggcaaccuggucguuccuagguacgcuuuugccauggaacggaacgcagggagcggaauaauuaucucggauaccccagugcaugacugcaauacaaccugucaaacgccgaaaggcgcuauuaacacuucucuacccuuccagaauauccacccuaucacaauugguaagugcccaaaguauguaaaauccaccaagcuccgccuggccacugggcuuagaaacgugcccucaauacagaguaggggacuguuuggcgcgaucgccggcuucauugaagggggauggacagguauggucgacggcugguacggguaucaucaccagaaugaacaaggaagcggcuacgcagcugauuugaaauccacccagaacgccaucgacaagauaacgaauaaagugaacucuguuauugagaagaugaauacccaguuuacagcuguggguaaggaguucaaccaccucgaaaaacggaucgagaaucugaacaagaaagucgaugacggguucuuagauaucuggacuuacaaugccgaacugcucgugcuucuggagaacgaacgcaccuuggacuaucaugauagcaauguaaagaaccuauacgagaaaguucgaucacagcugaagaacaaugcaaaggagauuggcaacggauguuuugaguucuaucacaaaugcgacaauacauguauggagagugugaagaacggcacuuacgauuauccuaaauacuccgaagaggccaagcucaauagagaagagaucgacggggucaaacuggagagcaccaggauuuaucaaauacuugcuaucuacucuacaguggcgucaagucuggucuuggugguuagccucggagcaauuuccuuuuggaugugcucuaacgguucgcugcagugccggaucuguaucuga

SEQ ID NO: 135207 - RNA, 1701 nt, Artificial Sequence; identical to SEQ ID NO: 131070
  derived and/or modified CDS sequence (opt3) from hemagglutinin__InfluenzaA__AEO01053

SEQ ID NO: 135208 - RNA, 1701 nt, Artificial Sequence; identical to SEQ ID NO: 130717
  derived and/or modified CDS sequence (opt3) from hemagglutinin__InfluenzaA__AEO01054

SEQ ID NO: 135209 - RNA, 1701 nt, Artificial Sequence; identical to SEQ ID NO: 131529
  derived and/or modified CDS sequence (opt3) from hemagglutinin__InfluenzaA__AEO01055

SEQ ID NO: 135210 - RNA, 1701 nt, Artificial Sequence; identical to SEQ ID NO: 131070
  derived and/or modified CDS sequence (opt3) from hemagglutinin__InfluenzaA__AEO01056

SEQ ID NO: 135211 - RNA, 1701 nt, Artificial Sequence; identical to SEQ ID NO: 130717
  derived and/or modified CDS sequence (opt3) from hemagglutinin__InfluenzaA__AEO01057

SEQ ID NO: 135212 - RNA, 1701 nt, Artificial Sequence; identical to SEQ ID NO: 130717
  derived and/or modified CDS sequence (opt3) from hemagglutinin__InfluenzaA__AEO01058

SEQ ID NO: 135213 - RNA, 1701 nt, Artificial Sequence; identical to SEQ ID NO: 130717
  derived and/or modified CDS sequence (opt3) from hemagglutinin__InfluenzaA__AEO01059

SEQ ID NO: 135214 - RNA, 1701 nt, Artificial Sequence; identical to SEQ ID NO: 130717
  derived and/or modified CDS sequence (opt3) from hemagglutinin__InfluenzaA__AEO01060

SEQ ID NO: 135215 - RNA, 1701 nt, Artificial Sequence; identical to SEQ ID NO: 130717
  derived and/or modified CDS sequence (opt3) from hemagglutinin__InfluenzaA__AEO01061

SEQ ID NO: 135216 - RNA, 1701 nt, Artificial Sequence; identical to SEQ ID NO: 130717
  derived and/or modified CDS sequence (opt3) from hemagglutinin__InfluenzaA__AEO01062

SEQ ID NO: 135217 - RNA, 1701 nt, Artificial Sequence; identical to SEQ ID NO: 130717
  derived and/or modified CDS sequence (opt3) from hemagglutinin__InfluenzaA__AEO01063

SEQ ID NO: 135218 - RNA, 1701 nt, Artificial Sequence; identical to SEQ ID NO: 130717
  derived and/or modified CDS sequence (opt3) from hemagglutinin__InfluenzaA__AEO01064

SEQ ID NO: 135219 - RNA, 1701 nt, Artificial Sequence; identical to SEQ ID NO: 130959
  derived and/or modified CDS sequence (opt3) from hemagglutinin__InfluenzaA__AEO01065

SEQ ID NO: 135220 - RNA, 1701 nt, Artificial Sequence; identical to SEQ ID NO: 131070
  derived and/or modified CDS sequence (opt3) from hemagglutinin__InfluenzaA__AEO01066

SEQ ID NO: 135221 - RNA, 1701 nt, Artificial Sequence
  derived and/or modified CDS sequence (opt3) from hemagglutinin__InfluenzaA__AEO01067
augaaggccauccuggugguccuccuuuacaccuucgcuacagcaaacgccgacacucugugcauuggcuaucacgcgaauaacagcacggauaccguugacacaguguuggagaaaaauguaacugugacccauuccgucaacuuacuggaagauaagcacaaugggaaacuauguaagcucagaggaguggcuccccugcaucuugguaaaugcaacauagccggcuggauccuggggaauccugagugugaaucuuugucaacagcaaguagcugguccuacauuguugagaccucuucgucagacaacggaacuugcuauccaggcgauuuuaucgacuacgaggagcucagggagcagcugagcaguguguccucuuucgaacgguuugagauuuucccgaagacaagcuccuggcccaaucacgauucaaacaagggugucaccgccgcuuguccucaugcaggggccaaaaguuuuuauaagaaucugaucuggcucgugaaaaagggaaacagcuacccaaaauuaucuaaguccuauauaaaugacaagggcaaagaaguacugguucuuuggggcauccaccaccccucaacgagcgcugaucaacagaguuuguaccagaacgccgacgcguacguguucgucgggacuucucgcuauuccaagaaauuuaagccugagauggcaauucgaccaaaagugcgugaucaggagggaagaaugaauuacuauuggacccugguggaacccggugacaagaucacauucgaggccacuggcaaccuagucguuccuagguacgcuuuugccauggaacggaacgcagggagcggaauuaucauaucggauaccccagugcaugacugcaauacaaccugucaaacgccgaaaggcgcuauuaacacuucucuccccuuccagaauauccacccuauuacaaucgguaagugcccaaaguauguaaaauccaccaagcugcgccuugccacugggcugagaaacgugcccucaauccagaguaggggauuguuuggcgcgauugccggcuucauagaagggggauggacagguauggucgacggcugguacggguaucaucaccagaaugaacaaggaagcggcuacgcagcugaucucaaauccacccagaacgccaucgacgagauuacgaauaaggugaacucuguuaucgagaaaaugaauacccaguuuacagcuguggguaaggaguucaaccaccuggaaaagcggauagaaaauuuaaacaaaaaggucgaugacggguuccuggauauuuggacuuacaaugccgagcuccuugugcuguuggaaaacgagcgcacccuagacuaucaugauagcaauguaaagaaccuguacgagaagguucgaucacagcucaaaaacaaugcaaaggaaaucggcaacggauguuuugaguucuaucacaagugcgacaauacauguauggaaagugugaaaaacggcacuuacgauuauccuaaguacuccgaggaagccaaacugaauagagaggagaucgacggggucaaacuugaaagcaccaggauuuaucaaauccuggcuauuuacucuacaguggcgucaaguuugguccucgugguuagccugggagcaauauccuuuuggaugugcucuaacgguucguuacagugccggaucuguauuuga

SEQ ID NO: 135222 - RNA, 1701 nt, Artificial Sequence; identical to SEQ ID NO: 131070
  derived and/or modified CDS sequence (opt3) from hemagglutinin__InfluenzaA__AEO01068

SEQ ID NO: 135223 - RNA, 1701 nt, Artificial Sequence; identical to SEQ ID NO: 130717
  derived and/or modified CDS sequence (opt3) from hemagglutinin__InfluenzaA__AEO01069

SEQ ID NO: 135224 - RNA, 1701 nt, Artificial Sequence; identical to SEQ ID NO: 131070
  derived and/or modified CDS sequence (opt3) from hemagglutinin__InfluenzaA__AEO01070

SEQ ID NO: 135225 - RNA, 1701 nt, Artificial Sequence; identical to SEQ ID NO: 130717
  derived and/or modified CDS sequence (opt3) from hemagglutinin__InfluenzaA__AEO01071

SEQ ID NO: 135226 - RNA, 1701 nt, Artificial Sequence
  derived and/or modified CDS sequence (opt3) from hemagglutinin__InfluenzaA__AEO01073
augaaggccauccuggugguccuccuuuacaccuucgcuacagcaaacgccgacacucugugcauuggcuaucacgcgaauaacagcacggauaccguugacacaguguuggagaagaauguaacugugacccauuccgucaacuuacuggaagauaagcacaaugggaaacuauguaagcucagaggaguggcuccccugcaucuugguaaaugcaacauagccggcuggauccuggggaauccugagugugaaucuuugucaacagcaaguagcugguccuacauuguugagaccucuucgucagacaacggaacuugcuauccaggcgauuuuaucgacuacgaggagcucagggagcagcugagcaguguguccucuuucgaacgguuugagauuuucccgaagacaagcuccuggcccaaucacgauucaaacaagggugucaccgccgcuuguccucaugcaggggccaaaaguuuuuauaagaaucugaucuggcucgugaaaaagggaaacagcuacccaaaauuaucuaaguccuauauaaaugacaagggcaaagaaguacugguucuuuggggcauccaccaccccucaacgagcgcugaucaacagaguuuguaccagaacgccgacgcguacguguucgucgggacuucucgcuauuccaagaaauuuaagccugagauugcaauccgaccaaaagugcgugaucaggagggaagaaugaauuacuauuggacccugguggaacccggugacaagauuacauucgaggccacuggcaaccuagucguuccuagguacgcuuuugccauggaacggaacgcagggagcggaaucauaauuucggauaccccagugcaugacugcaauacaaccugucaaacgccgaaaggcgcuguaaacacuucucuccccuuccagaauauccacccuauuacaaucgguaagugcccaaaguaugugaaauccaccaagcugcgccuugccacugggcugagaaacguccccucaauccagaguaggggauuguuuggcgcgauugccggcuucauagaagggggauggacagguaugguggacggcugguacggguaucaucaccagaaugaacaaggaagcggcuacgcagcugaucucaaauccacccagaacgccaucgacgagauuacgaauaagguuaacucugugaucgagaaaaugaauacccaguuuacagcugucgguaaggaguucaaccaccuggaaaagcggauagaaaauuuaaacaaaaagguggaugacggguuccuggauauuuggacuuacaaugccgagcuccuuguacuguuggaaaacgagcgcacccuagacuaucaugauagcaauguuaaaaaccuguacgagaaggugcgaucacagcucaaaaacaaugcaaaggaaaucggcaacggauguuuugaguucuaucacaagugcgacaauacauguauggaaagugucaaaaacggcacuuacgauuauccuaaguacuccgaggaagccaaacugaauagagaggagaucgacggggugaaacuugaaagcaccaggauuuaucaaauccuggcuauuuacucuacagucgcgucaaguuuggugcucguugugagccugggagcaauauccuuuuggaugugcucuaacgguucguuacagugccggaucuguauuuga

SEQ ID NO: 135227 - RNA, 1701 nt, Artificial Sequence; identical to SEQ ID NO: 130959
  derived and/or modified CDS sequence (opt3) from hemagglutinin__InfluenzaA__AEO01074

SEQ ID NO: 135228 - RNA, 1701 nt, Artificial Sequence; identical to SEQ ID NO: 131070
  derived and/or modified CDS sequence (opt3) from hemagglutinin__InfluenzaA__AEO01075

SEQ ID NO: 135229 - RNA, 1701 nt, Artificial Sequence; identical to SEQ ID NO: 131070
  derived and/or modified CDS sequence (opt3) from hemagglutinin__InfluenzaA__AEO01076

SEQ ID NO: 135230 - RNA, 1701 nt, Artificial Sequence
  derived and/or modified CDS sequence (opt3) from hemagglutinin__InfluenzaA__AEO01077
augaaggccauccuggugguccuccuuuacaccuucgcuacagcaaacgccgacacucugugcauuggcuaucacgcgaauaacagcacggauaccguugacacaguguuggagaaaaauguaacugugacccauuccgucaacuuacuggaagauaagcacaaugggaaacuauguaagcucagaggaguggcuccccugcaucuugguaaaugcaacauagccggcuggauccuggggaauccugagugugaaucuuugucaacagcaaguagcugguccuacauuguugagaccucuucgucagacaacggaacuugcuauccaggcgauuuuaucgacuacgaagaacucagggagcagcugagcaguguguccucuuucgaacgguuugagauuuucccgaagacaagcuccuggcccaaucacgauucaaacaagggugucaccgccgcuuguccucaugcaggggccaaaaguuuuuauaagaaucugaucuggcucgugaaaaagggaaacagcuacccaaaauuaucuaaguccuauauaaaugacaagggcaaagaaguacugguucuuuggggcauccaccaccccucaacgagcgcugaucaacagaguuuguaccagaacgccgacgcguacguguucgucgggacuucucgcuauuccaagaaauuuaagccugagauugcaauccgaccaaaagugcgugagcaggaaggaagaaugaauuacuauuggacccugguggagcccggugauaagauuacauucgaagccacuggcaaccuagucguuccuagguacgcuuuugccauggagcggaacgcagggagcggaaucauaauuucggacaccccagugcaugauugcaauacaaccugucaaacgccgaaaggcgcuaucaacacuucucuccccuuccagaauauucacccuaucacaaucgguaagugcccaaaguauguaaaauccaccaagcugcgccuugccacugggcugagaaacgugcccucaauucagaguaggggauuguuuggcgcgauagccggcuucaucgaagggggauggacagguauggucgacggcugguacggguaucaucaccagaaugagcaaggaagcggcuacgcagcugaccucaaauccacccagaacgccauugaugagaucacgaauaaggugaacucuguuauagaaaagaugaauacccaguuuacagcuguggguaaggaguucaaccaccuggaaaagcggauugagaauuuaaacaaaaaggucgacgauggguuccuggacaucuggacuuacaaugccgaacuccuugugcuguuggagaacgagcgcacccuagauuaucaugacagcaauguuaaaaaccuguacgaaaagguacgaucacagcucaaaaacaaugcaaaggagaucggcaacggauguuuugaguucuaucacaagugcgauaauacauguauggagaacgugaaaaauggcacuuacgacuauccuaaguacagugaagaggccaaacugaacagagaggaaauugauggggucaaacuugaguccaccaggaucuaucaaauucuggcuauauacagcacaguggcgucuucauugguccucgugguuagucugggagcaaucagcuuuuggaugugcuccaaugguucuuuacagugccggauuuguaucuga

SEQ ID NO: 135231 - RNA, 1701 nt, Artificial Sequence; identical to SEQ ID NO: 130717
  derived and/or modified CDS sequence (opt3) from hemagglutinin__InfluenzaA__AEO01078

SEQ ID NO: 135232 - RNA, 1701 nt, Artificial Sequence; identical to SEQ ID NO: 130717
  derived and/or modified CDS sequence (opt3) from hemagglutinin__InfluenzaA__AEO01079

SEQ ID NO: 135233 - RNA, 1701 nt, Artificial Sequence; identical to SEQ ID NO: 130717
  derived and/or modified CDS sequence (opt3) from hemagglutinin__InfluenzaA__AEO01080

SEQ ID NO: 135234 - RNA, 1701 nt, Artificial Sequence; identical to SEQ ID NO: 131070
  derived and/or modified CDS sequence (opt3) from hemagglutinin__InfluenzaA__AEO01081

SEQ ID NO: 135235 - RNA, 1701 nt, Artificial Sequence; identical to SEQ ID NO: 130717
  derived and/or modified CDS sequence (opt3) from hemagglutinin__InfluenzaA__AEO01082

SEQ ID NO: 135236 - RNA, 1701 nt, Artificial Sequence; identical to SEQ ID NO: 130717
  derived and/or modified CDS sequence (opt3) from hemagglutinin__InfluenzaA__AEO01083

SEQ ID NO: 135237 - RNA, 1701 nt, Artificial Sequence; identical to SEQ ID NO: 130717
  derived and/or modified CDS sequence (opt3) from hemagglutinin__InfluenzaA__AEO01084

SEQ ID NO: 135238 - RNA, 1701 nt, Artificial Sequence; identical to SEQ ID NO: 131070
  derived and/or modified CDS sequence (opt3) from hemagglutinin__InfluenzaA__AEO01085

SEQ ID NO: 135239 - RNA, 1701 nt, Artificial Sequence; identical to SEQ ID NO: 130717
  derived and/or modified CDS sequence (opt3) from hemagglutinin__InfluenzaA__AEO01086

SEQ ID NO: 135240 - RNA, 1701 nt, Artificial Sequence; identical to SEQ ID NO: 131070
  derived and/or modified CDS sequence (opt3) from hemagglutinin__InfluenzaA__AEO01087

SEQ ID NO: 135241 - RNA, 1701 nt, Artificial Sequence; identical to SEQ ID NO: 130897
  derived and/or modified CDS sequence (opt3) from hemagglutinin__InfluenzaA__AEO01088

SEQ ID NO: 135242 - RNA, 1701 nt, Artificial Sequence; identical to SEQ ID NO: 131070
  derived and/or modified CDS sequence (opt3) from hemagglutinin__InfluenzaA__AEO01089

SEQ ID NO: 135243 - RNA, 1701 nt, Artificial Sequence; identical to SEQ ID NO: 131070
  derived and/or modified CDS sequence (opt3) from hemagglutinin__InfluenzaA__AEO01090

SEQ ID NO: 135244 - RNA, 1701 nt, Artificial Sequence; identical to SEQ ID NO: 131070
  derived and/or modified CDS sequence (opt3) from hemagglutinin__InfluenzaA__AEO01091

SEQ ID NO: 135245 - RNA, 1701 nt, Artificial Sequence
  derived and/or modified CDS sequence (opt3) from hemagglutinin__InfluenzaA__AEO01092
augaaggccauccuggugguccuccuuuacaccuucgcuacagcaaacgccgacacucugugcauuggcuaucacgcgaauaacagcacggauaccguugacacaguguuggagaaaaauguaacugugacccauuccgucaacuuacuggaagauaagcacaaugggaaacuauguaagcucagaggaguggcuccccugcaucuugguaaaugcaacauagccggcuggauccuggggaauccugagugugaaucuuugucaacagcaaguagcugguccuacauuguugagaccucuucgucagacaacggaacuugcuauccaggcgauuuuaucgacuacgaggagcucagggagcagcugagcaguguguccucuuucgaacgguuugagauuuucccgaagacaagcuccuggcccaaucacgauucaaacaagggugucaccgccgcuuguccucaugcaggggccaaaaguuuuuauaagaaucugaucuggcucgugaaaaagggaaacagcuacccaaaauuaucuaaguccuauauaaaugacaagggcaaagaaguacugguucuuuggggcauccaccaccccucaacgagcgcugaucaacagaguuuguaccagaacgccgacgcguacguguucgucgggacuucucgcuauuccaagaaauuuaagccugagauugcaauccgaccaaaagugcgugaucaggagggaagaaugaauuacuauuggacccugguggaacccggugacaagauuacauucgaggccacuggcaaccuagucguuccuagguacgcuuuugccauggaacggaacgcagggagcggaaucauaauuucggauaccccagugcaugacugcaauacaaccugucaaacgccgaaaggcgcuaucaacacuucucuccccuuccagaauauucacccuaucacaaucgguaagugcccaaaguauguaaaauccaccaagcugcgccuugccacugggcugagaaacgugcccucaauucagaguaggggauuguuuggcgcgauagccggcuucaucgaagggggauggacagguauggucgacggcugguacggguaucaucaccagaaugaacaaggaagcggcuacgcagcugaucucaaauccacccagaacgccauugacgagaucacgaauaaggugaacucuguuauagagaaaaugaauacccaguuuacagcuguggguaaggaguucaaccaccuggaaaagcggauugaaaauuuaaacaaaaaggucgaugacggguuccuggauaucuggacuuacaaugccgagcuccuugugcuguuggaaaacgagcgcacccuagacuaucaugauagcaauguuaaaaaccuguacgagcgaguaagaucacagcucaagaacaaugcaaaagaaaucggcaacggauguuuugaguucuaucacaagugcgacaauacauguauggaaagugugaagaacggcacuuacgauuauccuaaauacuccgaggaagccaagcugaauagggaggagauugacggggucaaacuugaaagcacccggaucuaucaaauucuggcuauauacucuacaguggcgucaaguuugguccucgugguuagccugggagcaaucuccuuuuggaugugcucuaacgguucguuacagugccguauuuguaucuga

SEQ ID NO: 135246 - RNA, 1701 nt, Artificial Sequence; identical to SEQ ID NO: 130717
  derived and/or modified CDS sequence (opt3) from hemagglutinin__InfluenzaA__AEO01093

SEQ ID NO: 135247 - RNA, 1701 nt, Artificial Sequence; identical to SEQ ID NO: 130717
  derived and/or modified CDS sequence (opt3) from hemagglutinin__InfluenzaA__AEO01094

SEQ ID NO: 135248 - RNA, 1701 nt, Artificial Sequence; identical to SEQ ID NO: 133924
  derived and/or modified CDS sequence (opt3) from hemagglutinin__InfluenzaA__AEO01095

SEQ ID NO: 135249 - RNA, 1701 nt, Artificial Sequence; identical to SEQ ID NO: 131070
  derived and/or modified CDS sequence (opt3) from hemagglutinin__InfluenzaA__AEO01096

SEQ ID NO: 135250 - RNA, 1701 nt, Artificial Sequence; identical to SEQ ID NO: 131070
  derived and/or modified CDS sequence (opt3) from hemagglutinin__InfluenzaA__AEO01097

SEQ ID NO: 135251 - RNA, 1701 nt, Artificial Sequence; identical to SEQ ID NO: 131070
  derived and/or modified CDS sequence (opt3) from hemagglutinin__InfluenzaA__AEO01098

SEQ ID NO: 135252 - RNA, 1701 nt, Artificial Sequence; identical to SEQ ID NO: 130717
  derived and/or modified CDS sequence (opt3) from hemagglutinin__InfluenzaA__AEO01099

SEQ ID NO: 135253 - RNA, 1701 nt, Artificial Sequence; identical to SEQ ID NO: 130959
  derived and/or modified CDS sequence (opt3) from hemagglutinin__InfluenzaA__AEO01100

SEQ ID NO: 135254 - RNA, 1701 nt, Artificial Sequence; identical to SEQ ID NO: 130717
  derived and/or modified CDS sequence (opt3) from hemagglutinin__InfluenzaA__AEO01101

SEQ ID NO: 135255 - RNA, 1701 nt, Artificial Sequence; identical to SEQ ID NO: 130717
  derived and/or modified CDS sequence (opt3) from hemagglutinin__InfluenzaA__AEO01102

SEQ ID NO: 135256 - RNA, 1701 nt, Artificial Sequence; identical to SEQ ID NO: 131070
  derived and/or modified CDS sequence (opt3) from hemagglutinin__InfluenzaA__AEO01103

SEQ ID NO: 135257 - RNA, 1701 nt, Artificial Sequence; identical to SEQ ID NO: 131070
  derived and/or modified CDS sequence (opt3) from hemagglutinin__InfluenzaA__AEO01104

SEQ ID NO: 135258 - RNA, 1701 nt, Artificial Sequence
  derived and/or modified CDS sequence (opt3) from hemagglutinin__InfluenzaA__AEO01105
augaaggccauccuggugguccuccuuuacaccuucgcuacagcaaacgccgacacucugugcauuggcuaucacgcgaauaacagcacggauaccguugacacaguguuggagaaaaauguaacugugacccauuccgucaacuuacuggaagauaagcacaaugggaaacuauguaagcucagaggaguggcuccccugcaucuugguaaaugcaacauagccggcuggauccuggggaauccugagugugaaucuuugucaacagcaaguagcugguccuacauuguugagaccucuucgucagacaacggaacuugcuauccaggcgauuuuaucgacuacgaggagcucagggagcagcugagcaguguguccucuuucgaacgguuugagauuuucccgaagacaagcuccuggcccaaucacgauucaaguaagggugucaccgccgcuuguccucaugcaggggccaagagcuuuuauaagaaccugaucuggcucgugaaaaagggaaauucuuacccaaaauuauccaagucauauauaaacgacaagggcaaagaaguacugguucuuuggggcauccaccaccccagcacgagugcugaucaacagucuuuguaccagaaugccgacgcguacguguucgucgggacuucccgcuauagcaagaaauuuaagccugagauugcaauccgaccaaaagugcgugaucaggagggaagaaugaacuacuauuggacccugguggaacccggugacaagauuacauucgaggccacuggcaaucuagucguuccuagguacgcuuuugccauggaacggaacgcagggucgggaaucauaauuucugauaccccagugcaugacugcaacacaaccugucaaacgccgaaaggcgcuaucaauacuucccuccccuuccagaacauucacccuaucacaaucgguaagugcccaaaguauguaaaaucaaccaagcugcgccuugccacugggcugagaaaugugcccaguauucagagcaggggauuguuuggcgcgauagccggcuucaucgaagggggauggacagguauggucgacggcugguacggguaucaucaccagaacgaacaaggauccggcuacgcagcugaucucaaaucuacccagaaugccauugacgagaucacgaacaaggugaauagcguuauagagaaaaugaacacccaguuuacagcuguggguaaggaguucaaucaccuggaaaagcggauugaaaacuuaaauaaaaaggucgaugacggguuccuggauaucuggacuuacaacgccgagcuccuugugcuguuggaaaaugagcgcacccuagacuaucaugauucaaacguuaaaaaucuguacgagaagguacgaagucagcucaaaaacaacgcaaaggaaaucggcaauggauguuuugaguucuaucacaagugcgacaacacauguauggaauccgugaaaaauggcacuuacgauuauccuaaguacagcgaggaagccaaacugaacagagaggagauugacggggucaaacuugaaucuaccaggaucuaucaaauucuggcuauauacucaacaguggcgaguagcuugguccucgugguuucccugggagcaaucucuuuuuggaugugcucgaaugguagcuuacagugccggauuuguaucuga

SEQ ID NO: 135259 - RNA, 1701 nt, Artificial Sequence; identical to SEQ ID NO: 131070
  derived and/or modified CDS sequence (opt3) from hemagglutinin__InfluenzaA__AEO01106

SEQ ID NO: 135260 - RNA, 1701 nt, Artificial Sequence; identical to SEQ ID NO: 130717
  derived and/or modified CDS sequence (opt3) from hemagglutinin__InfluenzaA__AEO01107

SEQ ID NO: 135261 - RNA, 1701 nt, Artificial Sequence; identical to SEQ ID NO: 130717
  derived and/or modified CDS sequence (opt3) from hemagglutinin__InfluenzaA__AEO01108

SEQ ID NO: 135262 - RNA, 1701 nt, Artificial Sequence; identical to SEQ ID NO: 130717
  derived and/or modified CDS sequence (opt3) from hemagglutinin__InfluenzaA__AEO01109

SEQ ID NO: 135263 - RNA, 1701 nt, Artificial Sequence; identical to SEQ ID NO: 130717
  derived and/or modified CDS sequence (opt3) from hemagglutinin__InfluenzaA__AEO01110

SEQ ID NO: 135264 - RNA, 1701 nt, Artificial Sequence; identical to SEQ ID NO: 130717
  derived and/or modified CDS sequence (opt3) from hemagglutinin__InfluenzaA__AEO01111

SEQ ID NO: 135265 - RNA, 1701 nt, Artificial Sequence; identical to SEQ ID NO: 130717
  derived and/or modified CDS sequence (opt3) from hemagglutinin__InfluenzaA__AEO01112

SEQ ID NO: 135266 - RNA, 1701 nt, Artificial Sequence
  derived and/or modified CDS sequence (opt3) from hemagglutinin__InfluenzaA__AEO01113
augaaggccauccuggugguccuccuuuacaccuucgcuacagcaaacgccgacacucugugcauuggcuaucacgcgaauaacagcacggauaccguugacacaguguuggagaaaaauguaacugugacccauuccgucaacuuacuggaagauaagcacaaugggaaacuauguaagcucagaggaguggcuccccugcaucuugguaaaugcaacauagccggcuggauccuggggaauccugagugugaaucuuugucaacagcaaguagcugguccuacauuguugagaccucuucgucagacaacggaacuugcuauccaggcgauuuuaucgacuacgaggagcucagggagcagcugagcaguguguccucuuucgaacgguuugagauuuucccgaagacaagcuccuggcccaaucacgauucaaacaagggugucaccgccgcuugucugcaugcaggggccaaaaguuuuuauaagaaucucaucugguuagugaaaaagggaaacagcuacccuaaacugucuaaguccuauauaaaugacaagggcaaagaaguacuuguuuuguggggcauccaccacccaucaacgagcgcugaucaacagagucuguaccagaacgccgacgcguacguguucgucgggacuucucgcuauuccaagaaauuuaagcccgagauugcaauccgaccuaaagugcgugaucaggagggaagaaugaauuacuauuggacccuaguggaaccaggugacaagauuacauucgaggccacuggcaaccucgucguucccagguacgcuuuugccauggaacggaacgcagggagcggaaucauaauuucggauaccccugugcaugacugcaauacaaccugucaaacgccaaaaggcgcuaucaacacuucucugccguuccagaauauucaccccaucacaaucgguaagugcccuaaguauguaaaauccaccaaacuucgccuggccacuggguugagaaacgugccaucaauucagaguaggggacucuuuggcgcgauagccggcuucaucgaagggggauggacagguauggucgacggcugguacggguaucaucaccagaaugaacaaggaagcggcuacgcagcugaucugaaauccacccagaacgccauugacgagaucacgaauaaggugaacucuguuauagagaaaaugaauacccaguuuacagcuguggguaaggaguucaaccacuuagaaaagcggauugaaaaucugaacaaaaaggucgaugacggguuccucgauaucuggacuuacaaugccgagcuucugguguugcuagaaaacgagcgcacccuggacuaucaugauagcaauguaaagaaccucuacgagaagguucgaucacagcugaaaaacaaugcaaaggaaaucggcaacggauguuuugaguucuaucacaagugcgacaauacauguauggaaagugugaaaaacggcacuuacgauuaucccaaguacuccgaggaagccaaacuuaauagagaggagauugacggggucaagcuggaaagcaccaggaucuaucaaauuuuggcuauauacucuacaguggcgucaagucucguccuggugguuagcuuaggagcaaucuccuuuuggaugugcucuaacgguucgcugcagugccggauuuguaucuga

SEQ ID NO: 135267 - RNA, 1701 nt, Artificial Sequence; identical to SEQ ID NO: 130959
  derived and/or modified CDS sequence (opt3) from hemagglutinin__InfluenzaA__AEO01114

SEQ ID NO: 135268 - RNA, 1701 nt, Artificial Sequence
  derived and/or modified CDS sequence (opt3) from hemagglutinin__InfluenzaA__AEO01115
auggaggccauccuggugguccuccuuuacaccuucgcuacagcaaacgccgacacucugugcauuggcuaucacgcgaauaacagcacggauaccguugacacaguguuggaaaagaauguaacugugacccauuccgucaacuuacuggaggauaaacacaaugggaagcuauguaaacucagaggaguggcuccccugcaucuugguaagugcaacauagccggcuggauccuggggaauccugaaugugagucuuugucaacagcaaguagcugguccuacauuguugaaaccucuucgucagacaacggaacuugcuauccaggcgauuuuaucgacuacgaggagcucagggaacagcugagcaguguguccucuuucgagcgguuugaaauuuucccgaaaacaagcuccuggcccaaucacgauucaaacaagggugucaccgccgcuugucugcaugcaggggccaagaguuuuuauaaaaaucucaucugguuagugaagaaaggaaacagcuacccuaagcugucuaaauccuauauaaaugacaagggcaaggagguacuuguuuuguggggcauccaccacccaucaacgagcgcugaucaacagagucuguaccagaacgccgacgcguacguguucgucgggacuucucgcuauuccaaaaaguuuaaacccgagauugcaauccgaccuaaggugcgugaucaggaaggaagaaugaauuacuauuggacccuaguggagccaggugacaaaauuacauucgaagccacuggcaaccucgucguucccagguacgcuuuugccauggagcggaacgcagggagcggaaucauaauuucggauaccccugugcaugacugcaauacaaccugucaaacgccaaagggcgcuaucaacacuucucugccguuccacaauauucaucccaucacaaucgguaaaugcccuaaguauguaaaguccaccaaacuucgccuggccacuggguugagaaacgugccaucaauucagaguaggggacucuuuggcgcgauagccggcuucaucgaagggggauggacagguauggucgacggcugguacggguaucaccaccagaaugagcagggaagcggcuacgcagcugaucugaaguccacccaaaacgccauugacgagaucacgaauaaagugaacucuguuauagaaaagaugaauacccaguuuacagcuguggguaaagaguucaaccauuuagaaaagcggauugagaaucugaacaagaaagucgaugacggguuccucgauaucuggacuuacaaugccgaacuucugguguugcuagagaacgagcgcacccuggacuaucacgauagcaauguaaagaaccucuacgaaaaaguucgaucacagcugaagaacaaugcaaaagagaucggcaacggauguuuugaguucuaucauaagugcgacaauacauguauggaaagugugaagaacggcacuuacgauuaucccaaauacuccgaagaggccaaacuuaauagagaggaaauugacggggucaagcuggagagcaccaggaucuaucagauuuuggcuauauacucuacaguggcgucaagucucguccuggugguuagcuuaggagcaaucuccuuuuggaugugcucuaacgguucgcugcaaugccggauuuguaucuga

SEQ ID NO: 135269 - RNA, 1701 nt, Artificial Sequence; identical to SEQ ID NO: 130717
  derived and/or modified CDS sequence (opt3) from hemagglutinin__InfluenzaA__AEO01116

SEQ ID NO: 135270 - RNA, 1701 nt, Artificial Sequence; identical to SEQ ID NO: 130717
  derived and/or modified CDS sequence (opt3) from hemagglutinin__InfluenzaA__AEO01117

SEQ ID NO: 135271 - RNA, 1701 nt, Artificial Sequence; identical to SEQ ID NO: 131583
  derived and/or modified CDS sequence (opt3) from hemagglutinin__InfluenzaA__AEO01118

SEQ ID NO: 135272 - RNA, 1701 nt, Artificial Sequence; identical to SEQ ID NO: 130717
  derived and/or modified CDS sequence (opt3) from hemagglutinin__InfluenzaA__AEO01119

SEQ ID NO: 135273 - RNA, 1701 nt, Artificial Sequence
  derived and/or modified CDS sequence (opt3) from hemagglutinin__InfluenzaA__AEO01120
augaaggccauccuggugguccuccuuuacaccuucgcuacagcaaacgccgacacucugugcauuggcuaucacgcgaauaacagcacggauaccguugacacaguguuggagaaaaauguaacugugacccauuccgucaacuuacuggaagauaagcacaaugggaaacuauguaagcucagaggaguggcuccccugcaucuugguaaaugcaacauagccggcuggauccuggggaauccugagugugaaucuuugucaacagcaaguagcugguccuacauuguugagaccucuucgucagacaacggaacuugcuauccaggcgauuuuaucgacuacgaagaacucagggagcagcugagcaguguguccucuuucgaacgguuugagauuuucccgaagacaagcuccuggcccaaucacgauucaaacaagggugucaccgccgcuuguccucaugcaggggccaaaaguuuuuauaagaaucugaucuggcucgugaaaaagggaaacagcuacccaaaauuaucuaaguccuauauaaaugacaagggcaaagaaguacugguucuuuggggcauccaccaccccucaacgagcgcugaucaacagaguuuguaccagaacgccgacgcguacguguucgucgggacuucucgcuauuccaagaaauuuaagccugagauugcaauccgaccaaaagugcgugagcaggaaggaagaaugaauuacuauuggacccugguggagcccggugauaagauuacauucgaagccacuggcaaccuagucguuccuagguacgcuuuugccauggagcggaacgcagggagcggaaucauaauuucggacaccccagugcaugauugcaauacaaccugucaaacgccgaaaggcgcuaucaacacuucucuccccuuccagaauauucacccuaucacaaucgguaagugcccaaaguauguaaaauccaccaagcugcgccuugccacugggcugagaaacauucccucaauacagaguaggggauuguuuggcgcgaucgccggcuucauugaagggggauggacagguaugguggacggcugguacggguaucaucaccagaaugagcaaggaagcggcuacgcagcugaccucaaauccacccagaacgccaucgaugagauaacgaauaaggucaacucugugauugaaaagaugaauacccaguuuacagcuguugguaaggaguucaaccaccuggaaaagcggaucgagaauuuaaacaaaaagguggacgauggguuccuggacgucuggacuuacaaugccgaacuccuugugcuguuggagaacgagcgcacccuagauuaucaugacagcaauguuaaaaaccuguacgaaaagguacgaucacagcucaaaaacaaugcaaaggagaucggcaacggauguuuugaguucuaucacaagugcgauaauacauguauggagagugugaaaaacggcacuuacgacuauccuaaguacuccgaagaggccaaacugaauagagaggaaauugauggggucaaacuugagagcaccaggaucuaucaaauucuggcuauauacucuacaguggcgucaaguuugguccucgugguuagccugggagcaaucuccuuuuggaugugcucuaacgguucguuacagugccggauuuguaucuga

SEQ ID NO: 135274 - RNA, 1701 nt, Artificial Sequence; identical to SEQ ID NO: 130717
  derived and/or modified CDS sequence (opt3) from hemagglutinin__InfluenzaA__AEO01121

SEQ ID NO: 135275 - RNA, 1701 nt, Artificial Sequence; identical to SEQ ID NO: 131070
  derived and/or modified CDS sequence (opt3) from hemagglutinin__InfluenzaA__AEO01122

SEQ ID NO: 135276 - RNA, 1701 nt, Artificial Sequence; identical to SEQ ID NO: 130717
  derived and/or modified CDS sequence (opt3) from hemagglutinin__InfluenzaA__AEO01123

SEQ ID NO: 135277 - RNA, 1701 nt, Artificial Sequence; identical to SEQ ID NO: 130717
  derived and/or modified CDS sequence (opt3) from hemagglutinin__InfluenzaA__AEO01124

SEQ ID NO: 135278 - RNA, 1701 nt, Artificial Sequence; identical to SEQ ID NO: 131070
  derived and/or modified CDS sequence (opt3) from hemagglutinin__InfluenzaA__AEO01125

SEQ ID NO: 135279 - RNA, 1701 nt, Artificial Sequence
  derived and/or modified CDS sequence (opt3) from hemagglutinin__InfluenzaA__AEO01126
augaaggccacccuggugguccuccuuuacacauucgcuacugcaaacgccgacacgcugugcaucggcuaucacgcgaauaacagcaccgauacaguugacacuguguuggagaaaaauguaaccgugacacauuccgucaacuuacuggaagauaagcacaaugggaaacuauguaagcucagaggaguggcuccccugcaucuugguaaaugcaacauugccggcuggauacuggggaauccugagugugaaucuuugucaaccgcaaguagcugguccuacaucguugagacuucuucgucagacaacggaacaugcuauccaggcgauuuuauugacuacgaagaacucagggagcagcugagcaguguguccucuuucgaacgguuugagaucuucccgaagaccagcuccuggcccaaucacgauucaaacaagggugucacggccgcuuguccucaugcaggggccaaaaguuuuuauaagaaucugauuuggcucgugaaaaagggaaacagcuacccaaaauuaucuaaguccuauaucaaugacaagggcaaagaaguacugguucuuuggggcauacaccaccccucaacuagcgcugaucaacagaguuuguaccagaacgccgacgcguacguguucgucgggaccucucgcuauuccaagaaauuuaagccugagaucgcaauucgaccaaaagugcgugagcaggaaggaagaaugaauuacuauuggacacugguggagcccggugauaagaucacuuucgaagccaccggcaaccuagucguuccuagguacgcuuuugccauggagcggaacgcagggagcggaauuaucauaucggacacaccagugcaugauugcaauaccacgugucaaacuccgaaaggcgcuauuaacacaucucuccccuuccagaauauccacccuauuaccaucgguaagugcccaaaguauguaaaauccacuaagcugcgccuugccacagggcugagaaacgugcccucaauccagaguaggggauuguuuggcgcgauugccggcuucauagaagggggauggaccgguauggucgacggcugguacggguaucaucaccagaaugagcaaggaagcggcuacgcagcugaccucaaauccacgcagaacgccaucgaugagauuaccaauaaggugaacucuguuaucgaaaagaugaauacacaguuuacugcuguggguaaggaguucaaccaccuggaaaagcggauagagaauuuaaacaaaaaggucgacgauggguuccuggacauuuggaccuacaaugccgaacuccuugugcuguuggagaacgagcgcacacuagauuaucaugacagcaauguuaaaaaccuguacgaaaagguacgaucacagcucaaaaacaaugcaaaggagaucggcaacggauguuuugaguucuaucacaagugcgauaauacuuguauggagagugugaaaaacggcaccuacgacuauccuaaguacuccgaagaggccaaacugaauagagaggaaaucgauggggucaaacuugagagcacaaggauuuaucaaauccuggcuauuuacucuaccguggcgucaaguuugguccucgugguuagccugggagcaauauccuuuuggaugugcucuaacgguucguuacagugccggaucuguauuuga

SEQ ID NO: 135280 - RNA, 1701 nt, Artificial Sequence; identical to SEQ ID NO: 130717
  derived and/or modified CDS sequence (opt3) from hemagglutinin__InfluenzaA__AEO01127

SEQ ID NO: 135281 - RNA, 1701 nt, Artificial Sequence; identical to SEQ ID NO: 130717
  derived and/or modified CDS sequence (opt3) from hemagglutinin__InfluenzaA__AEO01128

SEQ ID NO: 135282 - RNA, 1701 nt, Artificial Sequence; identical to SEQ ID NO: 131070
  derived and/or modified CDS sequence (opt3) from hemagglutinin__InfluenzaA__AEO01129

SEQ ID NO: 135283 - RNA, 1701 nt, Artificial Sequence; identical to SEQ ID NO: 130717
  derived and/or modified CDS sequence (opt3) from hemagglutinin__InfluenzaA__AEO01130

SEQ ID NO: 135284 - RNA, 1701 nt, Artificial Sequence; identical to SEQ ID NO: 131070
  derived and/or modified CDS sequence (opt3) from hemagglutinin__InfluenzaA__AEO01131

SEQ ID NO: 135285 - RNA, 1701 nt, Artificial Sequence; identical to SEQ ID NO: 130717
  derived and/or modified CDS sequence (opt3) from hemagglutinin__InfluenzaA__AEO01132

SEQ ID NO: 135286 - RNA, 1701 nt, Artificial Sequence
  derived and/or modified CDS sequence (opt3) from hemagglutinin__InfluenzaA__AEO01133
augaaggccauccuggugguccuccuuuacaccuucgcuacagcaaacgccgacacucugugcauuggcuaucacgcgaauaacagcacggauaccguugacacaguguuggagaaaaauguaacugugacccauuccgucaacauauuagaagauaagcacaaugggaaacuguguaagcuaagaggaguggcuccccuccaucuggguaaaugcaacaucgccggcuggauucuugggaauccugagugugaaucucugucaacagcaaguagcugguccuacaucguugagaccucuucgucagacaacggaacuugcuauccaggcgauuuuauugacuacgaagaguugagggagcagcucagcaguguguccucuuucgaacgguuugagaucuucccgaagacaagcuccuggcccaaucacgauucaaacaagggugucaccgccgcuuguccucaugcaggggccaaaaguuuuuauaagaaucugauauggcuggugaaaaagggaaacagcuacccaaaacucucuaaguccuauaucaaugacaagggcaaagaaguauuaguucuguggggcauucaccaccccucaacgagcgcugaucaacagagucuuuaccagaacgccgacgcguacguguucgucgggucuucccgcuauagcaagaaauuuaagccugagaucgcaauucgaccaaaagugcgugaucaggagggaagaaugaauuacuauuggacuuugguggaacccggugacaagaucaccuucgaggccacaggcaaccuggucguuccuagguacgcuuuugccauggaacggaacgcagggucgggaauaauuaucucugauacuccagugcaugacugcaauaccacaugucaaaccccgaaaggcgcuauuaacacgucccuacccuuccagaauauccacccuaucacuauugguaagugcccaaaguauguaaaaucaacaaagcuccgccuggccaccgggcuuagaaacgugcccaguauacagagcaggggacuguuuggcgcgaucgccggcuucauugaagggggauggacugguauggucgacggcugguacggguaucaucaccagaaugaacaaggauccggcuacgcagcugauuugaaaucuacacagaacgccaucgacgagauaaccaauaaggugaacagcguuauugagaaaaugaauacgcaguuuaccgcuguggguaaggaguucaaccaccucgagaagcggaucgaaaaucugaacaaaaaggucgaugacggguucuuagauaucuggacauacaaugccgagcugcucgugcuucuggaaaacgagcgcacuuuggacuaucaugauucaaauguuaaaaaccuauacgagaagguacgaagucagcugaaaaacaaugcaaaggaaauuggcaacggauguuuugaguucuaucacaagugcgacaauaccuguauggaauccgugaaaaacggcacauacgauuauccuaaguacagcgaggaagccaaacucaauagagaggagaucgacggggucaagcuggaaucuacuaugauuuaucaaauacuugcuaucuacucaaccguggcgaguagccuggucuuggugguuucccucggagcaauuucuuuuuggaugugcucgaacgguagccugcagugcaggaucuguaucuga

SEQ ID NO: 135287 - RNA, 1701 nt, Artificial Sequence; identical to SEQ ID NO: 131070
  derived and/or modified CDS sequence (opt3) from hemagglutinin__InfluenzaA__AEO01134

SEQ ID NO: 135288 - RNA, 1701 nt, Artificial Sequence; identical to SEQ ID NO: 131070
  derived and/or modified CDS sequence (opt3) from hemagglutinin__InfluenzaA__AEO01135

SEQ ID NO: 135289 - RNA, 1701 nt, Artificial Sequence; identical to SEQ ID NO: 130717
  derived and/or modified CDS sequence (opt3) from hemagglutinin__InfluenzaA__AEO01136

SEQ ID NO: 135290 - RNA, 1701 nt, Artificial Sequence; identical to SEQ ID NO: 131164
  derived and/or modified CDS sequence (opt3) from hemagglutinin__InfluenzaA__AEO01137

SEQ ID NO: 135291 - RNA, 1701 nt, Artificial Sequence; identical to SEQ ID NO: 131164
  derived and/or modified CDS sequence (opt3) from hemagglutinin__InfluenzaA__AEO01138

SEQ ID NO: 135292 - RNA, 1701 nt, Artificial Sequence; identical to SEQ ID NO: 130717
  derived and/or modified CDS sequence (opt3) from hemagglutinin__InfluenzaA__AEO01139

SEQ ID NO: 135293 - RNA, 1701 nt, Artificial Sequence; identical to SEQ ID NO: 130717
  derived and/or modified CDS sequence (opt3) from hemagglutinin__InfluenzaA__AEO01140

SEQ ID NO: 135294 - RNA, 1701 nt, Artificial Sequence; identical to SEQ ID NO: 130717
  derived and/or modified CDS sequence (opt3) from hemagglutinin__InfluenzaA__AEO01141

SEQ ID NO: 135295 - RNA, 1701 nt, Artificial Sequence; identical to SEQ ID NO: 130717
  derived and/or modified CDS sequence (opt3) from hemagglutinin__InfluenzaA__AEO01142

SEQ ID NO: 135296 - RNA, 1701 nt, Artificial Sequence
  derived and/or modified CDS sequence (opt3) from hemagglutinin__InfluenzaA__AEO01144
augaaggccauccuggugguccuccuuuacaccuucgcuacagcaaacgccgacacucugugcauuggcuaucacgcgaauaacagcacggauaccguugacacaguguuggagaaaaauguaacugugacccauuccgucaacuuacuggaagauaagcacaaugggaaacuauguaagcucagaggaguggcuccccugcaucuugguaaaugcaacauagccggcuggauccuggggaauccugagugugaaucuuugucaacagcaaguagcugguccuacauuguugagaccucuaucucggacaacggaacuugcuauccaggcgauuuuauugacuacgaagaacucagggagcagcugucaagcgugaguuccuucgaacgguuugagaucuucccgaagacaucuagcuggcccaaucacgauuccaacaagggugucaccgccgcuuguccucaugcaggggccaaaggauuuuauaagaaucugauauggcucgugaaaaagggcaacucauacccaaaauuaaguaagagcuauaucaaugacaagggcaaagaaguacugguucuuugggggauucaccaccccucuacguccgcugaucaacagucauuguaccagaacgccgacgcguacguguucgucggaacuagccgcuauaguaagaaauuuaagccugagaucgcaauucgaccaaaagugcgugaucaggaggguagaaugaauuacuauuggacccugguggaacccggcgacaagaucacauucgaggccacugggaaccuagucguuccuagguacgcuuuugccauggaacggaacgcaggaucuggcauaauuaucuccgauaccccagugcaugacugcaauacaaccugucaaacgccgaaaggugcuauuaacacuagccuccccuuccagaauauccacccuaucacaauugggaagugcccaaaguauguaaaaucgaccaagcugcgccuugccacuggacugagaaacgugcccucuauacaguccaggggcuuguuuggcgcgaucgccggguucauugagggagguuggacaggcauggucgacgggugguacggauaucaucaccagaaugaacaaggcucagguuacgcagcugaucucaaaaguacccagaacgccaucgacgagauaacgaauaaggugaacagcguuauugagaaaaugaauacccaguuuacagcuguggggaaggaguucaaccaccuggagaagcggaucgaaaauuuaaacaaaaaggucgaugacggcuuccuggauaucuggacuuacaaugccgagcuccuugugcuguuggaaaacgagcgcacccuagacuaucaugauuccaauguaaagaaccuguacgagaagguucgaucucagcucaaaaacaaugcaaaggaaauuggaaacggcuguuuugaguucuaucacaagugcgacaauacauguauggaaagcgugaaaaacgggacuuacgauuauccuaaguacucagaggaagccaaacugaauagagaggagaucgacggagucaaacuugaaaguaccaggauuuaucaaauacuggcuaucuacuccacaguggcgagcucuuugguccucgugguuucacugggugcaauuaguuuuuggaugugcagcaacggcuccuuacagugccggaucuguaucuga

SEQ ID NO: 135297 - RNA, 1701 nt, Artificial Sequence; identical to SEQ ID NO: 130897
  derived and/or modified CDS sequence (opt3) from hemagglutinin__InfluenzaA__AEO01145

SEQ ID NO: 135298 - RNA, 1701 nt, Artificial Sequence
  derived and/or modified CDS sequence (opt3) from hemagglutinin__InfluenzaA__AEO01146
augaaggccauccuggugguccuccuuuacaccuucgcuacagcaaacgccgacacucugugcauuggcuaucacgcgaauaacagcacggauaccguugacacaguguuggagaaaaauguaacugugacccauuccgucaacuuacuggaagauaagcacaaugggaaacuauguaagcucagaggaguggcuccccugcaucuugguaaaugcaacauagccggcuggauccuggggaauccugagugugaaucuuugucaacagcaaguagcugguccuacauuguugagaccucuucgucagacaacggaacuugcuauccaggcgauuuuaucgacuacgaggagcucagggagcagcugagcaguguguccucuuucgaacgguuugagauuuucccgaagacaagcuccuggcccaaucacgauucaaacaagggugucaccgccgcuuguccucaugcaggggccaaaaguuuuuauaagaaucugaucuggcucgugaaaaagggaaacagcuacccaaaauuaucuaaguccuauauaaaugacaagggcaaagaaguacugguucuuuggggcauccaccaccccucaacgagcgcugaucaacagaguuuguaccagaacgccgacgcguacguguucgucgggacuucucgcuauuccaagaaauuuaauccugagauugcaauccgaccaaaggugcgugaucaggagggaagaaugaacuacuauuggacccugguggaacccggugacaaaauuacauucgaggccacuggcaaccuagucguuccuagguacgcuuuugccauggaacggaaugcagggagcggaaucauaauuucggauaccccagugcaugacugcaacacaaccugucaaacgccgaagggcgcuaucaauacuucucuccccuuccagaacauucacccuaucacaaucgguaaaugcccaaaguauguaaaguccaccaaacugcgccuugccacugggcugagaaaugugcccucaauucagaguaggggauuguuuggcgcgauagccggcuucaucgaagggggauggacagguauggucgacggcugguacggguaucaucaccagaacgaacaaggaagcggcuacgcagcugaucucaaguccacccagaaugccauugacgagaucacgaacaaaguuaauucugugauagagaagaugaacacccaguuuacagcuguggguaaagaguucaaucaccuggaaaagcggauugaaaacuuaaauaagaaagucgaugacggguuccuggauaucuggacuuacaacgccgagcuccuugugcuguuggaaaaugagcgcacccuagacuaucaugauagcaacguaaagaaccuguacgagaaaguucgaucacagcucaagaauaacgcaaaagaaaucggcaauggauguuuugaguucuaucacaagugcgacaacacauguauggaaagugugaagaauggcacuuacgauuauccuaaauacuccgaggaagccaagcugaacagagaggagauugacggggucaaacuugaaagcaccaggaucuaucaaauucuggcuauauacucuacaguggcgucaaguuugguccucgugguuagccugggagcaaucuccuuuuggaugugcucuaaugguucguuacagugccggauuuguaucuga

SEQ ID NO: 135299 - RNA, 1701 nt, Artificial Sequence; identical to SEQ ID NO: 130717
  derived and/or modified CDS sequence (opt3) from hemagglutinin__InfluenzaA__AEO01147

SEQ ID NO: 135300 - RNA, 1701 nt, Artificial Sequence; identical to SEQ ID NO: 131070
  derived and/or modified CDS sequence (opt3) from hemagglutinin__InfluenzaA__AEO01148

SEQ ID NO: 135301 - RNA, 1701 nt, Artificial Sequence; identical to SEQ ID NO: 131070
  derived and/or modified CDS sequence (opt3) from hemagglutinin__InfluenzaA__AEO01149

SEQ ID NO: 135302 - RNA, 1701 nt, Artificial Sequence; identical to SEQ ID NO: 133924
  derived and/or modified CDS sequence (opt3) from hemagglutinin__InfluenzaA__AEO01150

SEQ ID NO: 135303 - RNA, 1701 nt, Artificial Sequence; identical to SEQ ID NO: 130717
  derived and/or modified CDS sequence (opt3) from hemagglutinin__InfluenzaA__AEO01151

SEQ ID NO: 135304 - RNA, 1701 nt, Artificial Sequence
  derived and/or modified CDS sequence (opt3) from hemagglutinin__InfluenzaA__AEO01152
augaaggccauccugauugugcuccuuuacaccuucgcuacagcaaacgccgacacucugugcauaggcuaucacgcgaauaacagcacggauaccgucgacacaguuuuggagaagaaugugacuguaacccauuccgugaacuuacuggaagauaagcacaaugggaaacuauguaagcucagaggagucgcuccccugcaucuugguaaaugcaacaucgccggcuggauucuggggaauccugagugugaaucuuugucaacagcaaguagcugguccuacaucguggagaccucuucgucagacaacggaacuugcuauccaggcgauuuuauugacuacgaagaacucagggagcagcugagcaguguuuccucuuucgaacgguuugagaucuucccgaagacaagcuccuggcccaaucacgauucaaacaagggugugaccgccgcuuguccucaugcaggggccaaaaguuuuuauaagaaucugauauggcucgucaaaaagggaaacagcuacccaaaauuaucuaaguccuauaucaaugacaagggcaaagaagugcugguacuuuggggcauucaccaccccucaacgagcgcugaucaacagaguuuguaccagaacgccgacgcguacguuuucguggggacuucucgcuauuccaagaaauuuaagccugagaucgcaauucgaccaaaaguccguggacaggaggguagaaugaauuacuauuggacccugguggaacccggcgauaagaucacauucgaggccacugggaaccuaguggucccuagguacgcuuuugccauggaacggaacgcaggaagcggcauaauuaucucggacaccccaguucaugauugcaauacaaccugucaaacgccgaaaggugcuauuaacacuucucuccccuuccagaauauccacccuaucacaauugggaagugcccaaaguaugugaaauccaccaagcugcgccuugccacuggacugagaaacguacccucaauacagaguaggggcuuguuuggcgcgaucgccggguucauugagggagguuggacaggcaugguggacgggugguacggauaucaucaccagaaugaacaaggcagcgguuacgcagcugaccucaaauccacccagaacgccaucgaugagauaacgaauaaggucaacucugugauugagaaaaugaauacccaguuuacagcuguugggaaggaguucaaccaccuggagaagcggaucgaaaauuuaaacaaaaagguggacgauggcuuccuggacaucuggacuuacaaugccgagcuccuuguccuguuggaaaacgagcgcacccuagauuaucaugacagcaaugugaaaaaccuguacgagaagguacgaucacagcucaaaaacaaugcaaaggaaauuggaaacggcuguuuugaguucuaucacaagugcgauaauacauguauggaaaguguuaaaaacgggacuuacgacuauccuaaguacuccgaggaagccaaacugaauagagaggagaucgauggagugaaacuugaaagcaccaggauuuaucaaauacuggcuaucuacucuacagucgcgucaaguuuggugcucgucgugagccugggugcaauuuccuuuuggaugugcucuaacggcucguuacagugccggaucuguaucuga

SEQ ID NO: 135305 - RNA, 1701 nt, Artificial Sequence
  derived and/or modified CDS sequence (opt3) from hemagglutinin__InfluenzaA__AEO01153
augaaggccauccuggugguccuccuuuacaccuucgcuacagcaaacgccgacacucugugcauuggcuaucacgcgaauaacagcacggauaccguugacacaguguuggagaaaaauguaacugugacccauuccgucaacuuacuggaagauaagcacaaugggaaacuauguaagcucagaggaguggcuccccugcaucuugguaaaugcaacauagccggcuggauccuggggaauccugagugugaaucuuugucaacagcaaguagcugguccuacauuguugagaccucuucgucagacaacggaacuugcuauccaggcgauuuuaucgacuacgaggagcucagggagcagcugagcaguguguccucuuucgaacgguuugagauuuucccgaagacaagcuccuggcccaaucacgauucaaacaagggugucaccgccgcuuguccucaugcaggggccaaaaguuuuuauaagaaucugaucuggcucgugaaaaagggaaacagcuacccaaaauuaucuaaguccuauauaaauaacaagggcaaagaaguacugguucuuuggggcauccaccaccccucaacgagcgcugaccaacagaguuuguaccagaaugccgaugcguacguguucgucgggacuucucgcuauuccaagaaauuuaagccugagauugcaauccgaccaaaagugcgugaccaggagggaagaaugaacuacuauuggacccugguggaacccggugauaagauuacauucgaggccacuggcaaccuagucguuccuagguacgcuuuugccauggaacggaaugcagggagcggaaucauaauuucgaacaccccagugcaugacugcaauacaaccugucaaacgccgaaaggcgcuaucaacacuucucuccccuuccagaauauucacccuaucacaaucgguaagugcccaaaguauguaaaauccaccaagcugcgccuugccacugggcugagaaacgugcccucaauucagaguaggggauuguuuggcgcgauagccggcuucaucgaagggggauggacagguauggucgauggcugguacggguaucaucaccagaaugaacaaggaagcggcuacgcagcugaccucaaauccacccagaacgccauugacgagaucacgaauaaggugaacucuguuauagagaaaaugaauacccaguuuacagcuguggguaaggaguucaaccaccuggaaaagcggauugaaaauuuaaacaaaaaggucgaugacggguuccuggauaucuggacuuacaaugccgagcuccuugugcuguuggaaaacgagcgcacccuagacuaucaugauagcaacguaaagaaucuguacgagaagguucgaucacagcucaaaaacaaugcaaaggaaaucggcaacggauguuuugaguucuaucacaagugcgacaauacauguauggaaagugugaaaaacggcacuuacgauuauccuaaguacuccgaggaagccaaacugaauagagaggagauugacggggucaaacuugaaagcaccaggaucuaucaaauucuggcuauauacucuacaguggcgucaaguuugguccucgugguuagccugggagcaaucuccuuuuggaugugcucuaacgguucguuacagugccggauuuguaucuga

SEQ ID NO: 135306 - RNA, 1701 nt, Artificial Sequence; identical to SEQ ID NO: 130717
  derived and/or modified CDS sequence (opt3) from hemagglutinin__InfluenzaA__AEO01154

SEQ ID NO: 135307 - RNA, 1701 nt, Artificial Sequence; identical to SEQ ID NO: 131070
  derived and/or modified CDS sequence (opt3) from hemagglutinin__InfluenzaA__AEO01155

SEQ ID NO: 135308 - RNA, 1701 nt, Artificial Sequence; identical to SEQ ID NO: 131070
  derived and/or modified CDS sequence (opt3) from hemagglutinin__InfluenzaA__AEO01156

SEQ ID NO: 135309 - RNA, 1701 nt, Artificial Sequence; identical to SEQ ID NO: 130717
  derived and/or modified CDS sequence (opt3) from hemagglutinin__InfluenzaA__AEO01157

SEQ ID NO: 135310 - RNA, 1701 nt, Artificial Sequence; identical to SEQ ID NO: 130717
  derived and/or modified CDS sequence (opt3) from hemagglutinin__InfluenzaA__AEO01158

SEQ ID NO: 135311 - RNA, 1701 nt, Artificial Sequence; identical to SEQ ID NO: 130717
  derived and/or modified CDS sequence (opt3) from hemagglutinin__InfluenzaA__AEO01159

SEQ ID NO: 135312 - RNA, 1701 nt, Artificial Sequence
  derived and/or modified CDS sequence (opt3) from hemagglutinin__InfluenzaA__AEO01160
augaaggccauccugguggcucuccuuuacaccuucgcaacagccaacgcggacacucugugcauuggcuaucacgcuaauaacagcacggauaccgucgacacaguuuuggagaaaaaugugacuguaacccauuccgugaacuuacuggaagauaagcacaaugggaaacuauguaagcucagaggagucgcaccccugcaucuugguaaaugcaacauagccggcuggauccuggggaauccugagugugaaucuuugucaacagccaguagcugguccuacauuguggagaccucuucgucagacaacggaacuugcuauccaggcgauuuuaucgacuacgaagaacucagggagcagcugagcaguguuuccucuuucgaacgguuugagauuuucccgaagacaagcuccuggcccaaucacgauucaaacaagggugugaccgcugcauguccucaugccggggcuaaaaguuuuuauaagaaucugaucuggcucgucaaaaagggaaacagcuacccaaaauuaucuaaguccuauauaaaugacaagggcaaagaagugcugguacuuuggggcauccaccaccccucaacgagcgccgaucaacagaguuuguaccagaacgcggacgcauacguuuucguggggacuucucgcuauuccaagaaauuuaagccugagauugccauccgaccaaaaguccgugagcaggaaggaagaaugaauuacuauuggacccugguggagcccggugauaagauuacauucgaagcuacuggcaaccuaguggucccuagguacgccuuugcaauggagcggaacgcugggagcggaaucauaauuucggacaccccaguucaugauugcaauacaaccugucaaacgccgaaaggcgccaucaacacuucucuccccuuccagaauauucacccuaucacaaucgguaagugcccaaaguaugugaaauccaccaagcugcgccuugcgacugggcugagaaacguacccucaauucagaguaggggauuguuuggcgccauagcaggcuucaucgaagggggauggacagguaugguggacggcugguacggguaucaucaccagaaugagcaaggaagcggcuacgcugccgaccucaaauccacccagaacgcuauugaugagaucacgaauaaggucaacucugugauagaaaagaugaauacccaguuuacagccguugguaaggaguucaaccaccuggaaaagcggauugagaauuuaaacaaaaagguggacgauggguuccuggacaucuggacuuacaaugcagaacuccuuguccuguuggagaacgagcgcacccuagauuaucaugacagcaaugugaaaaaccuguacgaaaagguacgaucacagcucaaaaacaaugccaaggagaucggcaacggauguuuugaguucuaucacaagugcgauaauacauguauggagaguguuaaaaacggcacuuacgacuauccuaaguacuccgaagaggcuaaacugaauagagaggaaauugauggggugaaacuugagagcaccaggaucuaucaaauucuggcgauauacucuacagucgcaucaaguuuggugcucgucgugagccugggagccaucuccuuuuggaugugcucuaacgguucguuacagugccggauuuguaucuga

SEQ ID NO: 135313 - RNA, 1701 nt, Artificial Sequence; identical to SEQ ID NO: 130717
  derived and/or modified CDS sequence (opt3) from hemagglutinin__InfluenzaA__AEO01161

SEQ ID NO: 135314 - RNA, 1701 nt, Artificial Sequence; identical to SEQ ID NO: 131070
  derived and/or modified CDS sequence (opt3) from hemagglutinin__InfluenzaA__AEO01162

SEQ ID NO: 135315 - RNA, 1701 nt, Artificial Sequence; identical to SEQ ID NO: 131070
  derived and/or modified CDS sequence (opt3) from hemagglutinin__InfluenzaA__AEO01163

SEQ ID NO: 135316 - RNA, 1701 nt, Artificial Sequence; identical to SEQ ID NO: 131070
  derived and/or modified CDS sequence (opt3) from hemagglutinin__InfluenzaA__AEO01164

SEQ ID NO: 135317 - RNA, 1701 nt, Artificial Sequence
  derived and/or modified CDS sequence (opt3) from hemagglutinin__InfluenzaA__AEO01165
augaaggccauccuggugguccuccuuuacaccuucgcuacagcaaacgccgacacucugugcauuggcuaucacgcgaauaacagcacggauaccguugacacaguguuggagaaaaauguaacugugacccauuccgucaacuuacuggaagauaagcacaaugggaaacuauguaagcucagaggaguggcuccccugcaucuugguaaaugcaacauagccggcuggauccuggggaauccugagugugaaucuuugucaacagcaaguagcugguccuacauuguugagaccucuucgucagacaacggaacuugcuauccaggcgauuuuaucgacuacgaggagcucagggagcagcugagcaguguguccucuuucgaacgguuugagauuuucccgaagacaagcuccuggcccaaucacgauucaaacaagggugucaccgccgcuuguccucaugcaggggccaaaaguuuuuauaagaaucugaucuggcucgugaaaaagggaaacagcuacccaaaauucucuaaguccuauauaaaugacaagggcaaagaaguauuaguucuguggggcauccaccaccccucaacgagcgcugaucaacagagucuuuaccagaacgccgacgcguacguguuugucgggacuucucgcuauuccaagaaauucaagccugagauugcaauccgaccaaaagugcgugaucaggagggaagaaugaauuacuauuggaccuugguggaacccggugacaagauuacauuugaggccacuggcaaccuggucguuccuagguacgcuuucgccauggaacggaacgcagggagcggaaucauaauuucggauaccccagugcaugacugcaauacaaccugucaaacgccgaaaggcgcuaucaacacuucucuacccuuucagaauauucacccuaucacaaucgguaagugcccaaaguauguaaaauccaccaagcuccgccuggccacugggcuuagaaacgugcccucaauucagaguaggggacuguucggcgcgauagccggcuuuaucgaagggggauggacagguauggucgacggcugguacggguaucaucaccagaaugaacaaggaagcggcuacgcagcugauuugaaauccacccagaacgccauugacgagaucacgaauaaggugaacucuguuauagagaaaaugaauacccaguucacagcuguggguaaggaguucaaccaccucgaaaagcggauugaaaaucugaacaaaaaggucgaugacggguuuuuagauaucuggacuuacaaugccgagcugcucgugcuucuggaaaacgagcgcaccuuggacuaucaugauagcaauguuaaaaaccuauacgagaagguacgaucacagcugaaaaacaaugcaaaggaaaucggcaacggauguuucgaguuuuaucacaagugcgacaauacauguauggaaagugugaaaaacggcacuuacgauuauccuaaguacuccgaggaagccaaacucaauagagaggagauugacggggucaagcuggaaagcaccaggaucuaucaaauucuugcuauauacucuacaguggcgucaagucuggucuuggugguuagccucggagcaaucuccuucuggaugugcucuaacgguucgcugcagugccggauuuguaucuga

SEQ ID NO: 135318 - RNA, 1701 nt, Artificial Sequence; identical to SEQ ID NO: 131070
  derived and/or modified CDS sequence (opt3) from hemagglutinin__InfluenzaA__AEO01166

SEQ ID NO: 135319 - RNA, 1701 nt, Artificial Sequence
  derived and/or modified CDS sequence (opt3) from hemagglutinin__InfluenzaA__AEO01167
augaaggccauccuggugguccuccuuuacaccuucgcuacagcaaacgccgacacucugugcauuggcuaucacgcgaauaacagcacggauaccguugacacaguguuggagaaaaauguaacugugacccauuccgucaacuuacuggaagauaagcacaaugggaaacuauguaagcucagaggaguggcuccccugcaucuugguaaaugcaacauagccggcuggauccuggggaauccugagugugaaucuuugucaacagcaaguagcugguccuacauuguugagaccucuucgucagacaacggaacuugcuauccaggcgauuuuaucgacuacgaagaacucagggagcagcugagcaguguguccucuuucgaacgguuugagauuuucccgaagacaagcuccuggcccaaucacgauucaaacaagggugucaccgccgcuuguccucaugcaggggccaaaaguuuuuauaagaaucugaucuggcucgugaaaaagggaaacagcuacccaaaauuaucuaaguccuauauaaaugacaagggcaaagaaguacugguucuuuggggcauccaccaccccucaacgagcgcugaucaacagaguuuguaccagaacgccgacgcguacguguucgucgggacuucucgcuauuccaagaaauuuaagccugagauugcaauccgaccaaaagugcgugagcaggaaggaagaaugaauuacuauuggacccugguggagcccggugauaagauuacauucgaagccacuggcaaccuagucguuccuagguacgcuuuugccauggagcggaacgcagggagcggaaucauaauuucggacaccucugugcaugauugcaauacaaccugucaaacgccaaaaggcgcuaucaacacuucccucccguuccagaauauucaccccaucacaaucgguaagugcccuaaguauguaaaaucaaccaagcugcgccuugccacugggcugagaaacgugccaaguauucagagcaggggauuguuuggcgcgauagccggcuucaucgaagggggauggacagguauggucgacggcugguacggguaucaucaccagaaugagcaaggauccggcuacgcagcugaccucaaaucuacccagaacgccauugaugagaucacgaauaaggugaacagcguuauagaaaagaugaauacccaguuuacagcuguggguaaggaguucaaccaccuggaaaagcggauugagaauuuaaacaaaaaggucgacgauggguuccuggacaucuggacuuacaaugccgaacuccuugugcuguuggagaacgagcgcacccuagauuaucaugacucaaauguuaaaaaccuguacgaaaagguacgaagucagcucaaaaacaaugcaaaggagaucggcaacggauguuuugaguucuaucacaagugcgauaauacauguauggaguccgugaaaaacggcacuuacgacuaucccaaguacagcgaagaggccaaacugaauagagaggaaauugauggggucaaacuugagucuaccaggaucuaucaaauucuggcuauauacucaacaguggcgaguagcuugguccucgugguuucccugggagcaaucucuuuuuggaugugcucgaacgguagcuuacagugccggauuuguaucuga

SEQ ID NO: 135320 - RNA, 1701 nt, Artificial Sequence; identical to SEQ ID NO: 130717
  derived and/or modified CDS sequence (opt3) from hemagglutinin__InfluenzaA__AEO01168

SEQ ID NO: 135321 - RNA, 1701 nt, Artificial Sequence; identical to SEQ ID NO: 131070
  derived and/or modified CDS sequence (opt3) from hemagglutinin__InfluenzaA__AEO01169

SEQ ID NO: 135322 - RNA, 1701 nt, Artificial Sequence; identical to SEQ ID NO: 131070
  derived and/or modified CDS sequence (opt3) from hemagglutinin__InfluenzaA__AEO01170

SEQ ID NO: 135323 - RNA, 1701 nt, Artificial Sequence; identical to SEQ ID NO: 131070
  derived and/or modified CDS sequence (opt3) from hemagglutinin__InfluenzaA__AEO01171

SEQ ID NO: 135324 - RNA, 1701 nt, Artificial Sequence; identical to SEQ ID NO: 130717
  derived and/or modified CDS sequence (opt3) from hemagglutinin__InfluenzaA__AEO01172

SEQ ID NO: 135325 - RNA, 1701 nt, Artificial Sequence
  derived and/or modified CDS sequence (opt3) from hemagglutinin__InfluenzaA__AEO01173
augaaggccauccuggugguccuccuuuacaccuucgcuacagcaaacgccgacacucugugcauuggcuaucacgcgaauaacagcacggauaccguugacacaguguuggagaaaaauguaacugugacccauuccgucaacuuacuggaagauaagcacaaugggaaacuauguaagcucagaggaguggcuccccugcaucuugguaaaugcaacauagccggcuggauccuggggaauccugagugugaaucuuugucaacagcaaguagcugguccuacauuguugagaccucuucgucagacaacggaacuugcuauccaggcgauuuuaucgacuacgaagaacucagggagcagcugagcaguguguccucuuucgaacgguuugagauuuucccgaagacaagcuccuggcccaaucacgauucaaacaagggugucaccgccgcuuguccucaugcaggggccaaaaguuuuuauaagaaucugaucuggcucgugaaaaagggaaacagcuacccaaaauuaucuaaguccuauauaaaugacaagggcaaagaaguacugguucuuuggggcauccaccaccccucaacgagcgcugaucaacagaguuuguaccagaacgccgacgcguacguguucgucgggacuucucgcuauuccaagaaauuuaagccugagauugcaauccgaccaaaagugcgugaucaggagggaagaaugaauuacuauuggacccugguggaacccgguggcaagauuacauucgaggccacugggaaccuagucguuccuagguacgcuuuugccauggaacggaacgcaggaagcggcaucauaauuucggacaccccagugcaugauugcaauacaaccugucaaacgccgaaaggugcuaucaacacuucucuccccuuccagaauauucacccuaucacaaucgggaagugcccaaaguauguaaaauccaccaagcugcgccuugccacuggacugagaaacgugcccucaauucagaguaggggcuuguuuggcgcgauagccggguucaucgagggagguuggacaggcauggucgacgggugguacggauaucaucaccagaaugaacaaggcagcgguuacgcagcugaccucaaauccacccagaacgccauugaugagaucacgaauaaggugaacucuguuauagagaaaaugaauacccaguuuacagcuguggggaaggaguucaaccaccuggagaagcggauugaaaauuuaaacaaaaaggucgacgauggcuuccuggacaucuggacuuacaaugccgagcuccuugugcuguuggaaaacgagcgcacccuagauuaucaugacagcaauguaaagaaccuguacgagaagguucgaucacagcucaaaaacaaugcaaaggaaaucggaaacggcuguuuugaguucuaucacaagugcgauaauacauguauggaaagugugaaaaacgggacuuacgacuauccuaaguacuccgaggaagccaaacugaauagagaggagauugauggagucaaacuugaaagcaccaggaucuaucaaauucuggcuauauacucuacaguggcgucaaguuugguccucgugguuagccugggugcaaucuccuuuuggaugugcucuaacggcucguuacagugccggauuuguaucuga

SEQ ID NO: 135326 - RNA, 1701 nt, Artificial Sequence
  derived and/or modified CDS sequence (opt3) from hemagglutinin__InfluenzaA__AEO01174
augaaggccauccuggugguccuccuuuacaccuucgcuacagcaaacgccgacacucugugcauuggcuaucacgcgaauaacagcacggauaccguugacacaguguuggagaaaaauguaacugugacccauuccgucaacuuacuggaagauaagcacaaugggaaacuauguaagcucagaggaguggcuccccugcaucuugguaaaugcaacauagccggcuggauccuggggaauccugagugugaaucuuugucaacagcaaguagcugguccuacauuguugagaccucuucgucaggaaacggcacuugcuauccaggugacuuuaucgauuacgaagaacucagggagcagcugagcaguguguccucuuucgaacgguuugagauuuucccgaagacaagcuccuggcccaaucacgacucaaacaagggggucaccgccgcuuguccucaugcaggagccaaaaguuuuuauaagaaucugaucuggcucgugaaaaagggcaacagcuacccaaaauuaucuaaguccuauauaaaugauaagggcaaagaaguacugguucuuugggggauccaccaccccucaacgagcgcugaccaacagaguuuguaccagaacgccgaugcguacguguucgucggaacuucucgcuauuccaagaaauuuaagccugagauugcaauccgaccaaaagugcgugagcaggaagguagaaugaauuacuauuggacccugguggagcccggcgacaagauuacauucgaagccacugggaaccuagucguuccuagguacgcuuuugccauggagcggaacgcaggaagcggcaucauaauuucggauaccccagugcaugacugcaauacaaccugucaaacgccgaaaggugcuaucaacacuucucuccccuuccagaauauucacccuaucacaaucgggaagugcccaaaguauguaaaauccaccaagcugcgccuugccacuggacugagaaacgugcccucaauucagaguaggggcuuguuuggcgcgauagccggguucaucgaaggagguuggacaggcauggucgaugggugguacggauaucaucaccagaaugagcaaggcagcgguuacgcagcugaccucaaauccacccagaacgccauugacgagaucacgaauaaggugaacucuguuauagaaaagaugaauacccaguuuacagcuguggggaaggaguucaaccaccuggaaaagcggauugagaauuuaaacaaaaaggucgaugacggcuuccuggauaucuggacuuacaaugccgaacuccuugugcuguuggagaacgagcgcacccuagacuaucaugauagcaauguuaaaaaccuguacgaaaagguacgaucacagcucaaaaacaaugcaaaggagaucggaaacggcuguuuugaguucuaucacaagugcgacaauacauguauggagagugugaaaaacgggacuuacgauuauccuaaguacuccgaagaggccaaacugaauagagaggaaauugacggagucaaacuugagagcaccaggaucuaucaaauucuggcuauauacucuacaguggcgucaaguuugguccucgugguuagccugggugcaaucuccuuuuggaugugcucuaacggcucguuacagugccggauuuguaucuga

SEQ ID NO: 135327 - RNA, 1701 nt, Artificial Sequence; identical to SEQ ID NO: 130717
  derived and/or modified CDS sequence (opt3) from hemagglutinin__InfluenzaA__AEO01176

SEQ ID NO: 135328 - RNA, 1701 nt, Artificial Sequence; identical to SEQ ID NO: 130717
  derived and/or modified CDS sequence (opt3) from hemagglutinin__InfluenzaA__AEO01177

SEQ ID NO: 135329 - RNA, 1701 nt, Artificial Sequence; identical to SEQ ID NO: 131070
  derived and/or modified CDS sequence (opt3) from hemagglutinin__InfluenzaA__AEO01179

SEQ ID NO: 135330 - RNA, 1701 nt, Artificial Sequence; identical to SEQ ID NO: 131070
  derived and/or modified CDS sequence (opt3) from hemagglutinin__InfluenzaA__AEO01180

SEQ ID NO: 135331 - RNA, 1701 nt, Artificial Sequence; identical to SEQ ID NO: 131070
  derived and/or modified CDS sequence (opt3) from hemagglutinin__InfluenzaA__AEO01181

SEQ ID NO: 135332 - RNA, 1701 nt, Artificial Sequence; identical to SEQ ID NO: 131070
  derived and/or modified CDS sequence (opt3) from hemagglutinin__InfluenzaA__AEO01182

SEQ ID NO: 135333 - RNA, 1701 nt, Artificial Sequence; identical to SEQ ID NO: 130717
  derived and/or modified CDS sequence (opt3) from hemagglutinin__InfluenzaA__AEO01183

SEQ ID NO: 135334 - RNA, 1701 nt, Artificial Sequence; identical to SEQ ID NO: 131070
  derived and/or modified CDS sequence (opt3) from hemagglutinin__InfluenzaA__AEO01184

SEQ ID NO: 135335 - RNA, 1701 nt, Artificial Sequence; identical to SEQ ID NO: 130717
  derived and/or modified CDS sequence (opt3) from hemagglutinin__InfluenzaA__AEO01185

SEQ ID NO: 135336 - RNA, 1701 nt, Artificial Sequence; identical to SEQ ID NO: 130717
  derived and/or modified CDS sequence (opt3) from hemagglutinin__InfluenzaA__AEO01186

SEQ ID NO: 135337 - RNA, 1701 nt, Artificial Sequence; identical to SEQ ID NO: 130717
  derived and/or modified CDS sequence (opt3) from hemagglutinin__InfluenzaA__AEO01187

SEQ ID NO: 135338 - RNA, 1701 nt, Artificial Sequence; identical to SEQ ID NO: 130717
  derived and/or modified CDS sequence (opt3) from hemagglutinin__InfluenzaA__AEO01188

SEQ ID NO: 135339 - RNA, 1701 nt, Artificial Sequence; identical to SEQ ID NO: 130717
  derived and/or modified CDS sequence (opt3) from hemagglutinin__InfluenzaA__AEO01189

SEQ ID NO: 135340 - RNA, 1701 nt, Artificial Sequence; identical to SEQ ID NO: 130717
  derived and/or modified CDS sequence (opt3) from hemagglutinin__InfluenzaA__AEO01191

SEQ ID NO: 135341 - RNA, 1701 nt, Artificial Sequence; identical to SEQ ID NO: 130717
  derived and/or modified CDS sequence (opt3) from hemagglutinin__InfluenzaA__AEO01192

SEQ ID NO: 135342 - RNA, 1701 nt, Artificial Sequence; identical to SEQ ID NO: 132031
  derived and/or modified CDS sequence (opt3) from hemagglutinin__InfluenzaA__AEO01193

SEQ ID NO: 135343 - RNA, 1701 nt, Artificial Sequence; identical to SEQ ID NO: 131070
  derived and/or modified CDS sequence (opt3) from hemagglutinin__InfluenzaA__AEO01194

SEQ ID NO: 135344 - RNA, 1701 nt, Artificial Sequence; identical to SEQ ID NO: 131070
  derived and/or modified CDS sequence (opt3) from hemagglutinin__InfluenzaA__AEO01195

SEQ ID NO: 135345 - RNA, 1701 nt, Artificial Sequence; identical to SEQ ID NO: 130717
  derived and/or modified CDS sequence (opt3) from hemagglutinin__InfluenzaA__AEO01196

SEQ ID NO: 135346 - RNA, 1701 nt, Artificial Sequence; identical to SEQ ID NO: 130717
  derived and/or modified CDS sequence (opt3) from hemagglutinin__InfluenzaA__AEO01197

SEQ ID NO: 135347 - RNA, 1701 nt, Artificial Sequence; identical to SEQ ID NO: 131070
  derived and/or modified CDS sequence (opt3) from hemagglutinin__InfluenzaA__AEO01198

SEQ ID NO: 135348 - RNA, 1701 nt, Artificial Sequence; identical to SEQ ID NO: 131583
  derived and/or modified CDS sequence (opt3) from hemagglutinin__InfluenzaA__AEO01200

SEQ ID NO: 135349 - RNA, 1701 nt, Artificial Sequence
  derived and/or modified CDS sequence (opt3) from hemagglutinin__InfluenzaA__AEO01201
augaaggccauccuggugguccuccuuuacaccuucgcuacagcaaacgccgacacucugugcauuggcuaucacgcgaauaacagcacggauaccguugacacaguguuggagaaaaauguaacugugacccauuccgucaacuuacuggaagagaagcacaaugggaaacuauguaagcucagaggaguggcuccccugcaucuugguaaaugcaacauagccggcuggauccuggggaauccugaaugugagucuuugucaacagcaaguagcugguccuacauuguugaaaccucuucgucagauaacggaacuugcuauccaggcgacuuuaucgauuacgaggagcucagggaacagcugagcaguguguccucuuucgagcgguuugaaauuuucccgaagacaagcuccuggcccaaucacgacucaaacaagggugucaccgccgcuuguccucaugcaggggccaaaaguuuuuauaagaaucugaucuggcucgugaaaaagggaaacagcuacccaaaauuaucuaaguccuauauaaaugauaagggcaaagagguacugguucuuuggggcauccaccaccccucaacgagcgcugaccaacagaguuuguaccagaacgccgaugcguacguguucgucgggacuucucgcuauuccaagaaauuuaagccugagauugcaauccgaccaaaagugcgugaacaggagggaagaaugaauuacuauuggacccugguggaacccggugacaagauuacauucgaggccacuggcaaccuagucguuccuagguacgcuuuugccauggaacggaacgcagggagcggaaucauaauuucggauaccccagugcaugacugcaauacaaccugucaaacgccgaaaggcgcuaucaacacuucucuccccuuccagaauauucacccuaucacaaucgguaagugcccaaaguauguaaaauccaccaagcugcgccuugccacugggcugagaaacgugcccucaauucagaguaggggauuguuuggcgcgauagccggcuucaucgaagggggauggacagguauggucgauggcugguacggguaucaucaccagaaugagcaaggaagcggcuacgcagcugaccucaaauccacccagaacgccauugacgaaaucacgaauaaggugaacucuguuauagagaaaaugaauacccaguuuacagcuguggguaaggaguucaaccaccuggagaagcggauugaaaauuuaaacaaaaaggucgaugacggguuccuggauaucuggacuuacaaugccgagcuccuugugcuguuggagaacgaacgcacccuagacuaucaugauagcaauguaaagaaccuguacgagaagguucgaucacagcucaaaaacaaugcaaaggaaaucggcaacggauguuuugaguucuaucacaagugcgacaauacauguauggaaagugugaaaaacggcacuuacgauuauccuaaguacuccgaggaggccaaacugaauagagaagagauugacggggucaaacuugaaagcaccaggaucuaucaaauucuggcuauauacucuacaguggcgucaaguuugguccucgugguuagccugggagcaaucuccuuuuggaugugcucuaacgguucguuacagugccggauuuguaucuga

SEQ ID NO: 135350 - RNA, 1701 nt, Artificial Sequence; identical to SEQ ID NO: 130717
  derived and/or modified CDS sequence (opt3) from hemagglutinin__InfluenzaA__AEO01202

SEQ ID NO: 135351 - RNA, 1701 nt, Artificial Sequence; identical to SEQ ID NO: 132353
  derived and/or modified CDS sequence (opt3) from hemagglutinin__InfluenzaA__AEO01203

SEQ ID NO: 135352 - RNA, 1701 nt, Artificial Sequence; identical to SEQ ID NO: 130717
  derived and/or modified CDS sequence (opt3) from hemagglutinin__InfluenzaA__AEO01204

SEQ ID NO: 135353 - RNA, 1701 nt, Artificial Sequence; identical to SEQ ID NO: 130717
  derived and/or modified CDS sequence (opt3) from hemagglutinin__InfluenzaA__AEO01205

SEQ ID NO: 135354 - RNA, 1701 nt, Artificial Sequence; identical to SEQ ID NO: 130717
  derived and/or modified CDS sequence (opt3) from hemagglutinin__InfluenzaA__AEO01206

SEQ ID NO: 135355 - RNA, 1701 nt, Artificial Sequence; identical to SEQ ID NO: 130717
  derived and/or modified CDS sequence (opt3) from hemagglutinin__InfluenzaA__AEO01207

SEQ ID NO: 135356 - RNA, 1701 nt, Artificial Sequence; identical to SEQ ID NO: 130717
  derived and/or modified CDS sequence (opt3) from hemagglutinin__InfluenzaA__AEO01208

SEQ ID NO: 135357 - RNA, 1701 nt, Artificial Sequence; identical to SEQ ID NO: 131070
  derived and/or modified CDS sequence (opt3) from hemagglutinin__InfluenzaA__AEO01209

SEQ ID NO: 135358 - RNA, 1701 nt, Artificial Sequence; identical to SEQ ID NO: 130717
  derived and/or modified CDS sequence (opt3) from hemagglutinin__InfluenzaA__AEO01210

SEQ ID NO: 135359 - RNA, 1701 nt, Artificial Sequence; identical to SEQ ID NO: 131070
  derived and/or modified CDS sequence (opt3) from hemagglutinin__InfluenzaA__AEO01211

SEQ ID NO: 135360 - RNA, 1701 nt, Artificial Sequence; identical to SEQ ID NO: 130717
  derived and/or modified CDS sequence (opt3) from hemagglutinin__InfluenzaA__AEO01212

SEQ ID NO: 135361 - RNA, 1701 nt, Artificial Sequence; identical to SEQ ID NO: 130717
  derived and/or modified CDS sequence (opt3) from hemagglutinin__InfluenzaA__AEO01213

SEQ ID NO: 135362 - RNA, 1701 nt, Artificial Sequence
  derived and/or modified CDS sequence (opt3) from hemagglutinin__InfluenzaA__AEO01214
augaaggccauccuggugguccuccuuuacaccuucgcuacagcaaacgccgacacucugugcauuggcuaucacgcgaauaacagcacggauaccguugacacaguguuggagaagaauguaacugugacccauuccgucaacuuacuggaagauaagcacaaugggaaacuauguaagcucagaggaguggcuccccugcaucuugguaaaugcaacauagccggcuggauccuggggaauccugagugugaaucuuugucaacagcaaguagcugguccuacauuguugagaccucuucgucagacaacggaacuugcuauccaggcgauuuuaucgacuacgaggagcucagggagcagcugagcaguguguccucuuucgaacgguuugagauuuucccgaagacaagcuccuggcccaaucacgauucaaacaagggugucaccgccgcuuguccucaugcaggggccaaaaguuuuuauaagaaucugaucuggcucgugaaaaagggaaacagcuacccaaaauuaucuaaguccuauauaaaugacaagggcaaagaaguacugguucuuuggggcauccaccaccccucaacgagcgcugaucaacagaguuuguaccagaacgccgacgcguacguguucgucgggacuucucgcuauuccaagaaauuuaagccugagauugcaauccgaccaaaagugcgugaucaggagggaagaaugaauuacuauuggacccugguggaacccggugacaagauuacauucgaggccacuggcaaccuagucgcuccuagguacgccuuugcaauggaacggaacgcugggagcggaaucauaauuucggauaccccaguucaugacugcaauacaaccugucaaacgccgaaaggcgccaucaacacuucucuccccuuccagaauauucacccuaucacaaucgguaagugcccaaaguaugugaaauccaccaagcugcgccuugcgacugggcugagaaacguacccucaauucagaguaggggauuguuuggcgccauagcaggcuucaucgaagggggauggacagguaugguggacggcugguacggguaucaucaccagaaugaacaaggaagcggcuacgcugccgaucucaaauccacccagaacgcuauugacgagaucacgaauaaggucaacucugugauagagaaaaugaauacccaguuuacagccguugguaaggaguucaaccaccuggaaaagcggauugaaaauuuaaacaaaaagguggaugacggguuccuggauaucuggacuuacaaugcagagcuccuuguccuguuggaaaacgagcgcacccuagacuaucaugauagcaaugugaaaaaccuguacgagaagguacgaucacagcucaaaaacaaugccaaggaaaucggcaacggauguuuugaguucuaucacaagugcgacaauacauguauggaaaguguuaaaaacggcacuuacgauuauccuaaguacuccgaggaagcuaaacugaauagagaggagauugacggggugaaacuugaaagcaccaggaucuaucaaauucuggcgauauacucuacagucgcaucaaguuuggugcucgucgugagccugggagccaucuccuuuuggaugugcucuaacgguucguuacagugccggauuuguaucuga

SEQ ID NO: 135363 - RNA, 1701 nt, Artificial Sequence; identical to SEQ ID NO: 131070
  derived and/or modified CDS sequence (opt3) from hemagglutinin__InfluenzaA__AEO01215

SEQ ID NO: 135364 - RNA, 1701 nt, Artificial Sequence
  derived and/or modified CDS sequence (opt3) from hemagglutinin__InfluenzaA__AEO01216
augaaggccauccuggugguccuccuuuacaccuucgcuacagcaaacgccgacacucugugcauuggcuaucacgcgaauaacagcacggauaccguugacacaguguuggagaaaaauguaacugugacccauuccgucaacuuacuggaagauaagcacaaugggaaacuauguaagcucagaggaguggcuccccugcaucuugguaaaugcaacauagccggcuggauccuggggaauccugagugugaaucuuugucaacagcaaguagcugguccuacauuguugagaccucuucgucagacaacggaacuugcuauccaggcgauuuuaucgacuacgaagaacucagggagcagcugagcaguguguccucuuucgaacgguuugagauuuucccgaagacaagcuccuggcccaaucacgauucaaacaagggugucaccgccgcuuguccucaugcaggggccaaaaguuuuuauaagaaucugaucuggcucgugaaaaagggaaacagcuacccaaaauuaucuaaguccuauauaaaugacaagggcaaagaaguacugguucuuuggggcauccaccaccccucaacgagcgcugaucaacagaguuuguaccagaacgccgacgcguacguguucgucgggacuucucgcuauuccaagaaauuuaagccugagauugcaauccgaccaaaagugcgugagcaggaaggaagaaugaauuacuauuggacccugguggagcccggugauaagauuacauucgaagccacuggcaaccuagucguuccuagguacgcuuuugccauggagcggaacgcagggagcggaaucauaauuucggacaccccagugcaugauugcaauacaaccugucaaacgccgaaaggcgcuaucaacacuucucuccccuuccagaauauucacccuaucacaaucgguaagugcccaaaguauguaaaauccaccaagcugcgccuugccacugggcugagaaacgugcccucaauucagaguaggggauuguuuggcgcgauagccggcuucaucgaagggggauggacagguauggucgacggcugguacggguaucaucaccagaaugagcaaggaagcggcuacgcagcugaccucaaauccacccagaacgccauugaugagaucacgaauaaggugaacucuguuauagaaaagaugaauacccaguuuacagcuguggguaaggaguucaaccaccuggaaaagcgggucgagaauuuaaacaaaaagguggacgauggguuccuggacauuuggacuuacaaugccgaacuccuuguacuguuggagaacgagcgcacccuagauuaucaugacagcaauguuaaaaaccuguacgaaaaggugcgaucacagcucaaaaacaaugcaaaggagaucggcaacggauguuuugaguucuaucacaagugcgauaauacauguauggagagugucaaaaacggcacuuacgacuauccuaaguacuccgaagaggccaaacugaauagagaggaaaucgauggggugaaacuugagagcaccaggauuuaucaaauccuggcuauuuacucuacagucgcgucaaguuuggugcucguugugagccugggagcaauauccuuuuggaugugcucuaacgguucguuacagugccggaucuguauuuga

SEQ ID NO: 135365 - RNA, 1701 nt, Artificial Sequence; identical to SEQ ID NO: 131070
  derived and/or modified CDS sequence (opt3) from hemagglutinin__InfluenzaA__AEO01217

SEQ ID NO: 135366 - RNA, 1701 nt, Artificial Sequence; identical to SEQ ID NO: 131070
  derived and/or modified CDS sequence (opt3) from hemagglutinin__InfluenzaA__AEO01218

SEQ ID NO: 135367 - RNA, 1701 nt, Artificial Sequence; identical to SEQ ID NO: 131070
  derived and/or modified CDS sequence (opt3) from hemagglutinin__InfluenzaA__AEO01219

SEQ ID NO: 135368 - RNA, 1701 nt, Artificial Sequence; identical to SEQ ID NO: 130808
  derived and/or modified CDS sequence (opt3) from hemagglutinin__InfluenzaA__AEO01220

SEQ ID NO: 135369 - RNA, 1701 nt, Artificial Sequence; identical to SEQ ID NO: 130717
  derived and/or modified CDS sequence (opt3) from hemagglutinin__InfluenzaA__AEO01221

SEQ ID NO: 135370 - RNA, 1701 nt, Artificial Sequence; identical to SEQ ID NO: 130717
  derived and/or modified CDS sequence (opt3) from hemagglutinin__InfluenzaA__AEO01222

SEQ ID NO: 135371 - RNA, 1701 nt, Artificial Sequence; identical to SEQ ID NO: 131070
  derived and/or modified CDS sequence (opt3) from hemagglutinin__InfluenzaA__AEO01223

SEQ ID NO: 135372 - RNA, 1701 nt, Artificial Sequence
  derived and/or modified CDS sequence (opt3) from hemagglutinin__InfluenzaA__AEO01224
augaaggccauccuggugguccuccuuuacaccuucgcuacagcaaacgccgacacucugugcauuggcuaucacgcgaauaacagcacggauaccguugacacaguguuggagaaaaauguaacugugacccauuccgucaacuuacuggaagauaagcacaaugggaaacuauguaagcucagaggaguggcuccccugcaucuugguaaaugcaacauagccggcuggauccuggggaauccugagugugaaucuuugucaacagcaaguagcugguccuacauuguugagaccucuucgucagacaacggaacuugcuauccaggcgauuuuaucgacuacgaggagcucagggagcagcugagcaguguguccucuuucgaacgguuugagauuuucccgaagacaagcuccuggcccaaucacgauucaaacaagggugucaccgccgcuuguccucaugcaggggccaaaaguuuuuauaagaaucugaucuggcucgugaaaaagggaaacagcuacccaaaauuaucuaaguccuauauaaaugacaagggcaaagaaguacugguucuuuggggcauccaccaccccucaacgagcgcugaucaacagaguuuguaccagaacgccgacgcguacguguucgucgggacuucucgcuauuccaagaaauuuaagccugagauugcaauccgaccaaaagugcgugaucaggagggaagaaugaauuacuauuggacccugguggaacccggugacaagauuacauucgaggccacuggcaaccuagucguuccuagguacgcuuuugccaccgaacggaacgcagggagcggaaucauaauuucggauacaccagugcaugacugcaauaccacgugucaaacuccgaaaggcgcuaucaacacaucucuccccuuccagaauauucacccuaucaccaucgguaagugcccaaaguauguaaaauccacuaagcugcgccuugccacagggcugagaaacgugcccucaauucagaguaggggauuguuuggcgcgauagccggcuucaucgaagggggauggaccgguauggucgacggcugguacggguaucaucaccagaaugaacaaggaagcggcuacgcagcugaucucaaauccacgcagaacgccauugacgagaucaccaauaaggugaacucuguuauagagaaaaugaauacacaguuuacugcuguggguaaggaguucaaccaccuggaaaagcggauugaaaauuuaaacaaaaaggucgaugacggguuccuggauaucuggaccuacaaugccgagcuccuugugcuguuggaaaacgagcgcacacuagacuaucaugauagcaauguaaagaaccuguacgagaagguucgaucacagcucaaaaacaaugcaaaggaaaucggcaacggauguuuugaguucuaucacaagugcgacaauacuuguauggaaagugugaaaaacggcaccuacgauuauccuaaguacuccgaggaagccaaacugaauagagaggagauugacggggucaaacuugaaagcacaaggaucuaucaaauucuggcuauauacucuaccguggcgucaaguuugguccucgugguuagccugggagcaaucuccuuuuggaugugcucuaacgguucguuacagugccggauuuguaucuga

SEQ ID NO: 135373 - RNA, 1701 nt, Artificial Sequence
  derived and/or modified CDS sequence (opt3) from hemagglutinin__InfluenzaA__AEO01225
augaaggccauccuggugguccuccuuuacaccuucgcuacagcaaacgccgacacucugugcauuggcuaucacgcgaauaacagcacggauaccguugacacaguguuggagaaaaauguaacugugacccauuccgucaacuuacuggaagauaagcacaaugggaaacuauguaagcucagaggaguggcuccccugcaucuugguaaaugcaacauagccggcuggauccuggggaauccugagugugaaucuuugucaacagcaaguagcugguccuacauuguugagaccucuucgucagacaacggaacuugcuauccaggcgauuuuaucgacuacgaggagcucagggagcagcugagcaguguguccucuuucgaacgguuugagauuuucccgaagacaagcuccuggcccaaucacgauucaaacaagggugucaccgccgcuuguccucaugcaggggccaaaaguuuuuauaagaaucugaucuggcucgugaaaaagggaaacagcuacccaaaauuaucuaaguccuauauaaaugacaagggcaaagaaguacugguucuuuggggcauccaccaccccucaacgagcgcugaucaacagaguuuguaccagaacgccgacgcguacguguucgucgggacuucucgcuauuccaagaaauuuaagccugagauugcaauccgaccaaaagugcgugaucaggagggaagaaugaauuacuauuggaccguggucgaacccggugacaagauuacauucgaggccacuggcaaccugguugugccuagguacgcuuuugccauggaacggaacgcagggagcggaaucauaauuucggauaccccaguacaugacugcaauacaaccugucaaacgccgaaaggcgcuaucaacacuucucuacccuuccagaauauucacccuaucacaaucgguaagugcccaaaguaugugaaauccaccaagcuccgccuggccacugggcuuagaaacguccccucaauucagaguaggggacuguuuggcgcgauagccggcuucaucgaagggggauggacagguaugguggacggcugguacggguaucaucaccagaaugaacaaggaagcggcuacgcagcugauuugaaauccacccagaacgccauugacgagaucacgaauaagguuaacucugugauagagaaaaugaauacccaguuuacagcugucgguaaggaguucaaccaccucgaaaagcggauugaaaaucugaacaaaaagguggaugacggguucuuagauaucuggacuuacaaugccgagcugcucguacuucuggaaaacgagcgcaccuuggacuaucaugauagcaauguuaaaaaccuauacgagaaggugcgaucacagcugaaaaacaaugcaaaggaaaucggcaacggauguuuugaguucuaucacaagugcgacaauacauguauggaaagugucaaaaacggcacuuacgauuauccuaaguacuccgaggaagccaaacucaauagagaggagauugacggggugaagcuggaaagcaccaggaucuaucaaauucuugcuauauacucuacagucgcgucaagucugguguugguugugagccucggagcaaucuccuuuuggaugugcucuaacgguucgcugcagugccggauuuguaucuga

SEQ ID NO: 135374 - RNA, 1701 nt, Artificial Sequence
  derived and/or modified CDS sequence (opt3) from hemagglutinin__InfluenzaA__AEO01226
augaaggccauccuggugguccuccuuuacaccuucgcuacagcaaacgccgacacucugugcauuggcuaucacgcgaauaacagcacggauaccguugacacaguguuggagaaaaauguaacugugacccauuccgucaacuuacuggaagauaagcacaaugggaaacuauguaagcucagaggaguggcuccccugcaucuugguaaaugcaacauagccggcuggauccuggggaauccugagugugaaucuuugucaacagcaaguagcugguccuacauuguugagaccucuucgucagacaacggaacuugcuauccaggcgauuuuaucgacuacgaggagcucagggagcagcugagcaguguguccucuuucgaacgguuugagauuuucccgaagacaagcuccuggcccaaucacgauucaaacaagggugucaccgccgcuuguccucaugcaggggccaaaaguuuuuauaagaaucugaucuggcucgugaaaaagggaaacagcuacccaaaauuaucuaaguccuauauaaaugacaagggcaaagaaguacugguucuuuggggcauccaccaccccucaacgagcgcugaucaacagaguuuguaccagaacgccgacgcguacguguucgucgggacuucucgcuauuccaagaaauuuaagccugagauugcaauccgaccaaaagugcgugaucaggagggaagaaugaauuacuauuggacccugguggaacccggugacaagauuacauucgaggccacuggcaaccuagucguuccuagguacgcuuuugccauggaacggaacgaugggagcggaaucauaauuucggacaccccagugcaugacugcaauacaaccugucaaacgccgaaaggcgcaaucaacacuucucuccccuuccagaauauucacccuaucacaaucgguaagugcccaaaguauguaaaauccaccaagcugcgccuugcuacugggcugagaaacgugcccucaauucagaguaggggauuguuuggcgccauagcgggcuucaucgaagggggauggacagguauggucgauggcugguacggguaucaucaccagaaugaacaaggaagcggcuacgccgcagaccucaaauccacccagaacgcuauugaugagaucacgaauaaggugaacucuguuauagagaaaaugaauacccaguuuacagccguggguaaggaguucaaccaccuggaaaagcggauugaaaauuuaaacaaaaaggucgacgauggguuccuggacaucuggacuuacaaugcugagcuccuugugcuguuggaaaacgagcgcacccuagauuaucaugacagcaauguaaagaaccuguacgagaagguucgaucacagcucaaaaacaaugccaaggaaaucggcaacggauguuuugaguucuaucacaagugcgauaauacauguauggaaagugugaaaaacggcacuuacgacuauccuaaguacuccgaggaagcaaaacugaauagagaggagauugauggggucaaacuugaaagcaccaggaucuaucaaauucuggccauauacucuacaguggcuucaaguuugguccucgugguuagccugggagcgaucuccuuuuggaugugcucuaacgguucguuacagugccggauuuguaucuga

SEQ ID NO: 135375 - RNA, 1701 nt, Artificial Sequence; identical to SEQ ID NO: 132884
  derived and/or modified CDS sequence (opt3) from hemagglutinin__InfluenzaA__AEO01227

SEQ ID NO: 135376 - RNA, 1701 nt, Artificial Sequence; identical to SEQ ID NO: 130717
  derived and/or modified CDS sequence (opt3) from hemagglutinin__InfluenzaA__AEO01228

SEQ ID NO: 135377 - RNA, 1701 nt, Artificial Sequence; identical to SEQ ID NO: 130717
  derived and/or modified CDS sequence (opt3) from hemagglutinin__InfluenzaA__AEO01229

SEQ ID NO: 135378 - RNA, 1701 nt, Artificial Sequence
  derived and/or modified CDS sequence (opt3) from hemagglutinin__InfluenzaA__AEO01230
augaaggccauccuggugguccuccuuuacaccuucgcuacagcaaacgccgacacucugugcauuggcuaucacgcgaauaacagcacggauaccguugacacaguguuggagagaaauguaacugugacccauuccgucaacuuacuggaagauaagcacaaugggaagcuauguaaacucaggggaguggcuccccugcaucuugguaagugcaacauagccggcuggauccuggggaauccugagugugaaucuuugucaacagcaaguagcugguccuacauuguugagaccucuucgucagacaacggaacuugcuauccaggcgauuuuaucgacuacgaggagcuccgggagcagcugagcaguguguccucuuucgaacgcuuugagauuuucccgaaaacaagcuccuggcccaaucacgauucaaacaagggugucaccgccgcuuguccucaugcaggggccaagaguuuuuauaaaaaucugaucuggcucgugaagaaaggaaacagcuacccaaaguuaucuaaauccuauauaaaugacaagggcaaggaaguacugguucuuuggggcauccaccaccccucaacgagcgcugaucaacagaguuuguaccagaacgccgacgcguacguguucgucgggacuucucgauauuccaaaaaguuuaaaccugagauugcaauccguccaaaggugagagaucaggagggaaggaugaauuacuauuggacccugguggaacccggugacaaaauuacauucgaggccacuggcaaccuagucguuccucgguacgcuuuugccauggaacgcaacgcagggagcggaaucauaauuucggauaccccagugcaugacugcaauacaaccugucaaacgccgaagggcgcuaucaacacuucucuccccuuccagaauauucacccuaucacaaucgguaaaugcccaaaguauguaaaguccaccaaacugagacuugccacugggcugaggaacgugcccucaauucagagucggggauuguuuggcgcgauagccggcuucaucgaagggggauggacagguauggucgacggcugguacggguaucaucaccagaaugaacaaggaagcggcuacgcagcugaucucaaguccacccagaacgccauugacgagaucacgaauaaagugaacucuguuauagagaagaugaauacccaguuuacagcuguggguaaagaguucaaccaccuggaaaagcgcauugaaaauuuaaacaagaaagucgaugacggguuccuggauaucuggacuuacaaugccgagcuccuugugcuguuggaaaacgagcgaacccuagacuaucaugauagcaauguaaagaaccuguacgagaaaguuagaucacagcucaagaacaaugcaaaagaaaucggcaacggauguuuugaguucuaucacaagugcgacaauacauguauggaaagugugaagaacggcacuuacgauuauccuaaauacuccaaggaggccaaacugaauagggaagagauugacggggucaaacuugagagcacccggaucuaucaaauucuggcuauauacucuacaguggcgucaaguuugguccucgugguuagccugggagcaaucuccuuuuggaugugcucuaacgguucguuacagugccguauuuguaucuga

SEQ ID NO: 135379 - RNA, 1701 nt, Artificial Sequence; identical to SEQ ID NO: 130717
  derived and/or modified CDS sequence (opt3) from hemagglutinin__InfluenzaA__AEO01231

SEQ ID NO: 135380 - RNA, 1701 nt, Artificial Sequence; identical to SEQ ID NO: 131070
  derived and/or modified CDS sequence (opt3) from hemagglutinin__InfluenzaA__AEO01232

SEQ ID NO: 135381 - RNA, 1701 nt, Artificial Sequence; identical to SEQ ID NO: 130717
  derived and/or modified CDS sequence (opt3) from hemagglutinin__InfluenzaA__AEO01233

SEQ ID NO: 135382 - RNA, 1701 nt, Artificial Sequence; identical to SEQ ID NO: 130717
  derived and/or modified CDS sequence (opt3) from hemagglutinin__InfluenzaA__AEO01234

SEQ ID NO: 135383 - RNA, 1701 nt, Artificial Sequence; identical to SEQ ID NO: 130717
  derived and/or modified CDS sequence (opt3) from hemagglutinin__InfluenzaA__AEO01235

SEQ ID NO: 135384 - RNA, 1701 nt, Artificial Sequence; identical to SEQ ID NO: 134589
  derived and/or modified CDS sequence (opt3) from hemagglutinin__InfluenzaA__AEO01236

SEQ ID NO: 135385 - RNA, 1701 nt, Artificial Sequence; identical to SEQ ID NO: 130717
  derived and/or modified CDS sequence (opt3) from hemagglutinin__InfluenzaA__AEO01237

SEQ ID NO: 135386 - RNA, 1701 nt, Artificial Sequence; identical to SEQ ID NO: 130717
  derived and/or modified CDS sequence (opt3) from hemagglutinin__InfluenzaA__AEO01238

SEQ ID NO: 135387 - RNA, 1701 nt, Artificial Sequence; identical to SEQ ID NO: 130717
  derived and/or modified CDS sequence (opt3) from hemagglutinin__InfluenzaA__AEO01240

SEQ ID NO: 135388 - RNA, 1701 nt, Artificial Sequence; identical to SEQ ID NO: 131070
  derived and/or modified CDS sequence (opt3) from hemagglutinin__InfluenzaA__AEO01241

SEQ ID NO: 135389 - RNA, 1701 nt, Artificial Sequence; identical to SEQ ID NO: 130717
  derived and/or modified CDS sequence (opt3) from hemagglutinin__InfluenzaA__AEO01242

SEQ ID NO: 135390 - RNA, 1701 nt, Artificial Sequence
  derived and/or modified CDS sequence (opt3) from hemagglutinin__InfluenzaA__AEO01244
augaaggccauccuggugguccuccuuuacaccuucgcuacagcaaacgccgacacucugugcauuggcuaucacgcgaauaacagcacggauaccguugacacaguguuggagaaaaauguaacugugacccauuccgucaacuuacuggaagauaagcacaaugggaaacuauguaagcucagaggaguggcuccccugcaucuugguaaaugcaacauagccggcuggauccuggggaauccugagugugaaucuuugucaacagcaaguagcugguccuacauuguugagaccucuucgucagacaacggaacuugcuauccaggcgauuuuaucgacuacgaagaacucagggagcagcugagcaguguguccucuuucgaacgguuugagauuuucccgaagacaagcuccuggcccaaucacgauucaaacaagggugucaccgccgcuuguccucaugcaggggccaaaaguuuuuauaagaaucugaucuggcucgugaaaaagggaaacagcuacccaaaauuaucuaaguccuauauaaaugacaagggcaaagaaguacugguucuuuggggcauccaccaccccucaacgagcgcugaucaacagaguuuguaccagaacgccgacgcguacguguucgucgggacuucuaaguauuccaaaaaguuuaaaccugagauugcaauccgcccaaaggugcgaggacaggagggucguaugaauuacuauuggacccugguggaacccggcgauaaaauuacauucgaggccacugggaaccuagucguuccuagauacgcuuuugccauggaaaggaacgcaggaagcggcaucauaauuucggacaccccagugcaugauugcaauacaaccugucaaacgccgaagggugcuaucaacacuucucuccccuuccagaauauucacccuaucacaaucgggaagugcccaaaauauguaaaguccaccaaacugcggcuugccacuggacugcgcaacgugcccucaauucagaguagaggcuuguuuggcgcgauagccggguucaucgagggagguuggacaggcauggucgacgggugguacggauaucaucaccagaaugaacaaggcagcgguuacgcagcugaccucaaguccacccagaacgccauugaugagaucacgaauaaagugaacucuguuauagagaagaugaauacccaguuuacagcuguggggaaggaguucaaccaccuggagaaaaggauugaaaauuuaaacaagaaagucgacgauggcuuccuggacaucuggacuuacaaugccgagcuccuugugcuguuggaaaacgagcggacccuagauuaucaugacagcaauguaaagaaccuguacgagaaaguucgcucacagcucaagaacaaugcaaaggaaaucggaaacggcuguuuugaguucuaucacaaaugcgauaauacauguauggaaagugugaagaacgggacuuacgacuauccuaaauacuccgaggaagccaagcugaaucgagaggagauugauggagucaaacuugaaagcaccagaaucuaucaaauucuggcuauauacucuacaguggcgucaaguuugguccucgugguuagccugggugcaaucuccuuuuggaugugcucuaacggcucguuacagugcaggauuuguaucuga

SEQ ID NO: 135391 - RNA, 1701 nt, Artificial Sequence; identical to SEQ ID NO: 130717
  derived and/or modified CDS sequence (opt3) from hemagglutinin__InfluenzaA__AEO01245

SEQ ID NO: 135392 - RNA, 1701 nt, Artificial Sequence
  derived and/or modified CDS sequence (opt3) from hemagglutinin__InfluenzaA__AEO01247
augaaggccauccuggugguccuccuuuacaccuucgcuacagcaaacgccgacacucugugcauuggcuaucacgcgaauaacagcacggauaccguugacacaguguuggagaaaaauguaacugugacccauuccgucaacuuacuggaagauaagcacaaugggaaacuauguaagcucagaggaguggcuccccugcaucuugguaaaugcaacauagccggcuggauccuggggaauccugagugugaaucuuugucaacagcaaguagcugguccuacauuguugagaccucuucgucagacaacggaacuugcuauccaggcgauuuuaucgacuacgaggagcucagggagcagcugagcaguguguccucuuucgaacgguuugagauuuucccgaagacaagcuccuggcccaaucacgauucaaacaagggugucaccgccgcuuguccucaugcaggggccaaaaguuuuuauaagaaucugaucuggcucgugaaaaagggaaacagcuacccaaaauuaucuaaguccuauauaaaugacaagggcaaagaaguacugguucuuuggggcauccaccaccccucaacgagcgcugaucaacagaguuuguaccagaacgccgacgcguacguguucgucgggacuucucgcuauuccaagaaauuuaagccugagauugcaauccgaccaaaagugcgugaucaggagggaagaaugaauuacuauuggacccugguggaacccggugacaagauuacauucgaggccacuggcaaccuagucguuccuagguacgcuuuugccauggaacggaacgcagggagcggaauccucauaucggauaccccagugcaugacugcaauacaaccugucaaacgccgaaaggcgcuauuaacacuucucugcccuuccagaauauccacccuauuacaaucgguaagugcccaaaguauguaaaauccaccaaacuucgccuggccacuggguugagaaacgugcccucaauccagaguaggggacucuuuggcgcgauugccggcuucauagaagggggauggacagguauggucgacggcugguacggguaucaucaccagaaugaacaaggaagcggcuacgcagcugaucugaaguccacccagcacgccaucgacgagauuacgaacaagguaaauucuguuaucgagaaaaugaacacccaguuuacagcuguggguaaggaguucaaucauuuagaaaagcggauagaaaaccugaauaaaaaggucgaugacggguuccucgauauuuggacuuacaacgccgagcuucugguguugcuagaaaaugagcgcacccuggacuaucacgauagcaacgugaaaaaucucuacgagaagguucgaucacagcugaaaaacaacgcaaaggaaaucggcaauggauguuuugaguucuaucauaagugcgacaacacauguauggaaagugugaaaaauggcacuuacgauuauccuaaguacuccgaggaagccaaacuuaacagagaggagaucgacggggucaagcuggaaagcaccaggauuuaucaaaucuuggcuauuuacucuacaguggcgucaagucucguccuggugguuagcuuaggagcaauauccuuuuggaugugcucuaaugguucgcugcagugccggaucuguauuuga

SEQ ID NO: 135393 - RNA, 1701 nt, Artificial Sequence; identical to SEQ ID NO: 130717
  derived and/or modified CDS sequence (opt3) from hemagglutinin__InfluenzaA__AEO01248

SEQ ID NO: 135394 - RNA, 1701 nt, Artificial Sequence; identical to SEQ ID NO: 130717
  derived and/or modified CDS sequence (opt3) from hemagglutinin__InfluenzaA__AEO01249

SEQ ID NO: 135395 - RNA, 1701 nt, Artificial Sequence
  derived and/or modified CDS sequence (opt3) from hemagglutinin__InfluenzaA__AEO01250
augaaggccauccuggugguccuccuuuacaccuucgcuacagcaaacgccgacacucugugcauuggcuaucacgcgaauaacagcacggauaccguugacacaguguuggagaaaaauguaacugugacccauuccgucaacuuacuggaagauaagcacaaugggaaacuauguaagcucagaggaguggcuccccugcaucuugguaaaugcaacauagccggcuggauccuggggaauccugagugugaaucuuugucaacagcaaguagcugguccuacauuguugagaccucuucgucagacaacggaacuugcuauccaggcgauuuuaucgacuacgaagaacucagggagcagcugagcaguguguccucuuucgaacgguuugagauuuucccgaagacaagcuccuggcccaaucacgauucaaacaagggugucaccgccgcuuguccucaugcaggggccaaaaguuuuuauaagaaucugaucuggcucgugaaaaagggaaacagcuacccaaaauuaucuaaguccuauauaaaugacaagggcaaagaaguacugguucuuuggggcauccaccaccccucaacgagcgcugaucaacagaguuuguaccagaacgaggacgccuacguguucgucgggacuucucgcuauuccaagaaauuuaagccugagauugcgauccgaccaaaagugcgugaucaggaaggaagaaugaauuacuauuggacccugguggagcccggugacaagauuacauucgaagcaacuggcaaccuagucguuccuagguacgccuuugcuauggagcggaacgccgggagcggaaucauaauuucggauaccccagugcaugacugcaauacaaccugucaaacgccgaaaggcgcaaucaacacuucucuccccuuccagaauauucacccuaucacaaucgguaagugcccaaaguauguaaaauccaccaagcugcgccuugcuacugggcugagaaacgugcccucaauucagaguaggggauuguuuggcgccauagcgggcuucaucgaagggggauggacagguauggucgacggcugguacggguaucaucaccagaaugagcaaggaagcggcuacgccgcagaucucaaauccacccagaacgcuauugacgagaucacgaauaaggugaacucuguuauagaaaagaugaauacccaguuuacagccguggguaaggaguucaaccaccuggaaaagcggauugagaauuuaaacaaaaaggucgaugacggguuccuggauaucuggacuuacaaugcugaacuccuugugcuguuggagaacgagcgcacccuagacuaucaugauagcaauguuaaaaaccuguacgaaaagguacgaucacagcucaaaaacaaugccaaggagaucggcaacggauguuuugaguucuaucacaagugcgacaauacauguauggagagugugaaaaacggcacuuacgauuauccuaaguacuccgaagaggcaaaacugaauagagaggaaauugacggggucaaacuugagagcaccaggaucuaucaaauucuggccauauacucuacaguggcuucaaguuugguccucgugguuagccugggagcgaucuccuuuuggaugugcucuaacgguucguuacagugccggauuuguaucuga

SEQ ID NO: 135396 - RNA, 1701 nt, Artificial Sequence; identical to SEQ ID NO: 132314
  derived and/or modified CDS sequence (opt3) from hemagglutinin__InfluenzaA__AEO01251

SEQ ID NO: 135397 - RNA, 1701 nt, Artificial Sequence; identical to SEQ ID NO: 130717
  derived and/or modified CDS sequence (opt3) from hemagglutinin__InfluenzaA__AEO01252

SEQ ID NO: 135398 - RNA, 1701 nt, Artificial Sequence; identical to SEQ ID NO: 130717
  derived and/or modified CDS sequence (opt3) from hemagglutinin__InfluenzaA__AEO01253

SEQ ID NO: 135399 - RNA, 1701 nt, Artificial Sequence
  derived and/or modified CDS sequence (opt3) from hemagglutinin__InfluenzaA__AEO01254
augaaggccauccuggugguccuccuuuacaccuucgcuacagcaaacgccgacacucugugcauuggcuaucacgcgaauaacagcacggauaccguugacacaguguuggagaaaaauguaacugugacccauuccgucaacuuacuggaagauaagcacaaugggaaacuauguaagcucagaggaguggcuccccugcaucuugguaaaugcaacauagccggcuggauccuggggaauccugagugugaaucuuugucaacagcaaguagcugguccuacauuguugagaccucuucgucagacaacggaacuugcuauccaggcgauuuuaucgacuacgaggagcucagggagcagcugagcaguguguccucuuucgaacgguuugagauuuucccgaagacaagcuccuggcccaaucacgauucaaacaagggugucaccgccgcuuguccucaugcaggggccaaaaguuuuuauaagaaucugaucuggcucgugaaaaagggaaacagcuacccaaaauuaucuaaguccuauauaaauaacaagggcaaagaaguacugguucuuuggggcauccaccaccccucaacgagcgcugaccaacagaguuuguaccagaaugccgaugcguacguguucgucgggacuucucgcuauuccaagaaauuuaagccugagauugcaauccgaccaaaagugcgugaccaggagggaagaaugaacuacuauuggacccugguggaacccggugauaagauuacauucgaggccacuggcaaccuagucguuccuagguacgcuuuugccauggaacggaaugcagggagcggaaucauaauuucggacaccccagugcaugauugcaacacaaccugucaaacgccgaaaggcgcuaucaauacuucucuccccuuccagaacauucacccuaucacaaucgguaagugcccaaaguauguaaaauccaccaagcugcgccuugccacugggcugagaaaugugcccucaauucagaguaggggauuguuuggcgcgauagccggcuucaucgaagggggauggacagguauggucgacggcugguacggguaucaucaccagaacgaacaaggaagcggcuacgcagcugaccucaaauccacccagaaugccauugauaagaucacgaacaaaguuaauucugugauagagaagaugaacacccaguuuacagcuguggguaaggaguucaaucaccuggaaaaacggauugagaacuuaaauaagaaagucgacgauggguuccuggacaucuggacuuacaacgccgaacuccuugugcuguuggagaaugaacgcacccuagauuaucaugacagcaacguaaagaaccuguacgagaaaguucgaucacagcucaagaauaacgcaaaggagaucggcaauggauguuuugaguucuaucacaaaugcgauaacacauguauggaaagugugaagaauggcacuuacgacuauccuaaauacuccgaagaggccaagcugaacagagaagagauugauggggucaaacuugagagcaccaggaucuaucaaauucuggcuauauacucuacaguggcgucaaguuugguccucgugguuagccugggagcaaucuccuuuuggaugugcucuaaugguucguuacagugccggauuuguaucuga

SEQ ID NO: 135400 - RNA, 1701 nt, Artificial Sequence; identical to SEQ ID NO: 131164
  derived and/or modified CDS sequence (opt3) from hemagglutinin__InfluenzaA__AEO01256

SEQ ID NO: 135401 - RNA, 1701 nt, Artificial Sequence; identical to SEQ ID NO: 134136
  derived and/or modified CDS sequence (opt3) from hemagglutinin__InfluenzaA__AEO01257

SEQ ID NO: 135402 - RNA, 1701 nt, Artificial Sequence; identical to SEQ ID NO: 130717
  derived and/or modified CDS sequence (opt3) from hemagglutinin__InfluenzaA__AEO01258

SEQ ID NO: 135403 - RNA, 1701 nt, Artificial Sequence; identical to SEQ ID NO: 135399
  derived and/or modified CDS sequence (opt3) from hemagglutinin__InfluenzaA__AEO01259

SEQ ID NO: 135404 - RNA, 1701 nt, Artificial Sequence; identical to SEQ ID NO: 133272
  derived and/or modified CDS sequence (opt3) from hemagglutinin__InfluenzaA__AEO01260

SEQ ID NO: 135405 - RNA, 1701 nt, Artificial Sequence
  derived and/or modified CDS sequence (opt3) from hemagglutinin__InfluenzaA__AEO01261
augaaggccauccuggugguccuccuuuacaccuucgcuacagcaaacgccgacacucugugcauuggcuaucacgcgaauaacagcacggauaccguugacacaguguuggagaaaaauguaacugugacccauuccgucaacuuacuggaagauaagcacaaugggaaacuauguaagcucagaggaguggcuccccugcaucuugguaaaugcaacauagccggcuggauccuggggaauccugagugugaaucuuugucaacagcaaguagcugguccuacauuguugagaccucuucgucagacaacggaacuugcuauccaggcgauuuuaucgacuacgaggagcucagggagcagcugagcaguguguccucuuucgaacgguuugagauuuucccgaagacaagcuccuggcccaaucacgauucaaacaagggugucaccgccgcuuguccucaugcaggggccaaaaguuuuuauaagaaucugaucuggcucgugaaaaagggaaacagcuacccaaaauuaucuaaguccuauauaaaugacaagggcaaagaaguacugguucuuuggggcauccaccaccccucaacgagcgcugaucaacagaguuuguaccagaacgccgacgcguacguguucgucgggacuucucgcuauuccaagaaauuuaagccugagauugcaauccgaccaaaagugcgugaucaggagggaagaaugaauuacuauuggacccugguggaacccggugacaagauuacauucgaggccacuggcaaccuagucguuccuagguacgcuuuugccauggaacggaacgcagggagcggaaucauaauuucggauaccccagugcaugacugcaauacaaccugucaaacgccgaaaggcgcuaucaacacuucucuccccuuccagaauauucacccuaucacaaucgguaagugcccaaaguauguaaaauccaccaagcugcgcauggccacugggcuuagaaacgugcccucaauucagaguaggggacuguuuggcgcgauagccggcuucaucgaagggggauggacagguauggucgacggcugguacggguaucaucaccagaaugaacaaggaagcggcuacgcagcugauuugaaauccacccagaacgccauugacgagaucacgaauaaggugaacucuguuauagagaaaaugaauacccaguuuacagcuguggguaaggaguucaaccaccucgaaaagcggauugaaaaucugaacaaaaaggucgaugacggguucuuagauaucuggacuuacaaugccgagcugcucgugcuucuggaaaacgagcgcaccuuggacuaucaugauagcaauguuaaaaaccuauacgagaagguacgaucacagcugaaaaacaaugcaaaggaaaucggcaacggauguuuugaguucuaucacaagugcgacaauacauguauggaaagugugaaaaacggcacuuacgauuauccuaaguacuccgaggaagccaaacucaauagagaggagauugacggggucaagcuggaaagcaccggaaucuaucaaauucuugcuauauacucuacaguggcgucaagucuggucuuggugguuagccucggugcaaucuccuuuuggaugugcucuaacggcucgcugcagugcaggauuuguaucuga

SEQ ID NO: 135406 - RNA, 1701 nt, Artificial Sequence; identical to SEQ ID NO: 130717
  derived and/or modified CDS sequence (opt3) from hemagglutinin__InfluenzaA__AEO01262

SEQ ID NO: 135407 - RNA, 1701 nt, Artificial Sequence; identical to SEQ ID NO: 132399
  derived and/or modified CDS sequence (opt3) from hemagglutinin__InfluenzaA__AEO01263

SEQ ID NO: 135408 - RNA, 1701 nt, Artificial Sequence; identical to SEQ ID NO: 131070
  derived and/or modified CDS sequence (opt3) from hemagglutinin__InfluenzaA__AEO01264

SEQ ID NO: 135409 - RNA, 1701 nt, Artificial Sequence; identical to SEQ ID NO: 130717
  derived and/or modified CDS sequence (opt3) from hemagglutinin__InfluenzaA__AEO01265

SEQ ID NO: 135410 - RNA, 1701 nt, Artificial Sequence
  derived and/or modified CDS sequence (opt3) from hemagglutinin__InfluenzaA__AEO01266
augaaggccauccuggugguccuccuuuacaccuucgcuacagcaaacgccgacacucugugcauuggcuaucacgcgaauaacagcacggauaccguugacacaguguuggagaaaaauguaacugugacccauuccgucaacuuacuggaagauaagcacaaugggaaacuauguaagcucagaggaguggcuccccugcaucuugguaaaugcaacauagccggcuggauccuggggaauccugagugugaaucuuugucaacagcaaguagcugguccuacauuguugagaccucuucgucagacaacggaacuugcuauccaggcgauuuuaucgacuacgaagaacucagggagcagcugagcaguguguccucuuucgaacgguuugagauuuucccgaagacaagcuccuggcccaaucacgauucaaacaagggugucaccgccgcuuguccucaugcaggggccaaaaguuuuuauaagaaucugaucuggcucgugaaaaagggaaacagcuacccaaaauuaucuaaguccuauauaaaugacaagggcaaagaaguacugguucuuuggggcauccaccaccccucaacgagcgcugaucaacagaguuuguaccagaacgccgacgcguacguguucgucgggacuucucgcuauuccaagaaauuuaagccugagauugcaauccgaccaaaagugcguggacaggaggguagaaugaauuacuauuggacccugguggaacccggcgauaagauuacauucgaggccacugggaaccuagucguuccuagguacgcuuuugccauggaacggaacgcaggaagcggcaucauaauuucggacgcuccagugcaugauugcaauaccacaugucaaaccccgaaaggugccaucaacacgucucuccccuuccagaauauucacccuaucacuaucgggaagugcccaaaguauguaaaauccacaaagcugcgccuugcgaccggacugagaaacgugcccucaauucagaguaggggcuuguuuggcgccauagcaggguucaucgagggagguuggacuggcauggucgacgggugguacggauaucaucaccagaaugaacaaggcagcgguuacgcugccgaccucaaauccacacagaacgcuauugaugagaucaccaauaaggugaacucuguuauagagaaaaugaauacgcaguuuaccgccguggggaaggaguucaaccaccuggagaagcggauugaaaauuuaaacaaaaaggucgacgauggcuuccuggacaucuggacauacaaugcagagcuccuugugcuguuggaaaacgagcgcacucuagauuaucaugacagcaauguaaagaaccuguacgagaagguucgaucacagcucaaaaacaaugccaaggaaaucggaaacggcuguuuugaguucuaucacaagugcgauaauaccuguauggaaagugugaaaaacgggacauacgacuauccuaaguacuccgaggaagcuaaacugaauagagaggagauugauggagucaaacuugaaagcacuaggaucuaucaaauucuggcgauauacucuaccguggcaucaaguuugguccucgugguuagccugggugccaucuccuuuuggaugugcucuaacggcucguuacagugccggauuuguaucuga

SEQ ID NO: 135411 - RNA, 1701 nt, Artificial Sequence; identical to SEQ ID NO: 130717
  derived and/or modified CDS sequence (opt3) from hemagglutinin__InfluenzaA__AEO01267

SEQ ID NO: 135412 - RNA, 1701 nt, Artificial Sequence; identical to SEQ ID NO: 130717
  derived and/or modified CDS sequence (opt3) from hemagglutinin__InfluenzaA__AEO01268

SEQ ID NO: 135413 - RNA, 1701 nt, Artificial Sequence
  derived and/or modified CDS sequence (opt3) from hemagglutinin__InfluenzaA__AEO01269
augaaggccauccuggugguccuccuuuacaccuucgcuacagcaaacgccgacacucugugcauuggcuaucacgcgaauaacagcacggauaccguugacacaguguuggagaaaaauguaacugugacccauuccgucaacuuacuggaagauaagcacaaugggaaacuauguaagcucagaggaguggcuccccugcaucuugguaaaugcaacauagccggcuggauccuggggaauccugagugugaaucuuugucaacagcaaguagcugguccuacauuguugagaccucuucgucagacaacggaacuugcuauccaggcgauuuuaucgacuacgaagaacucagggagcagcugagcaguguguccucuuucgaacgguuugagauuuucccgaagacaagcuccuggcccaaucacgauucaaacaagggugucaccgccgcuuguccucaugcaggggccaaaaguuuuuauaagaaucugaucuggcucgugaaaaagggaaacagcuacccaaaauuaucuaaguccuauauaaaugacaagggcaaagaaguacugguucuuuggggcauccaccaccccucaacgagcgcugaucaacagaguuuguaccagaacgccgacgcguacguguucgucgggacuucucgcuauuccaagaaauuuaagccugagauugcaauccgaccaaaagugcgugagcaggaaggaagaaugaauuacuauuggacccugguggagcccggugauaagauuacauucgaagccacuggcaaccuagucguuccuagguacgcuuuugccauggagcggaacgcagggagcggaaucgugauaucggacaccccaguacaugauugcaauacaaccugucaaacgccgaaaggcgcuauuaacacuucucuccccuuccagaauauccacccuauuacaaucgguaagugcccaaaguaugugaaauccaccaagcugcgccuugccacugggcugagaaacguccccucaauccagaguaggggauuguuuggcgcgauugccggcuucauagaagggggauggacagguaugguggacggcugguacggguaucaucaccagaaugagcaaggaagcggcuacgcagcugaccucaaauccacccagaacgccaucgaugagauuacgaauaagguuaacucugugaucgaaaagaugaauacccaguuuacagcugucgguaaggaguucaaccaccuggaaaagcggauggagaauuuaaacaaaaagguggacgauggguuccuggacauauggacuuacaaugccgaacuccuuguacuguuggagaacgagcgcacccuagauuaucaugacagcaauguuaaaaaccuguacgaaaaggugcgaucacagcucaaaaacaaugcaaaggagauuggcaacggauguuuugaguucuaucacaagugcgauaauacauguauggagagugucaaaaacggcacuuacgacuauccuaaguacuccgaagaggccaaacugaauagagaggaaaucgauggggugaaacuugagagcaccaggaucuaucaaauucuggcuaucuacucuacagucgcgucaaguuuggugcucguugugagccugggagcaauuuccuuuuggaugugcucuaacgguucguuacagugccggauauguaucuga

SEQ ID NO: 135414 - RNA, 1701 nt, Artificial Sequence; identical to SEQ ID NO: 131881
  derived and/or modified CDS sequence (opt3) from hemagglutinin__InfluenzaA__AEO01270

SEQ ID NO: 135415 - RNA, 1701 nt, Artificial Sequence
  derived and/or modified CDS sequence (opt3) from hemagglutinin__InfluenzaA__AEO01271
augaaggccauccuggugguccuccuuuacaccuucgcuacagcaaacgccgacacucugugcauuggcuaucacgcgaauaacagcacggauaccguugacacaguguuggagaaaaauguaacugugacccauuccgucaacuuacuggaagauaagcacaaugggaaacuauguaagcucagaggaguggcuccccugcaucuugguaaaugcgacauagccggcuggauccuggggaacccugagugugaaucuuugucaacagcaaguagcugguccuacauuguugagaccccaucuucggauaauggaacuugcuauccgggcgacuuuaucgauuacgaggagcucagggagcagcugucaagcgugaguuccuucgaacgguuugagauuuuccccaagacaucuagcuggccuaaccacgacuccaauaagggugucaccgccgcuuguccacaugcaggggccaaaucauuuuauaagaaccugaucuggcucgugaaaaagggaaauaguuaccccaaauuaagcaagucuuauauaaacgauaagggcaaagaaguacugguucuuuggggcauccaccacccuuccacgucagcugaccaacagagcuuguaccagaaugccgaugcguacguguucgucgggaccagucgcuauucuaagaaauuuaagccagagauugcaauccgacccaaagugcgugaccaggagggaagaaugaacuacuauuggacucugguggaaccuggugauaagauuacauucgaggccacuggcaaucuagucguuccaagguacgcuuuugccauggaacggaacgcaggguccggaaucauaauuagcgacaccccggugcaugacugcaacacaaccugucaaacgcccaaaggcgcuaucaauacuucgcucccuuuccagaacauucacccaaucacaaucgguaagugccccaaguauguaaaaucuaccaagcugcgccuugccacugggcugagaaaugugccuuccauucagucaaggggauuguuuggcgcgauagccggcuucaucgaagggggauggacagguauggucgauggcugguacggguaucaucaccagaacgaacaaggaaguggcuacgcagcugaccucaaaagcacccagcacgccauugaugagaucacgaauaaggugaacuccguuauagagaaaaugaauacccaguuuacagcuguggguaaggaguucaaccaucuggaaaagcggauugaaaauuuaaacaaaaaggucgacgauggguuccuggacaucuggacuuacaaugccgagcuccuugugcuguuggaaaacgagcgcacccuagauuaucacgacucuaauguaaagaaccuguacgagaagguucgaagccagcucaaaaauaacgcaaaggaaaucggcaacggauguuuugaguucuaucauaagugcgauaauacauguauggaaucagugaaaaacggcacuuacgacuauccaaaguacagugaggaagccaaacugaauagagaggagauugauggggucaaacuugaauccaccaggaucuaucaaauucuggcuauauacagcacaguggcgucuucauugguccucgugguuagucugggagcaaucagcuuuuggaugugcuccaacgguucuuuacagugccggauuuguaucuga

SEQ ID NO: 135416 - RNA, 1701 nt, Artificial Sequence; identical to SEQ ID NO: 130717
  derived and/or modified CDS sequence (opt3) from hemagglutinin__InfluenzaA__AEO01272

SEQ ID NO: 135417 - RNA, 1701 nt, Artificial Sequence; identical to SEQ ID NO: 130717
  derived and/or modified CDS sequence (opt3) from hemagglutinin__InfluenzaA__AEO01273

SEQ ID NO: 135418 - RNA, 1701 nt, Artificial Sequence; identical to SEQ ID NO: 130717
  derived and/or modified CDS sequence (opt3) from hemagglutinin__InfluenzaA__AEO01274

SEQ ID NO: 135419 - RNA, 1701 nt, Artificial Sequence; identical to SEQ ID NO: 132885
  derived and/or modified CDS sequence (opt3) from hemagglutinin__InfluenzaA__AEO01275

SEQ ID NO: 135420 - RNA, 1701 nt, Artificial Sequence
  derived and/or modified CDS sequence (opt3) from hemagglutinin__InfluenzaA__AEO01276
augaaggccauccuggugguccuccuuuacaccuucgcuacagcaaacgccgacacucugugcauuggcuaucacgcgaauaacagcacggauaccguugacacaguguugaagaagaauguaacugugacccauuccgucaacuuacuggaggauaaacacaaugggaagcuauguaaacucagaggaguggcuccccugcaucuugguaagugcaacauagccggcuggauccuggggaauccugaaugugagucuuugucaacagcaaguagcugguccuacauuguugaaaccucuucgucagacaacggaacuugcuauccaggcgauuuuaucgacuacgaggaacucagggagcagcugagcaguguguccucuuucgagcgguuugaaauuuucccgaagacaagcuccuggcccaaucacgauucaaacaaaggugucaccgccgcuuguccucaugcaggggccaagaguuuuuauaaaaaucugaucuggcucgugaagaaaggaaacagcuacccaaaguuaucuaaguccuauauaaaugacaaaggcaaggagguacugguucuuuggggcauccaccaccccucaacgagcgcugaucaacagaguuuguaccagaacgccgacgcguacguguucgucgggacuucucgcuauuccaaaaaguuuaaaccugaaauugcaauccgaccaaaggugcgugaucaggagggaagaaugaauuacuauuggacccugguggagcccggugacaaaauuacauucgaagccacuggcaaccuagucguuccuagguacgcuuuugccauggagcggaacgcagggagcggaaucauaauuucggauaccccagugcaugacugcaauacaaccugucaaacgccgaagggcgcuaucaacacuucucuccccuuccagaauauucacccuaucacaaucgguaagugcccaaaauauguaaaguccaccaaacugcgccuugccacugggcugagaaacgugcccucaauucagaguaggggauuguuuggcgcgauagccggcuucaucgaagggggauggacagguauggucgacggcugguacggguaucaucaccagaaugagcaaggaagcggcuacgcagcugaucucaaguccacccagaacgccauugacgaaaucacgaauaaagugaacucuguuauagagaagaugaauacccaguuuacagcuguggguaaggaguucaaccaccuggaaaaacggauugagaauuuaaacaagaaagucgaugacggguuccuggauaucuggacuuacaaugccgaacuccuugugcuguuggagaacgaacgcacccuagacuaucaugauagcaauguaaagaaccuguacgagaaaguucgaucacagcucaagaacaaugcagaggaaaucggcaacggauguuuugaguucuaucacaagugcgacaauacauguauggaaagugugaaaaacggcacuuacgauuauccuaaguacuccgaggaagccaaacugaauagagaggagauugacggggucaaacuugaaagcaccaggaucuaucaaauucuggcuauauacucuacaguggcgucaaguuugguccucgugguuagccugggagcaaucuccuuuuggaugugcucuaacgguucguuacagugccggauuuguaucuga

SEQ ID NO: 135421 - RNA, 1701 nt, Artificial Sequence; identical to SEQ ID NO: 130717
  derived and/or modified CDS sequence (opt3) from hemagglutinin__InfluenzaA__AEO01277

SEQ ID NO: 135422 - RNA, 1701 nt, Artificial Sequence
  derived and/or modified CDS sequence (opt3) from hemagglutinin__InfluenzaA__AEO01278
augaaggccauccuggugguccuccuuuacaccuucgcuacagcaaacgccgacacucugugcauuggcuaucacgcgaauaacagcacggauaccguugacacaguguuggagaaaaauguaacugugacccauuccgucaacuuacuggaagauaagcacaaugggaaacuauguaagcucagaggaguggcuccccugcaucuugguaaaugcgacauagccggcuggauccuggggaacccugagugugaaucuuugucaacagcaaguagcugguccuacauuguugagaccucuucgucagauaauggaacuugcuauccaggcgacuuuaucgauuacgaagaacucagggagcagcugagcaguguguccucuuucgaacgguuugagauuuucccgaagacaagcuccuggcccaaccacgacucaaauaagggugucaccgccgcuuguccucaugcaggggccaaaaguuuuuauaagaaccugaucuggcucgugaaaaagggaaauagcuacccaaaauuaucuaaguccuauauaaacgauaagggcaaagaaguacugguucuuuggggcauccaccaccccucaacgagcgcugaccaacagaguuuguaccagaaugccgaugcguacguguucgucgggacuucucgcuauuccaagaaauuuaagccugagauugcaauccgaccaaaagugcgugaccaggagggaagaaugaacuacuauuggacccugguggaacccggugauaagauuacauucgaggccacuggcaaucuagucguuccuagguacgcuuuugccauggaacggaacgcagggagcggaaucauaauuucggacaccccagugcaugacugcaacacaaccugucaaacgccgaaaggcgcuaucaauacuucucuccccuuccagaacauucacccuaucacaaucgguaagugcccaaaguauguaaaauccaccaagcugcgccuugccacugggcugagaaaugugcccucaauucagaguaggggauuguuuggcgcgauagccggcuucaucgaagggggauggacagguauggucgauggcugguacggguaucaucaccagaacgaacaaggaagcggcuacgcagcugaccucaaauccacccagcacgccauugaugagaucacgaauaaggugaacucuguuauagagaaaaugaauacccaguuuacagcuguggguaaggaguucaaccaucuggagaagcggauugccaauuuaaacaaaaaggucgacgauggguuccuggacaucuggacuuacaaugcagaacuccuugugcuguuggagaacgaacgcacccuagauuaucacgacagcaauguaaagaaccuguacgagaagguucgaucacagcucaaaaauaacgccaaggagaucggcaacggauguuuugaguucuaucauaagugcgauaauacauguauggagagugugaaaaacggcacuuacgacuauccuaaguacuccgaagaggcuaaacugaauagagaagagauugauggggucaaacuugagagcaccaggaucuaucaaauucuggcgauauacucuacaguggcaucaaguuugguccucgugguuagccugggagccaucuccuuuuggaugugcucuaacgguucguuacagugccggauuuguaucuga

SEQ ID NO: 135423 - RNA, 1701 nt, Artificial Sequence
  derived and/or modified CDS sequence (opt3) from hemagglutinin__InfluenzaA__AEO01279
augaaggccauccuggugguccuccuuuacaccuucgcuacagcaaacgccgacacucugugcauuggcuaucacgcgaauaacagcacggauaccguugacacaguguuggagaaaaauguaacugugacccauuccgucaacuuacuggaagauaagcacaaugggaaacuauguaagcucagaggaguggcuccccugcaucuugguaaaugcaacauagccggcuggauccuggggaauccugagugugaaucuuugucaacagcaaguagcugguccuacauuguugagaccucuucgucagacaacggaacuugcuauccaggcgauuuuaucgacuacgaggagcucagggagcagcugagcaguguguccucuuucgaacgguuugagauuuucccgaagacaagcuccuggcccaaucacgauucaaacaagggugucaccgccgcuuguccucaugcaggggccaaaaguuuuuauaagaaucugaucuggcucgugaaaaagggaaacagcuacccaaaauuaucuaaguccuauauaaaugacaagggcaaagaaguacugguucuuuggggcauccaccaccccucaacgagcgcugaucaacagaguuuguaccagaacgccgacgcguacguguucgucgggacuucucgcuauuccaagaaauuuaagccugagauugcaauccgaccaaaagugcgugaucaggagggaagaaugaauuacuauuggacccugguggaacccggugacaagauuacauucgaggccacuggcaaccuagucguuccuagguacgcuuuugccauggaacggaccgcagggagcggaaucauaauuucggauacaccagugcaugacugcaacaccacgugucaaacuccgaaaggcgcuaucaauacaucucuccccuuccagaacauucacccuaucaccaucgguaagugcccaaaguauguaaaauccacuaagcugcgccuugccacagggcugagaaaugugcccucaauucagaguaggggauuguuuggcgcgauagccggcuucaucgaagggggauggaccgguauggucgacggcugguacggguaucaucaccagaacgaacaaggaagcggcuacgcagcugaucucaaauccacgcagaaugccauugacaagaucaccaacaaaguuaauucugugauagagaagaugaacacacaguuuacugcuguggguaaggaguucaaucaccuggaaaaacggauugagaacuuaaauaagaaagucgaugacggguuccuggauaucuggaccuacaacgccgaacuccuugugcuguuggagaaugaacgcacacuagacuaucaugauagcaacguaaagaaucuguacgagaaaguucgaucacagcucaagaacaacgcaaaggagaucggcaauggauguuuugaguucuaucacaaaugcgacaacacuuguauggaaagugugaagaauggcaccuacgauuauccuaaauacuccgaagaggccaagcugaacagagaagagauugacggggucaaacuugagagcacaaggaucuaucaaauucuggcuauauacucuaccguggcgucaaguuugguccucgugguuagccugggagcaaucuccuuuuggaugugcucuaaugguucguuacagugccggauuuguaucuga

SEQ ID NO: 135424 - RNA, 1701 nt, Artificial Sequence
  derived and/or modified CDS sequence (opt3) from hemagglutinin__InfluenzaA__AEO01282
augaaggccauccuggugguccuccuuuacaccuucgcuacagcaaacgccgacacucugugcauuggcuaucacgcgaauaacagcacggauaccguugacacaguguuggagaaaaauguaacugugacccauuccgucaacuuacuggaagauaagcacaaugggaaacuauguaagcucagaggaguggcuccccugcaucuugguaaaugcaacauagccggcuggauccuggggaauccugagugugaaucuuugucaacagcaaguagcugguccuacauuguugagaccucuucgucagacaacggaacuugcuauccaggcgauuuuaucgacuacgaggagcucagggagcagcugagcaguguguccucuuucgaacgguuugagauuuucccgaagacaagcuccuggcccaaucacgauucaaacaagggugucaccgccgcuuguccucaugcaggggccaaaaguuuuuauaagaaucugaucuggcucgugaaaaagggaaacagcuacccaaaauuaucuaaguccuauauaaaugacaagggcaaagaaguacugguucuuuggggcauccaccaccccucaacgagcgcugaucaacagaguuuguaccagaacgccgacgcguacguguucgucgggacuucucgcuauuccaagaaauuuaagccugagauugcaauccgaccaaaagugcgugaucaggagggaagaaugaauuacuauuggacccugguggaacccggugacaagauuacauucgaggccacuggcaaccuagucguuccuagguacgcuuuugccauggaacggaacgcagggagcggaaucauaauuucggauaccccagugcaugacugcaauacaaccugucaaacgccgaaaggcgcuaucaacacuucucuccccuuccagaauauucacccuaucacaaucgguaagugcccaaaguauguaaaauccaccaagcugcgccuugccacugggcugagaaacgugcccucaauucagaguaggggauuguuuggcgcgauagccggcuucaucgaagggggauggacagguauggucgacggcugguacggguaucaucaccagaaugaacaaggaagcggcuacgcagcugaucucaaauccacccagaacgccauugacgagaucacgaauaaggugaacucuguuauagagaaaaugaauacccaguuuacagcuguggguaaggaguucaaccaccuggaaaagcggauugaaaauuuaaacaaaaaggucgaugacggguuccuggauaucuggacuuacaaugccgagcuccuugugcuguuggaaaacgagcgcacccuagacuaucaugauagcaauguuaaaaagcuguacgagaaaguacgaucacagcucaagaacaacgcaaaggaaaucggcaauggauguuuugaguucuaucacaaaugcaacaauacauguauggaaagugugaagaacggcacuuacgacuauccuaaauacuccgaggaagccaagcugaauagagaggagauugauggggucaaacuugaaagcaccaggaucuaucaaauucuggcuauauacucuacaguggcgucaaguuugguccucgugguuagccugggagcaaucuccuuuuggaugugcucuaacgguucguuacagugccggauuuguaucuga

SEQ ID NO: 135425 - RNA, 1701 nt, Artificial Sequence; identical to SEQ ID NO: 131819
  derived and/or modified CDS sequence (opt3) from hemagglutinin__InfluenzaA__AEO01283

SEQ ID NO: 135426 - RNA, 1701 nt, Artificial Sequence
  derived and/or modified CDS sequence (opt3) from hemagglutinin__InfluenzaA__AEO01284
augaaggccauccuggugguccuccuuuacaccuucgcuauugcaaacgccgacacacugugcauaggcuaucacgcgaauaacagcacugauacgguugacaccguguuggagaagaauguaacagugacucauuccgucaacuuacuggaagauaagcacaaugggaaacuauguaagcucagaggaguggcuccccugcaucuugguaaaugcaacaucgccggcuggauucuggggaauccugagugugaaucuuugucaaccgcaaguagcugguccuacaucguugagacaucuucgucagacaacggaaccugcuauccaggcgauuuuauugacuacgaggagcucagggagcagcugagcaguguguccucuuucgaacgguuugagaucuucccgaagacuagcuccuggcccaaucacgauucaaacaagggugucacagccgcuuguccucaugcaggggccaaaaguuuuuauaagaaucugauauggcucgugaaaaagggaaacagcuacccaaaauuaucuaaguccuauaucaaugacaagggcaaagaaguacugguucuuuggggcauucaccaccccucaaccagcgcugaucaacagaguuuguaccagaacgccgacgcguacguguucgucgggacgucucgcuauuccaagaaauuuaagccugagaucgcaauucgaccaaaagugcgugaucaggagggaagaaugaauuacuauuggacucugguggaacccggugacaagaucaccuucgaggccacaggcaaccuagucguuccuagguacgcuuuugccauggaacggaacgcagggagcggaauaauuaucucggauacuccagugcaugacugcaauaccacaugucaaaccccgaaaggcgcuauuaacacgucucuccccuuccagaauauccacccuaucacuauugguaagugcccaaaguauguaaaauccacaaagcugcgccuugccaccgggcugagaaacgugcccucaauacagaguaggggauuguuuggcgcgaucgccggcuucauugaagggggauggacugguauggucgacggcugguacggguaucaucaccagaaugaacaaggaagcggcuacgcagcugaucucaaauccacacagcacgccaucgacgagauaaccaacaagguaaauucuguuauugagaaaaugaacacgcaguuuaccgcuguggguaaggaguucaaucaucuggaaaagcggaucgaaaacuuaaauaaaaaggucgaugacggguuccuggauaucuggacauacaacgccgagcuccuugugcuguuggaaaaugagcgcacucuagacuaucacgauagcaacgugaaaaaucuguacgagaagguucgaucacagcucaaaaacaacgcaaaggaaauuggcaauggauguuuugaguucuaucauaagugcgacaacaccuguauggaaagugugaaaaauggcacauacgauuauccuaaguacuccgaggaagccaaacugaacagagaggagaucaauggggucaaacuugaaagcacuaggauuuaucaaauacuggcuaucuacucuaccguggcgucaaguuugguccucgugguuagccugggagcaauuuccuuuuggaugugcucuaacgguucguuacagugccggaucuguaucuga

SEQ ID NO: 135427 - RNA, 1701 nt, Artificial Sequence; identical to SEQ ID NO: 131818
  derived and/or modified CDS sequence (opt3) from hemagglutinin__InfluenzaA__AEO01285

SEQ ID NO: 135428 - RNA, 1701 nt, Artificial Sequence; identical to SEQ ID NO: 131911
  derived and/or modified CDS sequence (opt3) from hemagglutinin__InfluenzaA__AEO01286

SEQ ID NO: 135429 - RNA, 1701 nt, Artificial Sequence
  derived and/or modified CDS sequence (opt3) from hemagglutinin__InfluenzaA__AEO01287
augaaggccauccuggugguccuccuuuacaccuucgcuacagcaaacagcgacacucugugcauuggcuaucacgccaauaacuccacggauaccguugacacaguguuggagaaaaauguaacugugacccauucugucaacuuacuggaagauaagcacaaugggaaacuauguaagcucagaggaguggcgccccugcaucuugguaaaugcaacauagcuggcuggauccuggggaauccugagugugaaucauugaguacagccagcuccuggucuuacauuguugagaccucgucaagcgacaacggaacuugcuauccaggcgauuuuaucgacuacgaggagcucagggagcagcugaguuccgugucuagcuucgaacgguuugagauuuucccgaagacauccucauggcccaaucacgauaguaacaagggugucaccgcagccuguccucaugcuggggcaaagagcuuuuauaagaaucugaucuggcucgugaaaaagggaaacucuuacccaaaauuauccaagucauauauaaaugacaagggcaaagaaguacugguucuuuggggcauccaccaccccagcacgagugccgaucaacagucuuuguaccagaacgcugacgccuacguguucgucgggacuucccgcuauagcaagaaauuuaagccugagauugcgauccgaccaaaagugcgugaucaggagggaagaaugaauuacuauuggacccugguggaacccggugacaagauuacauucgaggcaacuggcaaccuagucguuccuagguacgccuuugcuauggaacggaacgccgggucgggaaucauaauuucugauaccccagugcaugacugcaauacaaccugucaaacgccgaaaggcgcaaucaacacuucccuccccuuccagaauauucacccuaucacaaucgguaagugcccaaaguauguaaaaucaaccaagcugcgccuugcuacugggcugagaaacgugcccaguauucagagcaggggauuguuuggcgccauagcgggcuucaucgaagggggauggacagguauggucgacggcugguacggguaucaucaccagaaugaacaaggauccggcuacgccgcagaucucaaaucuacccagaacgcuauugacgagaucacgaauaaggugaacagcguuauagagaaaaugaauacccaguuuacagccguggguaaggaguucaaccaccuggaaaagcggauugaaaauuuaaacaaaaaggucgaugacggguuccuggauaucuggacuuacaaugcugagcuccuugugcuguuggaaaacgagcgcacccuagacuaucaugauucaaauguuaaaaaccuguacgagaagguacgaagucagcucaaaaacaaugccaaggaaaucggcaacggauguuuugaguucuaucacaagugcgacaauacauguauggaauccgugaaaaacggcacuuacgauuauccuaaguacagcgaggaagcaaaacugaauagagaggagauugacggggucaaacuugaaucuaccaggaucuaucaaauucuggccauauacucaacaguggcuaguagcuugguccucgugguuucccugggagcgaucucuuuuuggaugugcucgaacgguagcuuacagugccggauuuguaucuga

SEQ ID NO: 135430 - RNA, 1701 nt, Artificial Sequence; identical to SEQ ID NO: 131070
  derived and/or modified CDS sequence (opt3) from hemagglutinin__InfluenzaA__AEO01288

SEQ ID NO: 135431 - RNA, 1701 nt, Artificial Sequence; identical to SEQ ID NO: 130717
  derived and/or modified CDS sequence (opt3) from hemagglutinin__InfluenzaA__AEO01289

SEQ ID NO: 135432 - RNA, 1701 nt, Artificial Sequence
  derived and/or modified CDS sequence (opt3) from hemagglutinin__InfluenzaA__AEO01290
augaaggccauccuggugguccuccuuuacaccuucgcuacagcaaacgccgacacucugugcauuggcuaucacgcgaauaacagcacggauaccguugacacaguguuggagaaaaauguaacugugacccauuccgucaacuuacuggaagauaagcacaaugggaaacuauguaagcucagaggaguggcuccccugcaucuugguaaaugcaacauagccggcuggauccuggggaauccugagugugaaucuuugucaacagcaaguagcugguccuacauuguugagaccucuucgucagacaacggaacuugcuauccaggcgauuuuaucgacuacgaggagcucagggagcagcugagcaguguguccucuuucgaacgguuugagauuuucccgaagacaagcuccuggcccaaucacgauucaaacaagggugucaccgccgcuuguccucaugcaggggccaaaaguuuuuauaagaaucugaucuggcucgugaaaaagggaaacagcuacccaaaauuaucuaaguccuauauaaaugacaagggcaaagaaguacugguucuuuggggcauccaccaccccucaacgagcgcugaucaacagaguuuguaccagaacgccgacgcguacguguucgucgggacuucucgcuauuccaagaaauuuaagccugagauugcaauccgaccaaaagugcgugaucaggagggaagaaugaauuacuauuggacccugguggaacccggugacaagauuacauucgaggccacuggcaaccuagucguuccuagguacgcuuuugccauggaacggaacgcagggagcggaaucauaauuucggauaccccagugcaugacugcaauacaaccugucaaacgccgaaaggcgcuaucaacacuucucucuccuuccagaauauucaccccaucacaaucgguaagugcccuaaguauguaaaaucaaccaagcugcgccuugccacugggcugagaaacgugccaaguauucagagcaggggauuguuuggcgcgauagccggcuucaucgaagggggauggacagguauggucgacggcugguacggguaucaucaccagaaugaacaaggauccggcuacgcagcugaucucaaaucuacccagaacgccauugacgagaucacgaauaaggugaacagcguuauagagaaaaugaauacccaguuuacagcuguggguaaggaguucaaccaccuggaaaagcggauugaaaauuuaaacaaaaaggucgaugacggguuccuggauaucuggacuuacaaugccgagcuccuugugcuguuggaaaacgagcgcacccuagacuaucaugauucaaauguaaagaaccuguacgagaagguucgaagucagcucaaaaacaaugcaaaggaaaucggcaacggauguuuugaguucuaucacaagugcgacaauacauguauggaauccgugaaaaacggcacuuacgauuaucccaaguacagcgaggaagccaaacugaauagagaggagauugacggggucaaacuugaaucuaccaggaucuaucaaauucuggcuauauacucaacaguggcgaguagcuugguccucgugguuucccugggagcaaucucuuuuuggaugugcucgaacgguagcuuacagugccggauuuguaucuga

SEQ ID NO: 135433 - RNA, 1701 nt, Artificial Sequence; identical to SEQ ID NO: 130717
  derived and/or modified CDS sequence (opt3) from hemagglutinin__InfluenzaA__AEO01291

SEQ ID NO: 135434 - RNA, 1701 nt, Artificial Sequence; identical to SEQ ID NO: 130717
  derived and/or modified CDS sequence (opt3) from hemagglutinin__InfluenzaA__AEO01292

SEQ ID NO: 135435 - RNA, 1701 nt, Artificial Sequence
  derived and/or modified CDS sequence (opt3) from hemagglutinin__InfluenzaA__AEO01294
augaaggccauccuggugguccuccuuuacaccuucgcuacagcaaacgccgacacucugugcauuggcuaucacgcgaauaacagcacggauaccguugacacaguguuggagaaaaauguaacugugacccauuccgucaacuuacuggaagauaagcacaaugggaaacuauguaagcucagaggaguggcuccccugcaucuugguaaaugcgacauagccggcuggauccuggggaacccugagugugaaucuuugucaacagcaaguagcugguccuacauuguugagaccucuucgucagauaauggaacuugcuauccaggcgacuuuaucgauuacgaggagcucagggagcagcugagcaguguguccucuuucgaacgguuugagauuuucccgaagacaagcuccuggcccaaccacgacucaaauaagggugucaccgccgcuuguccucaugcaggggccaaaaguuuuuauaagaaccugaucuggcucgugaaaaagggaaauagcuacccaaaauuaucuaaguccuauauaaacgauaagggcaaagaaguacugguucuuuggggcauccaccaccccucaacgagcgcugaccaacagaguuuguaccagaaugccgaugcguacguguucgucgggacuucucgcuauuccaagaaauuuaagccugagauugcaauccgaccaaaagugcgugaccaggagggaagaaugaacuacuauuggacccugguggaacccggugauaagauuacauucgaggccacuggcaaucuagucguuccuagguacgcuuuugccauggaacggaacgcagggagcggaaucauaauuucggacaccccagugcaugacugcaacacaaccugucaaacgccgaaaggcgcuaucaauacuucucuccccuuccagaacauucacccuaucacaaucgguaagugcccaaaguauguaaaauccaccaagcugcgccuugccacugggcugagaaaugugcccucaauucagaguaggggauuguuuggcgcgauagccggcuucaucgaagggggauggacagguauggucgauggcugguacggguaucaucaccagaacgaacaaggaagcggcuacgcagcugaccucaaauccacccagcacgccauugaugagaucacgaauaaggugaacucuguuauagagaaaaugaauacccaguuuacagcuguggguaaggaguucaaccaucuggaaaagcggauugaaaauuuaaacaaaaaggucgacgauggguuccuggacaucuggacuuacaaugccgagcuccuugugcuguuggaaaacgagcgcacccuagauuaucacgacagcaauguaaagaaccuguacgagaagguucgaucacagcucaaaaauaacgcaaaggaaaucggcaacggauguuuugaguucuaucauaagugcgauaauacauguauggaaagugugaaaaacggcacuuacgacuauccuaaguacuccgaggaagccaaacugaauagagaggagauugauggggucaaacuugaaagcaccaggaucuaucaaauucuggcuauauacucuacaguggcgucaaguuugguccucgugguuagccugggagcaaucuccuuuuggaugugcucuaacgguucguuacagugccggauuuguaucuga

SEQ ID NO: 135436 - RNA, 1701 nt, Artificial Sequence
  derived and/or modified CDS sequence (opt3) from hemagglutinin__InfluenzaA__AEO01295
augaaggccauccuggugguccuccuuuacaccuucgcuacagcaaacgccgacacucugugcauuggcuaucacgcgaauaacagcacggauaccguugacacaguguuggagaaaaauguaacugugacccauuccgucaacuuacuggaagauaagcacaaugggaaacuauguaagcucagaggaguggcuccccugcaucuugguaaaugcaacauagccggcuggauccuggggaauccugagugugaaucuuugucaacagcaaguagcugguccuacauuguugagaccucuaacucggacaauggaacuugcuauccaggcgauuuuaucgacuacgaggagcucagggagcagcugucaagcgugaguuccuucgaacgguuugagauuuucccgaagacaucuagcuggcccaaccacgauuccaauaagggugucaccgccgcuuguccucaugcaggggccaaaucauuuuauaagaaccugaucuggcucgugaaaaagggaaauaguuacccaaaauuaagcaagucuuauauaaacgacaagggcaaagaaguacugguucuuuggggcauccaccaccccuccacgucagcugaucaacagagcuuguaccagaaugccgacgcguacguguucgucgggacuucccgcuauucuaagaaauuuaagccugagauugcaauccgaccaaaagugcgugaucaggagggaagaaugaacuacuauuggacccugguggaacccggugacaagauuacauucgaggccacuggcaaccuagucguuccuagguacgcuuuugccauggaacggaaugcaggguccggaaucauaauuagcgauaccccagugcauuauugcaacacaaccugucaaacgccgaaaggcgcuaucaauacuucgcuccccuuccagaacauucacccuaucacaaucgguaagugcccaaaguacguaaaaucuaccaagcugcgccuugccacugggcugagaaaugugcccuccauucagucaaggggauuguuuggcgcgauagccggcuucaucgaagggggauggacagguauggucgacggcugguauggguaccaucaccagaacgaacaaggaaguggcuacgcagcugaccucaaaagcacccagaaugccauugauaagaucacgaacaaagugaauaguguuauagagaagaugaacacccaguuuacagcuguggguaaggaguucaaucaccuggaaaaacggauugagaacuuaaauaagaaagucgacgauggguuccuggacaucuggacuuauaacgccgaacuccuugugcuguuggagaaugaacgcacccuagauuaccaugacucuaacguaaagaaccuguaugagaaaguucgaagccagcucaagaauaacgcaaaggagaucggcaauggauguuuugaguucuaccacaaaugcgauaacacauguauggaaucagugaagaauggcacuuaugacuacccuaaauauagugaagaggccaagcugaacagagaagagauugauggggucaaacuugaguccaccaggaucuaccaaauucuggcuauauacagcacaguggcgucuucauugguccucgugguuagucugggagcaaucagcuuuuggaugugcuccaaugguucuuuacagugccggauuuguaucuga

SEQ ID NO: 135437 - RNA, 1701 nt, Artificial Sequence; identical to SEQ ID NO: 130717
  derived and/or modified CDS sequence (opt3) from hemagglutinin__InfluenzaA__AEO01296

SEQ ID NO: 135438 - RNA, 1701 nt, Artificial Sequence; identical to SEQ ID NO: 132399
  derived and/or modified CDS sequence (opt3) from hemagglutinin__InfluenzaA__AEO01297

SEQ ID NO: 135439 - RNA, 1701 nt, Artificial Sequence; identical to SEQ ID NO: 132404
  derived and/or modified CDS sequence (opt3) from hemagglutinin__InfluenzaA__AEO01298

SEQ ID NO: 135440 - RNA, 1701 nt, Artificial Sequence; identical to SEQ ID NO: 130717
  derived and/or modified CDS sequence (opt3) from hemagglutinin__InfluenzaA__AEO01299

SEQ ID NO: 135441 - RNA, 1701 nt, Artificial Sequence; identical to SEQ ID NO: 130717
  derived and/or modified CDS sequence (opt3) from hemagglutinin__InfluenzaA__AEO01300

SEQ ID NO: 135442 - RNA, 1701 nt, Artificial Sequence; identical to SEQ ID NO: 130717
  derived and/or modified CDS sequence (opt3) from hemagglutinin__InfluenzaA__AEO01301

SEQ ID NO: 135443 - RNA, 1701 nt, Artificial Sequence; identical to SEQ ID NO: 130717
  derived and/or modified CDS sequence (opt3) from hemagglutinin__InfluenzaA__AEO01302

SEQ ID NO: 135444 - RNA, 1701 nt, Artificial Sequence; identical to SEQ ID NO: 132314
  derived and/or modified CDS sequence (opt3) from hemagglutinin__InfluenzaA__AEO01303

SEQ ID NO: 135445 - RNA, 1701 nt, Artificial Sequence
  derived and/or modified CDS sequence (opt3) from hemagglutinin__InfluenzaA__AEO01304
augaaggccauccuggugguccuccuuuacaccuucgcuacagcaaacgccgacacucugugcauuggcuaucacgcgaauaacagcacggauaccguugacacaguguuggagaaaaauguaacugugacccauuccgucaacuuacuggaagauaagcacaaugggaaacuauguaagcucagaggaguggcuccccugcaucuugguaaaugcaacauagccggcuggauccuggggaauccugagugugaaucuuugucaacagcaaguagcugguccuacauuguugagaccucuucgucagacaacggaacuugcuauccaggcgauuuuaucgacuacgaagaacucagggagcagcugagcaguguguccucuuucgaacgguuugagauuuucccgaaggccagcuccuggcccaaucacgauucaaacaagggugucacagcugcauguccucaugccggggcuaaaaguuuuuauaagaaucugaucuggcucgugaaaaagggaaacagcuacccaaaauuaucuaaguccuauauaaaugacaagggcaaaggcguacugguucuuugggggauccaccaccccucaaccagcgccgaucaacagaguuuguaccagaacgcggacgcauacguguucgucggaacgucucgcuauuccaagaaauuuaagccugaaauugccauccgaccaaaagugcgugaucaggaggguagaaugaauuacuauuggacucugguggagcccggcgacaagauuaccuucgaagcuacagggaaccuagucguuccuagguacgccuuugcaauggagcggaacgcuggaagcggcaucauaauuucggauacuccagugcaugacugcaauaccacaugucaaaccccgaaaggugccaucaacacgucucuccccuuccagaauauucacccuaucacuaucgggaagugcccaaaguauguaaaauccacaaagcugcgccuugcgaccggacugagaaacgugcccucaauucagaguaggggcuuguuuggcgccauagcaggguucaucgaaggagguuggacuggcauggucgacgggugguacggauaucaucaccagaaugagcaaggcagcgguuacgcugccgaucucaaauccacacagaacgcuauugacgaaaucaccaauaaggugaacucuguuauagagaaaaugaauacgcaguuuaccgccguggggaaggaguucaaccaccuggaaaagcggauugagaauuuaaacaaaaaggucgaugacggcuuccuggauaucuggacauacaaugcagaacuccuugugcuguuggagaacgaacgcacucuagacuaucaugauagcaauguaaagaaccuguacgagaagguucgaucacagcucaaaaacaaugccaaggagaucggaaacggcuguuuugaguucuaucacaagugcgacaauaccuguauggagagugugaaaaacgggacauacgauuauccuaaguacuccgaagaggcuaaacugaauagagaagagauugacggagucaaacuugagagcacuaggaucuaucaaauucuggcgauauacucuaccguggcaucaaguuugguccucgugguuagccugggugccaucuccuuuuggaugugcucuaacggcucguuacagugccggauuuguaucuga

SEQ ID NO: 135446 - RNA, 1701 nt, Artificial Sequence
  derived and/or modified CDS sequence (opt3) from hemagglutinin__InfluenzaA__AEO01305
augaaggccauccuggugguccuccuuuacaccuucgcuacagcaagcgccgacacucugugcauuggcuaucacgcgaacaauuccacggauaccguugacacaguguuggagaaaaacguaacugugacccauucugucaauuuacuggaagauaagcacaacgggaaacuauguaagcucagaggaguggcuccccugcaucuugguaaaugcaauauagccggcuggauccuggggaacccugagugugaaucauugaguacagcaagcuccuggucuuacauuguugagaccucgucaagcgacaauggaacuugcuauccaggcgauuuuaucgacuacgaggagcucagggagcagcugaguuccgugucuagcuucgaacgguuugagauuuucccgaagacauccucauggcccaaccacgauaguaauaagggugucaccgccgcuuguccucaugcaggggccaagagcuuuuauaagaaccugaucuggcucgugaaaaagggaaauucuuacccaaaauuauccaagucauauauaaacgacaagggcaaagaaguacugguucuuuggggcauccaccaccccagcacgagugcugaucaacagucuuuguaccagaaugccgacgcguacguguucgucgggacuucccgcuauagcaagaaauuuaagccugagauugcaauccgaccaaaagugcgugaucaggagggaagaaugaacuacuauuggacccugguggaacccggugacaagauuacauucgaggccacuggcaaucuagucguuccuagguacgcuuuugccauggaacggaacgcagggucgggaaucauaauuucugauaccccagugcaugacugcaacacaaccugucaaacgccgaaaggcgcuaucaauacuucccuccccuuccagaacauucacccuaucacaaucgguaagugcccaaaguauguaaaaucaaccaagcugcgccuugccacugggcugagaaaugugcccaguauucagagcaggggauuguuuggcgcgauagccggcuucaucgaagggggauggacagguauggucgacggcugguacggguaucaucaccagaacgaacaaggauccggcuacgcagcugaucucaaaucuacccagaaugccauugacgagaucacgaacaaggugaauagcguuauagagaaaaugaacacccaguuuacagcuguggguaaggaguucaaucaccuggaaaagcggauugaaaacuuaaauaaaaaggucgaugacggguuccuggauaucuggacuuacaacgccgagcuccuugugcuguuggaaaaugagcgcacccuagacuaucaugauucaaacguuaaaaaucuguacgagaagguacgaagucagcucaaaaacaacgcaaaggaaaucggcaauggauguuuugaguucuaucacaagugcgacaacacauguauggaauccgugaaaaauggcacuuacgauuauccuaaguacagcgaggaagccaaacugaacagagaggagauugacggggucaaacuugaaucuaccaggaucuaucaaauucuggcuauauacucaacaguggcgaguagcuugguccucgugguuucccugggagcaaucucuuuuuggaugugcucgaaugguagcuuacagugccggauuuguaucuga

SEQ ID NO: 135447 - RNA, 1701 nt, Artificial Sequence; identical to SEQ ID NO: 130717
  derived and/or modified CDS sequence (opt3) from hemagglutinin__InfluenzaA__AEO01306

SEQ ID NO: 135448 - RNA, 1701 nt, Artificial Sequence; identical to SEQ ID NO: 130717
  derived and/or modified CDS sequence (opt3) from hemagglutinin__InfluenzaA__AEO01307

SEQ ID NO: 135449 - RNA, 1701 nt, Artificial Sequence; identical to SEQ ID NO: 130717
  derived and/or modified CDS sequence (opt3) from hemagglutinin__InfluenzaA__AEO01308

SEQ ID NO: 135450 - RNA, 1701 nt, Artificial Sequence
  derived and/or modified CDS sequence (opt3) from hemagglutinin__InfluenzaA__AEO01309
augaaggccauccuggugguccuccuuuacaccuucgcuauugcaaacgccgacacacugugcauaggcuaucacgcgaauaacagcacugauacgguugacaccguguuggagaaaaauguaacagugacucauuccgucaacuuacuggaagauaagcacaaugggaaacuauguaagcucagaggaguggcuccccugcaucuugguaaaugcaacaucgccggcuggauucuggggaauccugagugugaaucuuugucaaccgcaaguagcugguccuacaucguugagacaucuucgucagacaacggaaccugcuauccaggcgauuuuauugacuacgaggagcucagggagcagcugagcaguguguccucuuucgaacgguuugagaucuucccgaagacuagcuccuggcccaaucacgauucaaacaagggugucacagccgcuuguccucaugcaggggccaaaaguuuuuauaagaaucugauauggcucgugaaaaagggaaacagcuacccaaaauuaucuaaguccuauaucaaugacaagggcaaagaaguacugguucuuuggggcauucaccaccccucaaccagcgcugaucaacagaguuuguaccagaacgccgacgcguacguguucgucgggacgucucgcuauuccaagaaauuuaagccugagaucgcaauucgaccaaaagugcgugaucaggagggaagaaugaauuacuauuggacucugguggaacccggugacaagaucaccuucgaggccacaggcaaccuagucguuccuagguacgcuuuugccauggaacggaacgcagggagcggaauaauuaucucggauacuccagugcaugacugcaauaccacaugucaaaccccgaaaggcgcuauuaacacgucucuccccuuccagaauauccacccuaucacuauugguaagugcccaaaguauguaaaauccacaaagcugcgccuugccaccgggcugagaaacgugcccucaauacagaguaggggauuguuuggcgcgaucgccggcuucauugaagggggauggacugguauggucgacggcugguacggguaucaucaccagaaugaacaaggaagcggcuacgcagcugaucucaaauccacacagcacgccaucgacgagauaaccaacaagguaaauucuguuauugagaaaaugaacacgcaguuuaccgcuguggguaaggaguucaaucaucuggaaaagcggaucgaaaacuuaaauaaaaaggucgaugacggguuccuggauaucuggacauacaacgccgagcuccuugugcuguuggaaaaugagcgcacucuagacuaucacgauagcaacgugaaaaaucuguacgagaagguucgaucacagcucaaaaacaacgcaaaggaaauuggcaauggauguuuugaguucuaucauaagugcgacaacaccuguauggaaagugugaaaaauggcacauacgauuauccuaaguacuccaaagaggccaagcugaacagagaagagaucaauggggucaaacuugagagcacuaggauuuaucaaauacuggcuaucuacucuaccguggcgucaaguuugguccucgugguuagccugggagcaauuuccuuuuggaugugcucuaacgguucguuacagugccggaucuguaucuga

SEQ ID NO: 135451 - RNA, 1701 nt, Artificial Sequence
  derived and/or modified CDS sequence (opt3) from hemagglutinin__InfluenzaA__AEO01310
augaaggccauccuggugguccuccuuuacaccuucgcuacagcaaacgccgacacucugugcauuggcuaucacgcgaauaacagcacggauaccguugacacaguguuggagaaaaauguaacugugacccauuccgucaacuuacuggaagauaagcacaaugggaaacuauguaagcucagaggaguggcuccccugcaucuugguaaaugcaacauagccggcuggauccuggggaauccugagugugaaucuuugucaacagcaaguagcugguccuacauuguugagaccucuucgucagacaacggaacuugcuauccaggcgauuuuaucgacuacgaggagcucagggagcagcugagcaguguguccucuuucgaacgguuugagauuuucccgaagacaagcuccuggcccaaucacgauucaaacaagggugucaccgccgcuuguccucaugcaggggccaaaaguuuuuauaagaaucugaucuggcucgugaaaaagggaaacagcuacccaaaauuaucuaaguccuauauaaaugaccgcggcaaggaaguacugguucuuuggggcauccaccaccccucaacgagcgcugaucaacagaguuuguaccagaacgccgacgcguacguguucgucgggacuucucgauauuccaaaaaguuuaaaccugagauugcaauccguccaaaggugagagaucaggagggaaggaugaauuacuauuggacccugguggaacccggugacaaaauuacauucgaggccacuggcaaccuagucguuccucgguacgcuuuugccauggaacgcaacgcagggagcggaaucauaauuucggauaccccagugcaugacugcaauacaaccugucaaacgccgaagggcgcuaucaacacuucucuccccuuccagaauauucacccuaucacaaucgguaaaugcccaaaguauguaaaguccaccaaacugagacuugccacugggcugaggaacgugcccucaauucagagucggggauuguuuggcgcgauagccggcuucaucgaagggggauggacagguauggucgacggcugguacggguaucaucaccagaaugaacaaggaagcggcuacgcagcugaucucaaguccacccagaacgccauugacgagaucacgaauaaagugaacucuguuauagagaagaugaauacccaguuuacagcuguggguaaagaguucaaccaccuggaaaagcgcauugaaaauuuaaacaagaaagucgaugacggguuccuggauaucuggacuuacaaugccgagcuccuugugcuguuggaaaacgagcgaacccuagacuaucaugauagcaauguaaagaaccuguacgagaaaguuagaucacagcucaagaacaaugcaaaagaaaucggcaacggauguuuugaguucuaucacaagugcgacaauacauguauggaaagugugaagaacggcacuuacgauuauccuaaauacuccgaggaagccaagcugaauagggaggagauugacggggucaaacuugaaagcacccggaucuaucaaauucuggcuauauacucuacaguggcgucaaguuugguccucgugguuagccugggagcaaucuccuuuuggaugugcucuaacgguucguuacagugccguauuuguaucuga

SEQ ID NO: 135452 - RNA, 1701 nt, Artificial Sequence; identical to SEQ ID NO: 130717
  derived and/or modified CDS sequence (opt3) from hemagglutinin__InfluenzaA__AEO01311

SEQ ID NO: 135453 - RNA, 1701 nt, Artificial Sequence
  derived and/or modified CDS sequence (opt3) from hemagglutinin__InfluenzaA__AEO01312
augaaggccauccuggugguccuccuuuacaccuucgcuacagcaaacgccgacacucugugcauuggcuaucacgcgaauaacagcacggauaccguugacacaguguuggagaaaaauguaacugugacccauuccgucaacuuacuggaagauaagcacaaugggaaacuauguaagcucagaggaguggcuccccugcaucuugguaaaugcaacauagccggcuggauccuggggaauccugagugugaaucuuugucaacagcaaguagcugguccuacauuguugagaccucuucgucagacaacggaacuugcuauccaggcgauuuuaucgacuacgaggagcucagggagcagcugagcaguguguccucuuucgaacgguuugagauuuucccgaagacaagcuccuggcccaaucacgauucaaacaagggugucaccgccgcuuguccucaugcaggggccaaaaguuuuuauaagaaucugaucuggcucgugaaaaagggaaacagcuacccaaaauuaucuaaguccuauauaaaugacaagggcaaagaaguacugguucuuuggggcauccaccaccccucaacgagcgcugaucaacagaguuuguaccagaacgccgacgcguacguguucgucgggacuucucgcuauuccaagaaauuuaagccugagauugcaauccgaccaaaagugcgugaucaggagggaagaaugaauuacuauuggacccugguggaacccggugacaagauuacauucgaggccacuggcaaccuagucguuccuagguacgcuuuugccauggaacggaacgcagggagcggaaucauaauuucggauaccccagugcaugacugcaauacaaccugucaaacgccgaaaggcgcuaucaacacuucucuccccuuccagaauauucacccuaucacaaucgguaagugcccaaaguauguaaaauccaccaagcugcgccuugccacugggcugagaaacgugcccucaauucagaguaggggauuguuuggcgcgauagccggcuucaucgaagggggauggacagguauugucgacggcugguacggguaucaucaccagaaugaacaaggaagcggcuacgcagcugaucucaaauccacccagaacgccaucgacgagauaacgaauaaggugaacucuguuauugagaaaaugaauacccaguuuacagcuguggguaaggaguucaaccaccuggaaaagcggaucgaaaauuuaaacaaaaaggucgaugacggguuccuggauaucuggacuuacaaugccgagcuccuugugcuguuggaaaacgagcgcacccuagacuaucaugauagcaauguaaagaaccuguacgagaagguucgaucacagcucaaaaacaaugcaaaggaaauuggcaacggauguuuugaguucuaucacaagugcgacaauacauguauggaaagugugaaaaacggcacuuacgauuauccuaaguacuccgaggaagccaaacugaauagagaggagaucgacggggucaaacuugaaagcaccaggauuuaucaaauacuggcuaucuacucuacaguggcgucaaguuugguccucgugguuagccugggagcaauuuccuuuuggaugugcucuaacgguucguuacagugccggaucuguaucuga

SEQ ID NO: 135454 - RNA, 1701 nt, Artificial Sequence; identical to SEQ ID NO: 131070
  derived and/or modified CDS sequence (opt3) from hemagglutinin__InfluenzaA__AEO01313

SEQ ID NO: 135455 - RNA, 1701 nt, Artificial Sequence; identical to SEQ ID NO: 131881
  derived and/or modified CDS sequence (opt3) from hemagglutinin__InfluenzaA__AEO01314

SEQ ID NO: 135456 - RNA, 1701 nt, Artificial Sequence
  derived and/or modified CDS sequence (opt3) from hemagglutinin__InfluenzaA__AEO01315
augaaggccauccuggugguccuccuuuacaccuucgcuacagcaaacgccgacacucugugcauuggcuaucacgcgaauaacagcacggauaccguugacacaguguuggagaaaaauguaacugugacccauuccgucaacuuacuggaagauaagcacaauagaaaacuauguaagcucagggguguggcuccccugcaucuuggaaaaugcaacauagccgguuggauccugggcaauccugagugugaaucuuugucaacagcaaguagcugguccuacauuguugagaccucuucgucagacaacgggacuugcuauccaggagauuuuaucgacuacgaagaacuccgggagcagcugagcaguguguccucuuucgaacgcuuugagauuuucccgaagacaagcuccuggcccaaucacgauucaaacaagggcgucaccgccgcuuguccucaugcaggggccaaaaguuuuuauaagaaucugaucuggcucgugaaaaaggggaacagcuacccaaaauuaucuaaguccuauauaaaugacaagggaaaagaaguacugguucuuuggggcauccaccaccccucaacgagcgcugaucaacagaguuuguaccagaacgccgacgcguacguguucgucggcacuucucgauauuccaagaaauuuaagccugagauugcaauccguccaaaagugagagaucaggaggggaggaugaauuacuauuggacccugguggaacccggagacaagauuacauucgaggccacugguaaccuagucguuccucgguacgcuuuugccauggaacgcaacgcaggcagcgggaucauaauuucggauaccccagugcaugacugcaauacaaccugucaaacgccgaaaggagcuaucaacacuucucuccccuuccagaauauucacccuaucacaaucggcaagugcccaaaguauguaaaauccaccaagcugagacuugccacuggucugaggaacgugcccucaauucagagucggggguuguuuggagcgauagccggcuucaucgagggcggguggacaggaauggucgacgguugguacggcuaucaucaccagaaugaacaagggagcggauacgcagcugaucucaaauccacccagaacgccauugacgagaucacgaauaaggugaacucuguuauagagaaaaugaauacccaguuuacagcugugggcaaggaguucaaccaccuggagaagcgcauugaaaauuuaaacaaaaaggucgaugacgguuuccuggauaucuggacuuacaaugccgagcuccuugugcuguuggaaaacgagcgaacccuagacuaucaugauagcaauguaaagaaccuguacgagaagguuagaucacagcucaaaaacaaugcaaaggaaaucgggaacggcuguuuugaguucuaucacaagugcgacaauacauguauggaaagugugaaaaacggaacuuacgauuauccuaaguacuccgaggaagccaaacugaauagggaggagauugacggcgucaaacuugaaagcacccggaucuaucaaauucuggcuauauacucuacaguggcgucaaguuugguccucgugguuagccugggggcaaucuccuuuuggaugugcucuaacggaucguuacagugccguauuuguaucuga

SEQ ID NO: 135457 - RNA, 1701 nt, Artificial Sequence; identical to SEQ ID NO: 130717
  derived and/or modified CDS sequence (opt3) from hemagglutinin__InfluenzaA__AEO01316

SEQ ID NO: 135458 - RNA, 1701 nt, Artificial Sequence; identical to SEQ ID NO: 130717
  derived and/or modified CDS sequence (opt3) from hemagglutinin__InfluenzaA__AEO01317

SEQ ID NO: 135459 - RNA, 1701 nt, Artificial Sequence; identical to SEQ ID NO: 130717
  derived and/or modified CDS sequence (opt3) from hemagglutinin__InfluenzaA__AEO01318

SEQ ID NO: 135460 - RNA, 1701 nt, Artificial Sequence; identical to SEQ ID NO: 130717
  derived and/or modified CDS sequence (opt3) from hemagglutinin__InfluenzaA__AEO01319

SEQ ID NO: 135461 - RNA, 1701 nt, Artificial Sequence
  derived and/or modified CDS sequence (opt3) from hemagglutinin__InfluenzaA__AEO01321
augaaggccauccuggugguccuccuuuacaccuucgcuacagcaaacgccgacacucugugcauuggcuaucacgcgaauaacagcacggauaccguugacacaguguuggagaaaaauguaacugugacccauuccgucaacauauuagaagauaagcacaaugggaaacuguguaagcuaagaggaguggcuccccuccaucuggguaaaugcaacaucgccggcuggauucuugggaauccugagugugaaucucugucaacagcaaguagcugguccuacaucguugagaccucuucgucagacaacggaacuugcuauccaggcgauuuuauugacuacgaagaguugagggagcagcucagcaguguguccucuuucgaacgguuugagaucuucccgaagacaagcuccuggcccaaucacgauucaaacaagggugucaccgccgcuuguccucaugcaggggccaaaaguuuuuauaagaaucugauauggcuggugaaaaagggaaacagcuacccaaaacucucuaaguccuauaucaaugacaagggcaaagaaguauuaguucuguggggcauucaccaccccucaacgagcgcugaucaacagagucuuuaccagaacgccgacgcguacguguucgucgggacuucucgcuauuccaagaaauuuaagccugagaucgcaauucgaccaaaagugcgugaucaggagggaagaaugaauuacuauuggaccuugguggaacccggugacaagaucacauucgaggccacuggcaaccuggucguuccuagguacgcuuuugccauggaacggaacgcagggagcggaauaauuaucucggauaccccagugcaugacugcaauacaaccugucaaacgccgaaaggcgcuauuaacacuucucuacccuuccagaauauccacccuaucacaauugguaagugcccaaaguauguaaaauccaccaagcuccgccuggccacugggcuuagaaacgugcccucaauacagaguaggggacuguuuggcgcgaucgccggcuucauugaagggggauggacagguauggucgacggcugguacggguaucaucaccagaaugaacaaggaagcggcuacgcagcugauuugaaauccacccagaacgccaucgacgagauaacgaauaaggugaacucuguuauugagaaaaugaauacccaguuuacagcuguggguaaggaguucaaccaccucgagaagcggaucgaaaaucugaacaaaaaggucgaugacggguucuuagauaucuggacuuacaaugccgagcugcucgcacuucuggaaaacgagcgcaccuuggacuaucaugauagcaaugugaaaaaccuauacgagaagguacgaucacagcugaaaaacaaugccaaggaaauuggcaacggauguuuugaguucuaucacaagugcgacaauacauguauggaaaguguuaaaaacggcacuuacgauuauccuaaguacuccgaggaagcuaaacucaauagagaggagaucgacggggugaagcuggaaagcaccaggauuuaucaaauacuugcgaucuacucuacagucgcaucaagucugguguuggucgugagccucggagccauuuccuuuuggaugugcucuaacgguucgcugcagugccggaucuguaucuga

SEQ ID NO: 135462 - RNA, 1701 nt, Artificial Sequence; identical to SEQ ID NO: 130717
  derived and/or modified CDS sequence (opt3) from hemagglutinin__InfluenzaA__AEO01322

SEQ ID NO: 135463 - RNA, 1701 nt, Artificial Sequence; identical to SEQ ID NO: 132399
  derived and/or modified CDS sequence (opt3) from hemagglutinin__InfluenzaA__AEO01323

SEQ ID NO: 135464 - RNA, 1701 nt, Artificial Sequence; identical to SEQ ID NO: 132314
  derived and/or modified CDS sequence (opt3) from hemagglutinin__InfluenzaA__AEO01324

SEQ ID NO: 135465 - RNA, 1701 nt, Artificial Sequence; identical to SEQ ID NO: 130717
  derived and/or modified CDS sequence (opt3) from hemagglutinin__InfluenzaA__AEO01325

SEQ ID NO: 135466 - RNA, 1701 nt, Artificial Sequence
  derived and/or modified CDS sequence (opt3) from hemagglutinin__InfluenzaA__AEO01326
augaaggccauccuggugguccuccuuuacaccuucgcuacagcaaacgccgacacucugugcauuggcuaucacgcgaauaacagcacggauaccguugacacaguguuggagaagaauguaacugugacccauuccgucaacuuacuggaagauaagcacaaugggaaacuauguaagcucagaggaguggcuccccugcaucuugguaaaugcaacauagccggcuggauccuggggaauccugagugugaaucuuugucaacagcaaguagcugguccuacauuguugagaccucuucgucagacaacggaacuugcuauccaggcgauuuuaucgacuacgaggagcucagggagcagcugagcaguguguccucuuucgaacgguuugagauuuucccgaagacaagcuccuggcccaaucacgauucaaacaagggugucaccgccgcuuguccucaugcaggggccaaaaguuuuuauaagaaucugaucuggcucgugaaaaagggaaacagcuacccaaaauuaucuaaguccuauauaaaugacaagggcaaagaaguacugguucuuuggggcauccaccaccccucaacgagcgcugaucaacagaguuuguaccaggacgccgaugcguacguguucgucgggacuucucgcuauuccaagaaauuuaagccugagauugcaauccgaccaaaagugcgugaccaggagggaagaaugaacuacuauuggacccugguggaacccggugauaagauuacauucgaggccacuggcaaucuagucguuccuagguacgcuuuugccauggaacggaacgcagggagcggaaucauaauuucggacaccccagugcaugacugcaacacaaccugucaaacgccgaaaggcgcuaucaauacuucucuccccuuccagaacauucacccuaucacaaucgguaagugcccaaaguauguaaaauccaccaagcugcgccuugccacugggcugagaaaugugcccucaauucagaguaggggauuguuuggcgcgauagccggcuucaucgaagggggauggacagguauggucgauggcugguacggguaucaucaccagaacgaacaaggaagcggcuacgcagcugaccucaaauccacccagaaugccauugaugagaucacgaacaagguaaauucuguuauagagaaaaugaacacccaguuuacagcuguggguaaggaguucaaucaccuggaaaagcggauugaaaacuuaaauaaaaaggucgacgauggguuccuggacaucuggacuuacaacgccgagcuccuugugcuguuggaaaaugagcgcacccuagauuaucaugacagcaacgugaaaaaucuguacgagaagguucgaucacagcucaaaaacaacgcaaaggaaaucggcaauggauguuuugaguucuaucacaagugcgauaacacauguauggaaagugugaaaaauggcacuuacgacuauccuaaguacuccgaggaagccaaacugaacagagaggagauugauggggucaaacuugaaagcaccaggaucuaucaaauucuggcuauauacucuacaguggcgucaaguuugguccucgugguuagccugggagcaaucuccuuuuggaugugcucuaaugguucguuacagugccggauuuguaucuga

SEQ ID NO: 135467 - RNA, 1701 nt, Artificial Sequence; identical to SEQ ID NO: 130717
  derived and/or modified CDS sequence (opt3) from hemagglutinin__InfluenzaA__AEO01327

SEQ ID NO: 135468 - RNA, 1701 nt, Artificial Sequence; identical to SEQ ID NO: 135426
  derived and/or modified CDS sequence (opt3) from hemagglutinin__InfluenzaA__AEO01328

SEQ ID NO: 135469 - RNA, 1701 nt, Artificial Sequence; identical to SEQ ID NO: 130717
  derived and/or modified CDS sequence (opt3) from hemagglutinin__InfluenzaA__AEO01330

SEQ ID NO: 135470 - RNA, 1701 nt, Artificial Sequence
  derived and/or modified CDS sequence (opt3) from hemagglutinin__InfluenzaA__AEO01331
augaaggccauccuggugguccuccuuuacaccuucgcuacagcaaacgccgacacucugugcauuggcuaucacgcgaauaacagcacggauaccguugacacauuguuagagaaaaaugugacuguaacccauuccgugaaccugcuagaagauaagcacaaugggaaacucuguaagcugagaggagucgcuccccuucaucuggguaaaugcaacauagccggcuggaucuuggggaauccugagugugaaucucucucaacagcaaguagcugguccuacauuguggagaccucuucgucagacaacggaacuugcuauccaggcgauuuuaucgacuacgaggagcugagggagcagcugagcaguguuuccucuuucgaacgguuugagauuuucccgaagacaagcuccuggcccaaucacgauucaaacaagggugugaccgccgcuuguccucaugcaggggccaaaaguuuuuauaagaaucucaucugguuagucaaaaagggaaacagcuacccaaaacugucuaaguccuauauaaaugacaagggcaaagaagugcuuguauuguggggcauccaccaccccucaacgagcgcugaucaacagagucuguaccagaacgccgacgcguacguuuucguggggacuucucgcuauuccaagaaauuuaagccugagauugcaauccgaccaaaaguccgugaucaggagggaagaaugaauuacuauuggacccuaguggaacccggugacaagauuacauucgaggccacuggcaaccucguggucccuagguacgcuuuugccauggaacggaacgcagggagcggaaucauaauuucggauaccccaguucaugacugcaauacaaccugucaaacgccgaaaggcgcuaucaacacuucucugcccuuccagaauauucacccuaucacaaucgguaagugcccaaaguaugugaaauccaccaaacuucgccuggccacuggguugagaaacguacccucaauucagaguaggggacucuuuggcgcgauagccggcuucaucgaagggggauggacagguaugguggacggcugguacggguaucaucaccagaaugaacaaggaagcggcuacgcagcugaucugaaguccacccagaacgccauugacgagaucacgaauaaggucaacucugugauagagaaaaugaauacccaguuuacagcuguugguaaggaguucaaccacuuagaaaagcggauugaaaaucugaacaaaaagguggaugacggguuccucgauaucuggacuuacaaugccgagcuucuggucuugcuagaaaacgagcgcacccuggacuaucaugauagcaaugugaaaaaccucuacgagaagguacgaucacagcugaaaaacaaugcaaaggaaaucggcaacggauguuuugaguucuaucacaagugcgacaauacauguauggaaaguguuaaaaacggcacuuacgauuauccuaaguacuccgaggaagccaaacuuaauagagaggagauugacggggugaagcuggaaagcaccaggaucuaucaaauuuuggcuauauacucuacagucgcgucaagucucgugcuggucgugagcuuaggagcaaucuccuuuuggaugugcucuaacgguucgcugcagugccggauuuguaucuga

SEQ ID NO: 135471 - RNA, 1701 nt, Artificial Sequence
  derived and/or modified CDS sequence (opt3) from hemagglutinin__InfluenzaA__AEO01332
augaaggccauccuggugguccuccuuuacaccuucgcuacagcaaacgccgacacucugugcauuggcuaucacgcgaauaacagcacggauaccguugacacaguguuggagaaaaauguaacugugacccauuccgucaacuuacuggaagauaagcacaaugggaaacuauguaagcucagaggaguggcuccccugcaucuugguaaaugcaacauagccggcuggauccuggggaauccugagugugaaucuuugucaacagcaaguagcugguccuacauuguugagaccucuucgucagacaacggaacuugcuauccaggcgauuuuaucgacuacgaagaacucagggagcagcugagcaguguguccucuuucgaacgguuugagauuuucccgaagacaagcuccuggcccaaucacgauucaaacaagggugucaccgccgcuuguccucaugcaggggccaaaaguuuuuauaagaaucugaucuggcucgugaaaaagggaaacagcuacccaaaauuaucuaaguccuauauaaaugacaagggcaaagaaguacugguucuuuggggcauccaccaccccucaacgagcgcugaucaacagaguuuguaccagaacgccgacgcguacguguucgucgggcugucucgcuauuccaagaaauuuaagccugagauugcaauccgaccaaaagugcgugagcaggaaggaagaaugaauuacuauuggacucuaguggagcccggugauaagauuaccuucgaagccacaggcaaccucgucguuccuagguacgcuuuugccauggagcggaacgcagggagcggaaucgugauaucggacacuccaguacaugauugcaauaccacaugucaaaccccgaaaggcgcuauuaacacgucucugcccuuccagaauauccacccuauuacuaucgguaagugcccaaaguaugugaaauccacaaaacuucgccuggccaccggguugagaaacguccccucaauccagaguaggggacucuuuggcgcgauugccggcuucauagaagggggauggacugguaugguggacggcugguacggguaucaucaccagaaugagcaaggaagcggcuacgcagcugaccugaaauccacacagaacgccaucgaugagauuaccaauaagguuaacucugugaucgaaaagaugaauacgcaguuuaccgcugucgguaaggaguucaaccacuuagaaaagcggauggagaaucugaacaaaaagguggacgauggguuccucgacauauggacauacaaugccgaacuucugguauugcuagagaacgagcgcacucuggauuaucaugacagcaauguuaaaaaccucuacgaaaaggugcgaucacagcugaaaaccaacgcaaaggagauuggcaauggauguuuugaguucuaucacaagugcgauaacacauguauggagagugucaaaaauggcacuuacgacuauccuaaguacuccgaagaggccaaacuuaacagagaggaaaucgauggggugaagcuggagagcaccaggaucuaucaaauuuuggcuaucuacucuacagucgcgucaagucucgugcugguugugagcuuaggagcaauuuccuuuuggaugugcucuaaugguucgcugcagugccggauauguaucuga

SEQ ID NO: 135472 - RNA, 1701 nt, Artificial Sequence; identical to SEQ ID NO: 132885
  derived and/or modified CDS sequence (opt3) from hemagglutinin__InfluenzaA__AEO01333

SEQ ID NO: 135473 - RNA, 1701 nt, Artificial Sequence
  derived and/or modified CDS sequence (opt3) from hemagglutinin__InfluenzaA__AEO01334
augaaggccauccuggugguccuccuuuacaccuucgcuacagcaaacgccgacacucugugcauuggcuaucacgcgaauaacagcacggauaccguugacacaauauuggagaagaaugugacuguaacccauuccgugaacuuacuggaagauaagcacaaugggaaacuauguaagcucagaggagucgcuccccugcaucuugguaaaugcaacaucgccggcuggauucuggggaauccugagugugaaucuuugucaacagcaaguagcugguccuacaucguggagaccucuucgucagacaacggaacuugcuauccaggcgauuuuauugacuacgaggagcucagggagcagcugagcaguguuuccucuuucgaacgguuugagaucuucccgaagacaagcuccuggcccaaucacgauucaaacaagggugugaccgccgcuuguccucaugcaggggccaaaaguuuuuauaagaaucugauauggcucgucaaaaagggaaacagcuacccaaaauuaucuaaguccuauaucaaugacaagggcaaagaagugcugguacuuuggggcauucaccaccccucaacgagcgcugaucaacagaguuuguaccagaacgccgacgcguacguuuucguggggacuucucgcuauuccaagaaauuuaagccugagaucgcaauucgaccaaaaguccgugaucaggagggaagaaugaauuacuauuggacccugguggaacccggugacaagaucacauucgaggccacuggcaaccuaguggucccuagguacgcuuuugccauggaacggaacgcagggagcggaauaauuaucucggauaccccaguucaugacugcaauacaaccugucaaacgccgaaaggcgcuauuaacacuucucuccccuuccagaauauccacccuaucacaauugguaagugcccaaaguaugugaaauccaccaagcugcgccuugccacugggcugagaaacguacccucaauacagaguaggggauuguuuggcgcgaucgccggcuucauugaagggggauggacagguaugguggacggcugguacggguaucaucaccagaaugaacaaggaagcggcuacgcagcugaucucaaauccacccagaacgccaucgacgagauaacgaauaaggucaacucugugauugagaaaaugaauacccaguuuacagcuguugguaaggaguucaaccaccuggaaaagcggaucgaaaauuuaaacaaaaagguggaugacggguuccuggauaucuggacuuacaaugccgagcuccuuguccuguuggaaaacgagcgcacccuagacuaucaugauagcaaugugaaaaaccuguacgagaagguacgaucacagcucaaaaacaaugcaaaggaaauuggcaacggauguuuugaguucuaucacaagugcgacaauacauguauggaaaguguuaaaaacggcacuuacgauuauccuaaguacuccgaggaagccaaacugaauagagaggagaucgacggggugaaacuugaaagcaccaggauuuaucaaauacuggcuaucuacucuacagucgcgucaaguuuggugcucgucgugagccugggagcaauuuccuuuuggaugugcucuaacgguucguuacagugccggaucuguaucuga

SEQ ID NO: 135474 - RNA, 1701 nt, Artificial Sequence; identical to SEQ ID NO: 132314
  derived and/or modified CDS sequence (opt3) from hemagglutinin__InfluenzaA__AEO01335

SEQ ID NO: 135475 - RNA, 1701 nt, Artificial Sequence
  derived and/or modified CDS sequence (opt3) from hemagglutinin__InfluenzaA__AEO01336
augaaggccauccuggugguccuccuuuacaccuucgcuacagcaaacgccgacacucugugcauuggcuaucacgcgaauaacagcacggauaccguugacacaguguuggagaaaaauguaacugugacccauuccgucaacuuacuggaagauaagcacaaugggaaacuauguaagcucagaggaguggcuccccugcaucuugguaaaugcaacauagccggcuggauccuggggaauccugagugugaaucuuugucaacagcaaguagcugguccuacauuguugagaccucuucgucagacaacggaacuugcuauccaggcgauuuuaucgacuacgaagaacucagggagcagcugagcaguguguccucuuucgaacgguuugagauuuucccgaagacaagcuccuggcccaaucacgauucaaacaagggugucaccgccgcuuguccucaugcaggggccaaaaguuuuuauaagaaucugaucuggcucgugaaaaagggaaacagcuacccaaaauuaaauaagucuuauauaaacgacaagggcaaagaaguacugguucuuuggggcauccaccaccccuccacgucagcugaucaacagagcuuguaccagaaugccgacgcguacguguucgucgggacuucccgcuauucuaagaaauuuaagccugagauugcaauccgaccaaaagugcgugaucaggagggaagaaugaacuacuauuggacccugguggaacccggugacaagauuacauucgaggccacuggcaaccuagucguuccuagguacgcuuuugccauggaacggaaugcaggguccggaaucauaauuagcgauaccccagugcaugacugcaacacaaccugucaaacgccgaaaggcgcuaucaauacuucgcuccccuuccagaacauucacccuaucacaaucggugagugcccaaaguauguaaagucuaccaaacugcgccuugccacugggcugagaaaugugcccuccauucagucaaggggauuguuuggcgcgauagccggcuucaucgaagggggauggacagguauggucgacggcugguacggguaucaucaccagaacgagcaaggaaguggcuacgcagcugaucucaagagcacccagaaugccauugacaaaaucacgaacaaggugaauaguguuauagagaaaaugaacacccaguuuacagcuguggguaaggaguucaaucaccuggagaagcggauugaaaacuuaaauaaaaaggucgaugacggguuccuggauaucuggacuuacaacgccgagcuccuugugcuguuggaaaaugagcgcacccuagacuaucaugauucuaacguaaagaaccuguacgagaagguucgaagccagcucaaaaauaacgcaaaggaaaucggcaauggauguuuugaguucuaucacaagugcgacaacacauguauggaaucagugaaaaauggcacuuacgauuauccuaaguacagugaggaagccaaacugaacagagaggagauugacggggucaaacuugaauccaccaggaucuaucaaauucuggcuauauacagcacaguggcgucuucauugguccucgugguuagucugggagcaaucagcuuuuggaugugcuccaaugguucuuuacagugccggauuuguaucuga

SEQ ID NO: 135476 - RNA, 1701 nt, Artificial Sequence
  derived and/or modified CDS sequence (opt3) from hemagglutinin__InfluenzaA__AEO01337
augaaggccauccuggugguccuccuuuacaccuucgcuacagcaaacgccgacacucugugcauuggcuaucacgcgaauaacagcacggauaccguugacacaguguuggagaagaauguaacugugacccauuccgucaacuuacuggaagauaagcacaaugggaaacuauguaagcucagaggaguggcuccccugcaucuugguaaaugcaacauagccggcuggauccuggggaauccugagugugaaucuuugucaacagcaaguagcugguccuacauuguugagaccucuucgucagacaacggaacuugcuauccaggcgauuuuaucgacuacgaggagcucagggagcagcugagcaguguguccucuuucgaacgguuugagauuuucccgaagacaagcuccuggcccaaucacgauucaaacaagggugucaccgccgcuuguccucaugcaggggccaaaaguuuuuauaagaaucugaucuggcucgugaaaaagggaaacagcuacccaaaauuaucuaaguccuauauaaaugacaagggcaaagaaguacugguucuuuggggcauccaccaccccucaacgagcgcugaucaacagaguuuguaccagaacgccgacgcguacguguucgucgggacuucucgcuauuccaagaaauuuaagccugagauugcaauccgaccaaaagugcgugaucaggagggaagaaugaauuaccauuggacccugguggaacccggugacaagauuacauucgaggccacuggcaaccuagucguuccuagguaugcuuuugccauggaacggaacgcagggagcggaaucauaauuucggauaccccagugcacgacugcaauacaaccugucaaacgccgaaaggcgcuaucaacacuucucuccccuuccagaauauucauccuaucacaaucgguaagugcccaaaguacguaaaauccaccaagcugcgccuugccacugggcugagaaacgugcccucaauucagaguaggggauuguuuggcgcgauagccggcuucaucgaagggggauggacagguauggucgacggcugguauggguaccaccaccagaaugaacaaggaagcggcuaugcagcugaucucaaauccacccagcaugccauugacgagaucacgaacaagguaaauucuguuauagagaaaaugaacacccaguuuacagcuguggguaaggaguucaaucaccuggaaaagcggauugaaaacuuaaauaaaaaggucgaugacggguuccuggauaucuggacuuacaacgccgagcuccuugugcuguuggaaaaugagcgcacccuagacuaccaugauagcaacgugaaaaaucuguaugagaagguucgaucacagcucaaaaacaacgcaaaggaaaucggcaauggauguuuugaguucuaccacaagugcgacaacacauguauggaaagugugaaaaauggcacuuaugauuacccuaaguauuccgaggaagccaaacugaacagagaggagauugacggggucaaacuugaaagcaccaggaucuaccaaauucuggcuauauauucuacaguggcgucaaguuugguccucgugguuagccugggagcaaucuccuuuuggaugugcucuaaugguucguuacagugccggauuuguaucuga

SEQ ID NO: 135477 - RNA, 1701 nt, Artificial Sequence; identical to SEQ ID NO: 130717
  derived and/or modified CDS sequence (opt3) from hemagglutinin__InfluenzaA__AEO01338

SEQ ID NO: 135478 - RNA, 1701 nt, Artificial Sequence; identical to SEQ ID NO: 134589
  derived and/or modified CDS sequence (opt3) from hemagglutinin__InfluenzaA__AEO01339

SEQ ID NO: 135479 - RNA, 1701 nt, Artificial Sequence; identical to SEQ ID NO: 135435
  derived and/or modified CDS sequence (opt3) from hemagglutinin__InfluenzaA__AEO01340

SEQ ID NO: 135480 - RNA, 1701 nt, Artificial Sequence; identical to SEQ ID NO: 135435
  derived and/or modified CDS sequence (opt3) from hemagglutinin__InfluenzaA__AEO01341

SEQ ID NO: 135481 - RNA, 1701 nt, Artificial Sequence; identical to SEQ ID NO: 130717
  derived and/or modified CDS sequence (opt3) from hemagglutinin__InfluenzaA__AEO01342

SEQ ID NO: 135482 - RNA, 1701 nt, Artificial Sequence
  derived and/or modified CDS sequence (opt3) from hemagglutinin__InfluenzaA__AEO01343
augaaggccauccuggugguccuccuuuacaccuucgcuacagcaaacgccgacacucugugcauuggcuaucacgcgaauaacagcacggauaccguugacacaguguuggagaaaaauguaacugugacccauuccgucaacuuacuggaagauaagcacaaugggaaacuauguaagcucagaggaguggcuccccugcaucuugguaaaugcaacauagccggcuggauccuggggaauccugagugugaaucuuugucaacagcaaguagcugguccuacauuguugagaccucuaacucggacaauggaacuugcuauccaggcgauuuuaucgacuacgaggagcucagggagcagcugucaagcgugaguuccuucgaacgguuugagauuuucccgaagacaucuagcuggcccaaccacgauuccaauaagggugucaccgccgcuuguccucaugcaggggccaaaucauuuuauaagaaccugaucuggcucgugaaaaagggaaauaguuacccaaaauuaagcaagucuuauauaaacgacaagggcaaagaaguacugguucuuuggggcauccaccaccccuccacgucagcugaucaacagagcuuguaccagaaugccgacgcguacguguucgucgggacuucccgcuauucuaagaaauuuaagccugagauugcaauccgaccaaaagugcgugaucaggagggaagaaugaacuacuauuggacccugguggaacccggugacaagauuacauucgaggccacuggcaaccuagucguuccuagguacgcuuuugccauggaacggaaugcaggguccggaaucauaauuagcgauaccccagugcaugacugcaacacaaccugucaaacgccgaaaggcgcuaucaauacuucgcuccccuuccagaacauucacccuaucacaaucgguaagugcccaaaguauguaaaaucuaccaagcugcgccuugccacugggcugagaaaugugcccuccauucagucaaggggauuguuuggcgcgauagccggcuucaucgaagggggauggacagguauggucgacggcugguacggguaucaucaccagaacgaacaaggaaguggcuacgcagcugaucucaaaagcacccagaaugccauugacaagaucacgaacaaagugaauaguguuauagagaagaugaacacccaguuuacagcuguggguaaggaguucaaucaccuggaaaaacggauugagaacuuaaauaagaaagucgaugacggguuccuggauaucuggacuuacaacgccgaacuccuugugcuguuggagaaugaacgcacccuagacuaucaugauucuaacguaaagaaccuguacgagaaaguucgaagccagcucaagaauaacgcaaaggagaucggcaauggauguuuugaguucuaucacaaaugcgacaacacauguauggaaucagugaagaauggcacuuacgauuauccuaaauacagugaagaggccaagcugaacagagaagagauugacggggucaaacuugaguccaccaggaucuaucaaauucuggcuauauacagcacaguggcgucuucauugguccucgugguuagucugggagcaaucagcuuuuggaugugcuccaaugguucuuuacagugccggauuuguaucuga

SEQ ID NO: 135483 - RNA, 1701 nt, Artificial Sequence
  derived and/or modified CDS sequence (opt3) from hemagglutinin__InfluenzaA__AEO01344
augaaggccauccuggugguccuccuuuacaccuucgcuacagcaaacgccgacacucugugcauuggcuaucacgcgaauaacagcacggauaccguugacacaguguuggagaaaaauguaacugugacccauuccgucaacauauuagaagauaagcacaaugggaaacuguguaagcuaagaggaguggcuccccuccaucuggguaaaugcaacaucgccggcuggauucuugggaauccugagugugaaucucugucaacagcaaguagcugguccuacaucguugagaccucuucgucagacaacggaacuugcuauccaggcgauuuuauugacuacgaagaguugagggagcagcucagcaguguguccucuuucgaacgguuugagaucuucccgaagacaagcuccuggcccaaucacgauucaaacaagggugucaccgccgcuuguccucaugcaggggccaaaaguuuuuauaagaaucugauauggcuggugaaaaagggaaacagcuacccaaaacucucuaaguccuauaucaaugacaagggcaaagaaguauuaguucuguggggcauucaccaccccucaacgagcgcugaucaacagagucuuuaccagaacgccgacgcguacguguucgucgggacuucuaaguauuccaaaaaguuuaaaccugagaucgcaauucgcccaaaggugcgagaucaggagggacguaugaauuacuauuggaccuugguggaacccggugacaaaaucacauucgaggccacuggcaaccuggucguuccuagauacgcuuuugccauggaaaggaacgcagggagcggaauaauuaucucggauaccccagugcaugacugcaauacaaccugucaaacgccgaagggcgcuauuaacacuucucuacccuuccagaauauccacccuaucacaauugguaagugcccaaaauauguaaaguccaccaaacuccggcuggccacugggcuucgcaacgugcccucaauacagaguagaggacuguuuggcgcgaucgccggcuucauugaagggggauggacagguauggucgacggcugguacggguaucaucaccagaaugaacaaggaagcggcuacgcagcugauuugaaguccacccagaacgccaucgacgagauaacgaauaaagugaacucuguuauugagaagaugaauacccaguuuacagcuguggguaaggaguucaaccaccucgagaaaaggaucgaaaaucugaacaagaaagucgaugacggguucuuagauaucuggacuuacaaugccgagcugcucgugcuucuggaaaacgagcggaccuuggacuaucaugauagcaauguaaagaaccuauacgagaaaguucgcucacagcugaagaacaaugcaaaggaaauuggcaacggauguuuugaguucuaucacaaaugcgacaauacauguauggaaagugugaagaacggcacuuacgauuauccuaaauacuccgaggaagccaagcucaaucgagaggagaucgacggggucaaacuggaaagcaccagaauuuaucaaauacuugcuaucuacucuacaguggcgucaagucuggucuuggugguuagccucggagcaauuuccuuuuggaugugcucuaacgguucgcugcagugcaggaucuguaucuga

SEQ ID NO: 135484 - RNA, 1701 nt, Artificial Sequence; identical to SEQ ID NO: 134589
  derived and/or modified CDS sequence (opt3) from hemagglutinin__InfluenzaA__AEO01345

SEQ ID NO: 135485 - RNA, 1701 nt, Artificial Sequence; identical to SEQ ID NO: 130717
  derived and/or modified CDS sequence (opt3) from hemagglutinin__InfluenzaA__AEO01346

SEQ ID NO: 135486 - RNA, 1701 nt, Artificial Sequence
  derived and/or modified CDS sequence (opt3) from hemagglutinin__InfluenzaA__AEO01347
augaaggccauccuggugguccuccuuuacaccuucgcuacagcaaacgccgacacucugugcauuggcuaucacgcgaauaacagcacggauaccguugacacaguguuggagaaaaauguaacugugacccauuccgucaacuuacuggaagauaagcacaaugggaaacuauguaagcucagaggaguggcuccccugcaucuugguaaaugcaacauagccggcuggauccuggggaauccugagugugaaucuuugucaacagcaaguagcugguccuacauuguugagaccucuucgucagacaacggaacuugcuauccaggcgauuuuaucgacuacgaagaacucagggagcagcugagcaguguguccucuuucgaacgguuugagauuuucccgaagacaagcuccuggcccaaucacgauucaaacaagggugucaccgccgcuuguccucaugcaggggccaaaaguuuuuauaagaaucugaucuggcucgugaaaaagggaaacagcuacccaaaauuaucuaaguccuauauaaaugacaagggcaaagaaguacugguucuuuggggcauccaccaccccucaacgagcgcugaucaacagaguuuguaccagaacgccgacgcguacguguucgucgggacuucucgcuauuccaagaaauuuaagccugagauugcaauccgaccaaaagugcgugaucaggagggaagaaugaauuacuauuggacccugguggaacccggugacaagauuacauucgaggccacuggcaaccuagucguuccuagguacgcuuuugccauggaacggaacgcagggagcggaaucauaauuucggauaccccagugcaugacugcaauacaaccugucaaacgccgaaaggcgcuaucaacacuucucuccccuuccagaauauucacccuaucacaaucggugagugcccaaaguauguaaaguccaccaaacugcgccuugccacugggcugagaaacgugcccucaauucagaguaggggauuguuuggcgcgauagccggcuucaucgaagggggauggacagguauggucgacggcugguacggguaucaucaccagaaugagcaaggaagcggcuacgcagcugaucucaaguccacccagaacgccauugacaaaaucacgaauaaggugaacucuguuauagagaaaaugaauacccaguuuacagcuguggguaaggaguucaaccaccuggagaagcggauugaaaauuuaaacaaaaaggucgaugacggguuccuggauaucuggacuuacaaugccgagcuccuugugcuguuggaaaacgagcgcacccuagacuaucaugauagcaauguaaagaaccuguacgagaagguucgaucacagcucaaaaacaaugcaaaggaaaucggcaacggauguuuugaguucuaucacaagugcgacaauacauguauggaaagugugaaaaacggcacuuacgauuauccuaaguacuccgaggaagccaaacugaauagagaggagauugacggggucaaacuugaaagcaccaggaucuaucaaauucuggcuauauacucuacaguggcgucaaguuugguccucgugguuagccugggagcaaucuccuuuuggaugugcucuaacgguucguuacagugccggauuuguaucuga

SEQ ID NO: 135487 - RNA, 1701 nt, Artificial Sequence
  derived and/or modified CDS sequence (opt3) from hemagglutinin__InfluenzaA__AEO01348
augaaggccauccuggugguccuccuuuacaccuucgcuauugcaaacgccgacacacugugcauaggcuaucacgcgaauaacagcacugauacgguugacaccguguuggagaaaaauguaacagugacucauuccgucaacuuacuggaagauaagcacaaugggaaacuauguaagcucagaggaguggcuccccugcaucuugguaaaugcaacaucgccggcuggauucuggggaauccugagugugaaucuuugucaaccgcaaguagcugguccuacaucguugagacaucuucgucagacaacggaaccugcuauccaggcgauuuuauugacuacgaagaacucagggagcagcugagcaguguguccucuuucgaacgguuugagaucuucccgaagacuagcuccuggcccaaucacgauucaaacaagggugucacagccgcuuguccucaugcaggggccaaaaguuuuuauaagaaucugauauggcucgugaaaaagggaaacagcuacccaaaauuaucuaaguccuauaucaaugacaagggcaaagaaguacugguucuuuggggcauucaccaccccucaaccagcgcugaucaacagaguuuguaccagaacgccgacgcguacguguucgucgggacgucucgcuauuccaagaaauuuaagccugagaucgcaauucgaccaaaagugcgugagcaggaaggaagaaugaauuacuauuggacucugguggagcccggugauaagaucaccuucgaagccacaggcaaccuagucguuccuagguacgcuuuugccauggagcggaacgcagggagcggaauaauuaucucggacacuccagugcaugauugcaauaccacaugucaaaccccgaaaggcgcuauuaacacgucucuccccuuccagaauauccacccuaucacuauugguaagugcccaaaguauguaaaauccacaaagcugcgccuugccaccgggcugagaaacgugcccucaauacagaguaggggauuguuuggcgcgaucgccggcuucauugaagggggauggacugguauggucgacggcugguacggguaucaucaccagaaugagcaaggaagcggcuacgcagcugaccucaaauccacacagaacgccaucgaugagauaaccaauaaggugaacucuguuauugaaaagaugaauacgcaguuuaccgcuguggguaaggaguucaaccaccuggaaaagcggaucgagaauuuaaacaaaaaggucgacgauggguuccuggacaucuggacauacaaugccgaacuccuugugcuguuggagaacgagcgcacucuagauuaucaugacagcaauguuaaaaaccuguacgaaaagguacgaucacagcucaaaaacaaugcaaaggagauuggcaacggauguuuugaguucuaucacaagugcgauaauaccuguauggagagugugaaaaacggcacauacgacuauccuaaguacuccgaagaggccaaacugaauagagaggaaaucgauggggucaaacuugagagcacuaggauuuaucaaauacuggcuaucuacucuaccguggcgucaaguuugguccucgugguuagccugggagcaauuuccuuuuggaugugcucuaacgguucguuacagugccggaucuguaucuga

SEQ ID NO: 135488 - RNA, 1701 nt, Artificial Sequence
  derived and/or modified CDS sequence (opt3) from hemagglutinin__InfluenzaA__AEO01349
augaaggccauccuggugguccuccuuuacaccuucgcuacagcaaacgccgacacucugugcauuggcuaucacgcgaauaacagcacggauaccguugacacaguguuggagaaaaauguaacugugacccauuccgucaacuuacuggaagauaagcacaaugggaaacuauguaagcucagaggaguggcuccccugcaucuugguaaaugcaacauagccggcuggauccuggggaauccugagugugaaucuuugucaacagcaaguagcugguccuacauuguugagaccucuucgucagaaaacggaacuugcuauccaggcgacuuuaucgauuacgaggagcucagggaacagcugagcaguguguccucuuucgagcgguuugaaauuuucccgaagacaagcuccuggcccaaucacgacucaaacaagggugucaccgccgcuuguccucaugcaggggccaaaaguuuuuauaagaaucugaucuggcucgugaaaaagggaaacagcuacccaaaauuaucuaaguccuauauaaaugauaagggcaaagagguacugguucuuuggggcauccaccaccccucaacgagcgcugaccaacagaguuuguaccagaacgccgaugcguacguguucgucgggacuucucgcuauuccaagaaauuuaagccugagauugcaauccgaccaaaagugcgugaccaggaaggaagaaugaauuacuauuggacccugguggagcccggugauaagauuacauucgaagccacuggcaaccuagucguuccuagguacgcuuuugccauggagcggaacgcagggagcggaaucauaauuucggacaccccagugcaugauugcaauacaaccugucaaacgccgaaaggcgcuaucaacacuucucuccccuuccagaauauucacccuaucacaaucgguaagugcccaaaguauguaaaauccaccaagcugcgccuugccacugggcugagaaacgugcccucaauucagaguaggggauuguuuggcgcgauagccggcuucaucgaagggggauggacagguauggucgacggcugguacggguaucaucaccagaaugagcaaggaagcggcuacgcagcugaccucaaauccacccagaacgccauugaugagaucacgaauaaggugaacucuguuauagaaaagaugaauacccaguuuacagcuguggguaaagaguucaaccaccuggaaaagcggauugagaauuuaaacaaaaaggucgacgauggguuccuggacaucuggacuuacaaugccgaacuccuugugcuguuggagaacgagcgcacccuagauuaucaugacagcaauguuaaaaaccuguacgaaaagguacgaucacagcucaaaaacaaugcaaaggagaucggcaacggauguuuugaguucuaucacaagugcgauaauacauguauggaaagugugaaaaacggcacuuacgacuauccuaaguacuccaaagaagccaagcugaauagagaggagauugauggggucaaacuugaaagcaccaggaucuaucaaauucuggcuauauacucuacaguggcgucaaguuugguccucgugguuagccugggagcaaucuccuuuuggaugugcucuaacgguucguuacagugccggauuuguaucuga

SEQ ID NO: 135489 - RNA, 1701 nt, Artificial Sequence
  derived and/or modified CDS sequence (opt3) from hemagglutinin__InfluenzaA__AEO01350
augaaggccauccuggugguccuccuuuacaccuucgcuacaacuaacgcagacacgcugugcauuggcuaucacgccaauaacagcaccgauacaguugacacuguguuggagaagaauguaaccgugacacauuccgucaacuuacuggaagauaagcacaaugggaaacuauguaagcucagaggaguggcgccccugcaucuugguaaaugcaacauagcuggcuggauccuggggaauccugagugugaaucuuugucaaccgccaguagcugguccuacauuguugagacuucuucgucagacaacggaacaugcuauccaggcgauuuuaucgacuacgaggagcucagggagcagcugagcaguguguccucuuucgaacgguuugagauuuucccgaagaccagcuccuggcccaaucacgauucaaacaagggugucacggcagccuguccucaugcuggggcaaaaaguuuuuauaagaaucugaucuggcucgugaaaaagggaaacagcuacccaaaauuaucuaaguccuauauaaaugacaagggcaaagaaguacugguucuuuggggcauccaccaccccucaacuagcgccgaucaacagaguuuguaccagaacgcugacgccuacguguucgucgggaccucucgcuauuccaagaaauuuaagccugagauugcgauccgaccaaaagugcgugaucaggagggaagaaugaauuacuauuggacacugguggaacccggugacaagauuacuuucgaggcaaccggcaaccuagucguuccuagguacgccuuugcuauggaacggaacgccgggagcggaaucauaauuucggauacaccagugcaugacugcaauaccacgugucaaacuccgaaaggcgcaaucaacacaucucuccccuuccagaauauucacccuaucaccaucgguaagugcccaaaguauguaaaauccacuaagcugcgccuugcuacagggcugagaaacgugcccucaauucagaguaggggauuguuuggcgccauagcgggcuucaucgaagggggauggaccgguauggucgacggcugguacggguaucaucaccagaaugaacaaggaagcggcuacgccgcagaucucaaauccacgcagcacgcuauugacgagaucaccaacaagguaaauucuguuauagagaaaaugaacacacaguuuacugccguggguaaggaguucaaucaucuggaaaagcggauugaaaacuuaaauaaaaaggucgaugacggguuccuggauaucuggaccuacaacgcugagcuccuugugcuguuggaaaaugagcgcacacuagacuaucacgauagcaacgugaaaaaucuguacgagaagguucgaucacagcucaaaaacaacgccaaggaaaucggcaauggauguuuugaguucuaucauaagugcgacaacacuuguauggaaagugugaaaaauggcaccuacgauuauccuaaguacuccgaggaagcaaaacugaacagagaggagauugacggggucaaacuugaaagcacaaggaucuaucaaauucuggccauauacucuaccguggcuucaaguuugguccucgugguuagccugggagcgaucuccuuuuggaugugcucuaaugguucguuacagugccggauuuguaucuga

SEQ ID NO: 135490 - RNA, 1701 nt, Artificial Sequence; identical to SEQ ID NO: 130717
  derived and/or modified CDS sequence (opt3) from hemagglutinin__InfluenzaA__AEO01351

SEQ ID NO: 135491 - RNA, 1701 nt, Artificial Sequence; identical to SEQ ID NO: 131881
  derived and/or modified CDS sequence (opt3) from hemagglutinin__InfluenzaA__AEO01352

SEQ ID NO: 135492 - RNA, 1701 nt, Artificial Sequence
  derived and/or modified CDS sequence (opt3) from hemagglutinin__InfluenzaA__AEO01353
augaaggccauccuggugguccuccuuuacaccuucgcuacagcaaacgccgacacucugugcauuggcuaucacgcgaauaacagcacggauaccguugacacaguguuggagaaaaauguaacugugacccauuccgucaacuuacuggaagauaagcacaaugggaaacuauguaagcucagaggaguggcuccccugcaucuugguaaaugcaacauagccggcuggauccuggggaauccugagugugaaucuuugucaacagcaaguagcugguccuacauuguugagaccucuucgucagacaacggaacuugcuauccaggcgauuuuaucgacuacgaggagcucagggagcagcugagcaguguguccucuuucgaacgguuugagauuuucccgaagacaagcuccuggcccaaucacgauucaaacaagggugucaccgccgcuuguccucaugcaggggccaaaaguuuuuauaagaaucugaucuggcucgugaaaaagggaaacagcuacccaaaauuaucuaaguccuauauaaaugacaagggcaaagaaguacugguucuuuggggcauccaccaccccucaacgagcgcugaucaacagaguuuguaccagaacgccgacgcguacguguucgucgggacuucucgcuauuccaagaaauuuaagccugagauugcaauccgaccaaaagugcgugaucaggagggaagaaugaauuacuauuggacccugguggaacccggugacaagauuacauucgaggccacuggcaaccuagucguuccuagguacgcuuuugccauggaacggaacgcagggagcggaaucauaauuucggauaccccagugcaugacugcaauacaaccugucaaacgccgaaaggcgcuaucaacacuucucuccccuuccagaauauucacccuaucacaaucgguaagugcccaaaguauguaaaauccaccaagcugcgccuugccacugggcugagaaacgugcccucaauucagaguaggggauuguuuggcgcgauagccggcuucaucgaagggggauggacagguauggucgacggcugguacggguaucaucaccagaaugaacaaggaagcggcuacgcagcugaucucaaauccacccagaacgccauugacgagaucacgaauaaggugaacucuguuauagagaaaaugaauacccaguuuacagcuguggguaaggaguucaaccaccuggaaaagcggauugaaaauuuaaacaaaaaggucgaugacggguuccuggauaucuggacuuacaaugccgagcuccuugugcuguuggaaaacgagcgcacccuagacuaucaugauagcaauguaaagaaccuguacgagaagguucgaucacagcucaaaaacaaugcaaaggaaaucggcaacggauguuuugaguucuaucacaagugcgacaauacauguauggaaagugugaaaaacggcacuuacgauuauccuaaguacuccgaggaagccaaacugaauagagaggagauugacggggucaaacuugaaagcaccaggaucuaucaaauucuggcuauauacucuacaguggcgucaaguuugguccucgugguuuuucugggagcaaucagcuucuggaugugcuccaacgguucuuuacagugccggauuuguaucuga

SEQ ID NO: 135493 - RNA, 1701 nt, Artificial Sequence
  derived and/or modified CDS sequence (opt3) from hemagglutinin__InfluenzaA__AEO01354
augaaggccauccuggugguccuccuuuacaaauucgcuaccgcaaacgccgacacacugugcauuggcuaucacgcgaauaacagcacugauacgguugacaccguguuggagaagaauguaacagugacucauuccgucaacuuacuggaagauaaacacaaugggaagcuauguaaacucagaggaguggcuccccugcaucuugguaagugcaacauagccggcuggauccuggggaauccugagugugaaucuuugucaaccgcaaguagcugguccuacauuguugagacaucuucgucagacaacggaaccugcuauccaggcgauuuuaucgacuacgaggagcucagggagcagcugagcaguguguccucuuucgaacgguuugagauuuucccgaagacuagcuccuggcccaaucacgauucaaacaaaggugucacagccgcuuguccucaugcaggggccaagaguuuuuauaaaaaucugaucuggcucgugaagaaaggaaacagcuacccaaaguuaucuaaguccuauauaaaugacaaaggcaaggaaguacugguucuuuggggcauccaccaccccucaaccagcgcugaucaacagaguuuguaccagaacgccgacgcguacguguucgucgggacgucucgcuauuccaaaaaguuuaaaccugagauugcaauccgaccaaaggugcgugaucaggagggaagaaugaauuacuauuggacucugguggaacccggugacaaaauuaccuucgaggccacaggcaaccuagucguuccuagguacgcuuuugccauggaacggaacgcagggagcggaaucauaauuucggauacuccagugcaugacugcaauaccacaugucaaaccccgaagggcgcuaucaacacgucucuccccuuccagaauauucacccuaucacuaucgguaagugcccaaaauauguaaaguccacaaaacugcgccuugccaccgggcugagaaacgugcccucaauucagaguaggggauuguuuggcgcgauagccggcuucaucgaagggggauggacugguauggucgacggcugguacggguaucaucaccagaaugaacaaggaagcggcuacgcagcugaucucaaguccacacagaacgccauugacgagaucaccaauaaagugaacucuguuauagagaagaugaauacgcaguuuaccgcuguggguaaggaguucaaccaccuggaaaaacggauugaaaauuuaaacaagaaagucgaugacggguuccuggauaucuggacauacaaugccgagcuccuugugcuguuggaaaacgagcgcacucuagacuaucaugauagcaauguaaagaaccuguacgagaaaguucgaucacagcucaagaacaaugcaaaggaaaucggcaacggauguuuugaguucuaucacaaaugcgacaauaccuguauggaaagugugaagaacggcacauacgauuauccuaaauacuccgaggaagccaagcugaauagagaggagauugacggggucaaacuugaaagcacuaggaucuaucaaauucuggcuauauacucuaccguggcgucaaguuugguccucgugguuagccugggagcaaucuccuuuuggaugugcucuaacgguucguuacagugccggauuuguaucuga

SEQ ID NO: 135494 - RNA, 1701 nt, Artificial Sequence; identical to SEQ ID NO: 132137
  derived and/or modified CDS sequence (opt3) from hemagglutinin__InfluenzaA__AEO01355

SEQ ID NO: 135495 - RNA, 1701 nt, Artificial Sequence; identical to SEQ ID NO: 130717
  derived and/or modified CDS sequence (opt3) from hemagglutinin__InfluenzaA__AEO01356

SEQ ID NO: 135496 - RNA, 1701 nt, Artificial Sequence
  derived and/or modified CDS sequence (opt3) from hemagglutinin__InfluenzaA__AEO01358
augaaggccauccuggugguccuccuuuacaccuucgcuacagcaaacgccgacacucugugcguuggcuaucacgcgaauaacagcacggauaccguggacacaguauuggagaaaaaugugacugucacccauuccgugaacuuacuggaagauaagcacaaugggaaacuauguaagcucagaggaguugcuccccugcaucuugguaaaugcaacauugccggcuggauacuggggaauccugagugugaaucuuugucaacagcaaguagcugguccuacaucguggagaccucuucgucagacaacggaacuugcuauccaggcgauuuuauugacuacgaggagcucagggagcagcugagcagugucuccucuuucgaacgguuugagaucuucccgaagacaagcuccuggcccaaucacgauucaaacaagggugugaccgccgcuuguccucaugcaggggccaaaaguuuuuauaagaaucugauuuggcucguaaagaagggaaacagcuacccaaaauuaucuaaguccuauaucaaugacaagggcaaagaaguucuggugcuuuggggcauacaccaccccucaacgagcgcugaucaacagaguuuguaccagaacgccgacgcguacgucuucguggggacuucucgcuauuccaagaaauuuaagccugagaucgcaauucgaccaaaagugcgugaucaggagggaagaaugaauuacuauuggacccuggucgaacccggugacaagaucacauucgaggccacuggcaaccuaguugugccuagguacgcuuuugccauggaacggaacgcagggagcggaauuaucauaucggauaccccagcucaugacugcaauacaaccugucaaacgccgaaaggcgccauuaacacuucucuccccuuccagaauauccacccuauuacaaucgguaagugcccaaaguauguaaaauccaccaagcugcgccuugcgacugggcugagaaacgugcccucaauccagaguaggggauuguuuggcgccauugcaggcuucauagaagggggauggacagguauggucgacggcugguacggguaucaucaccagaaugaacaaggaagcggcuacgcugccgaucucaaauccacccagaacgcuaucgacgagauuacgaauaaggugaacucuguuaucgagaaaaugaauacccaguuuacagccguggguaaggaguucaaccaccuggaaaagcggauagaaaauuuaaacaaaaaggucgaugacggguuccuggauauuuggacuuacaaugcagagcuccuugugcuguuggaaaacgagcgcacccuagacuaucaugauagcaauguuaaaaaccuguacgagaagguacgaucacagcucaaaaacaaugccaaggaaaucggcaacggauguuuugaguucuaucacaagugcgacaauacauguauggaaagugugaaaaacggcacuuacgauuauccuaaguacuccgaggaagcuaaacugaauagagaggagaucgacggggucaaacuugaaagcaccaggauuuaucaaauccuggcgauuuacucuacaguggcaucaaguuugguccucgugguuagccugggagccauauccuuuuggaugugcucuaacgguucguuacagugccggaucuguauuuga

SEQ ID NO: 135497 - RNA, 1701 nt, Artificial Sequence; identical to SEQ ID NO: 132137
  derived and/or modified CDS sequence (opt3) from hemagglutinin__InfluenzaA__AEO01359

SEQ ID NO: 135498 - RNA, 1701 nt, Artificial Sequence; identical to SEQ ID NO: 135470
  derived and/or modified CDS sequence (opt3) from hemagglutinin__InfluenzaA__AEO01360

SEQ ID NO: 135499 - RNA, 1701 nt, Artificial Sequence; identical to SEQ ID NO: 131070
  derived and/or modified CDS sequence (opt3) from hemagglutinin__InfluenzaA__AEO01361

SEQ ID NO: 135500 - RNA, 1701 nt, Artificial Sequence; identical to SEQ ID NO: 135470
  derived and/or modified CDS sequence (opt3) from hemagglutinin__InfluenzaA__AEO01362

SEQ ID NO: 135501 - RNA, 1701 nt, Artificial Sequence; identical to SEQ ID NO: 131881
  derived and/or modified CDS sequence (opt3) from hemagglutinin__InfluenzaA__AEO01363

SEQ ID NO: 135502 - RNA, 1701 nt, Artificial Sequence
  derived and/or modified CDS sequence (opt3) from hemagglutinin__InfluenzaA__AEO01365
augaaggccauccuggugguccuccuuuacaccuucgcuacagcaaacgccgacacucugugcauuggcuaucacgcgaauaacagcacggauaccguugacacaguguugaaaaagaauguaacugugacccauuccgucaacauauuagaggauaaacacaaugggaagcuguguaaacuaagaggaguggcuccccuccaucuggguaagugcaacaucgccggcuggauucuugggaauccugaaugugagucucugucaacagcaaguagcugguccuacaucguugaaaccucuucgucagacaacggaacuugcuauccaggcgauuuuauugacuacgaggaauugagggagcagcucagcaguguguccucuuucgagcgguuugaaaucuucccgaagacaagcuccuggcccaaucacgauucaaacaaaggugucaccgccgcuuguccucaugcaggggccaagaguuuuuauaaaaaucugauauggcuggugaagaaaggaaacagcuacccaaagcucucuaaguccuauaucaaugacaaaggcaaggagguauuaguucuguggggcauucaccaccccucaacgagcgcugaucaacagagucuuuaccagaacgccgacgcguacguguucgucgggacuucucgcuauuccaaaaaguuuaaaccugaaaucgcaauucgaccaaaggugcgugaucaggagggaagaaugaauuacuauuggaccuugguggagcccggugacaaaaucacauucgaagccacuggcaaccuggucguuccuagguacgcuuuugccauggagcggagcgcagggucgggaauaauuaucucugauaccccagugcaugacugcaacacaaccugucaaacgccgaagggcgcuauuaauacuucccuacccuuccagaacauccacccuaucacaauugguaagugcccaaaauauguaaagucaaccaaacuccgccuggccacugggcuuagaaaugugcccaguauacagagcaggggacuguuuggcgcgaucgccggcuucauugaagggggauggacagguauggucgacggcugguacggguaucaucaccagaacgagcaaggauccggcuacgcagcugauuugaagucuacccagaaugccaucgacgaaauaacgaacaaagugaauagcguuauugagaagaugaacacccaguuuacagcuguggguaaggaguucaaucaccucgaaaaacggaucgagaaccugaauaagaaagucgaugacggguucuuagauaucuggacuuacaacgccgaacugcucgugcuucuggagaaugaacgcaccuuggacuaucaugauucaaacguaaagaaucuauacgagaaaguucgaagucagcugaagaacaacgcaaaggagauuggcaauggauguuuugaguucuaucacaaaugcgacaacacauguauggaauccgugaagaauggcacuuacgauuauccuaaauacagcgaagaggccaagcucaacagagaagagaucgacggggucaaacuggagucuaccaggauuuaucaaauacuugcuaucuacucaacaguggcgaguagccuggucuuggugguuucccucggagcaauuucuuuuuggaugugcucgaaugguagccugcagugccggaucuguaucuga

SEQ ID NO: 135503 - RNA, 1701 nt, Artificial Sequence
  derived and/or modified CDS sequence (opt3) from hemagglutinin__InfluenzaA__AEO01366
augaaggccauccuggugguccuccuuuacaccuucgcuacagcaaacgccgacacucugugcauuggcuaucacgcgaauaacagcacggauaccguugacacaguguuggagaagaauguaacugugacccauuccgucaacuuacuggaagauaagcacaaugggaaacuauguaagcucagaggaguggcuccccugcaucuugguaaaugcaacauagccggcuggauccuggggaauccugagugugaaucuuugucaacagcaaguagcugguccuacauuguugagaccucuucgucagacaacggaacuugcuauccaggcgauuuuaucgacuacgaggagcucagggagcagcugagcaguguguccucuuucgaacgguuugagauuuucccgaagacaagcuccuggcccaaucacgauucaaacaagggugucaccgccgcuuguccucaugcaggggccaaaaguuuuuauaagaaucugaucuggcucgugaaaaagggaaacagcuacccaaaauuaucuaaguccuauauaaaugacaagggcaaagaaguacugguucuuuggggcauccaccaccccucaacgagcgcugaucaacagaguuuguaccagaacgccgacgcguacguguucgucgggacuucucgcuauuccaagaaauuuaagccugagauugcaauccgaccaaaagugcgugaucaggagggaagaaugaauuacuauuggacccugguggaacccggugacaagauuacauucgaggccacuggcaaccuagucguuccuagguacgcuuuugccauggaacggaacgcagggagcggaaucauaauuucggauaccccagugcaugacugcucuacaaccugucaaacgccgaaaggcgcuaucaauacuucccuccccuuccagaacguacacccuauuacaaucgguaagugcccaaaguaugugaaaucaaccaagcugcgccuugccacugggcugagaaauguccccaguauccagagcaggggauuguuuggcgcgauugccggcuucauagaagggggauggacagguaugguggacggcugguacggguaucaucaccagaacgaacaaggauccggcuacgcagcugaucucaaaucuacccagaaugccaucgacgagauuacgaacaagguuaauagcgugaucgagaaaaugaacacccaguuuacagcugucgguaaggaguucaaucaccuggaaaagcggauagaaaacuuaaauaaaaagguggaugacggguuccuggauauuuggacuuacaacgccgagcuccuuguacuguuggaaaaugagcgcacccuagacuaucaugauucaaacguuaaaaaucuguacgagaaggugcgaagucagcucaaaaacaacgcaaaggaaaucggcaauggauguuuugaguucuaucacaagugcgacaacacauguauggaauccgucaaaaauggcacuuacgauuauccuaaguacagcgaggaagccaaacugaacagagaggagaucgacggggugaaacuugaaucuaccaggauuuaucaaauccuggcuauuuacucaacagucgcgaguagcuuggugcucguugugucccugggagcaauaucuuuuuggaugugcucgaaugguagcuuacagugccggaucuguauuuga

SEQ ID NO: 135504 - RNA, 1701 nt, Artificial Sequence; identical to SEQ ID NO: 135475
  derived and/or modified CDS sequence (opt3) from hemagglutinin__InfluenzaA__AEO01367

SEQ ID NO: 135505 - RNA, 1701 nt, Artificial Sequence
  derived and/or modified CDS sequence (opt3) from hemagglutinin__InfluenzaA__AEO01368
augaaggccauccuggugguccuccuuuacaccuucgcuacagcaaacgccgacacucugugcauuggcuaucacgcgaauaacagcacggauaccguugacacaguguuggagaagaauguaacugugacccauuccgucaacuuacuggaagauaagcacaaugggaaacuauguaagcucagaggaguggcuccccugcaucuugguaaaugcaacauagccggcuggauccuggggaauccugagugugaaucuuugucaacagcaaguagcugguccuacauuguugagaccucuucgucagacaacggaacuugcuauccaggcgauuuuaucgacuacgaggagcucagggagcagcugagcaguguguccucuuucgaacgguuugagauuuucccgaauacaagcuccuggcccaaccacgauucaaauaagggugucaccgccgcuuguccucaugcaggggccaagaguuuuuauaaaaaccugaucuggcucgugaagaaaggaaauagcuacccaaaguuaucuaaauccuauauaaacgacaagggcaaggaaguacugguucuuuggggcauccaccaccccucaacgagcgcugaucaacagaguuuguaccagaaugccgacgcguacguguucgucgggacuucucgcuauuccaaaaaguuuaaaccugagauugcaauccgaccaaaggugcgugaucaggagggaagaaugaacuacuauuggacccugguggaacccggugacaaaauuacauucgaggccacuggcaaccuagucguuccuagguacgcuuuugccauggaacggaaugcagggagcggaaucauaauuucggauaccccagugcaugacugcaacacaaccugucaaacgccgaagggcgcuaucaauacuucucuccccuuccagaacauucacccuaucacaaucgguaaaugcccaaaguauguaaaguccaccaaacugcgccuugccacugggcugagaaaugugcccucaauucagaguaggggauuguuuggcgcgauagccggcuucaucgaagggggauggacagguauggucgacggcugguacggguaucaucaccagaacgaacaaggaagcggcuacgcagcugaucucaaguccacccagaaugccauugacaaaaucacgaacaagguaaauucuguuauagagaaaaugaacacccaguuuacagcuguggguaaggaguucaaucaccuggaaaagcggauugagaacuuaaauaaaaaggucgaugacggguuccuggauaucuggacuuacaacgccgaacuccuugugcuguuggagaaugaacgcacccuagacuaucaugauagcaacgugaaaaaccuguacgagaagguucgaucacagcucaaaaauaacgcaaaggagaucggcaauggauguuuugaguucuaucacaagugcgacaacacauguauggaaagugugaaaaauggcacuuacgauuauccuaaguacuccgaagaggccaaacugaacagagaagagauugacggggucaaacuugagagcaccaggaucuaucaaauucuggcuauauacucuacaguggcgucaaguuugguccucgugguuagccugggagcaaucuccuuuuggaugugcucuaaugguucguuacagugccggauuuguaucuga

SEQ ID NO: 135506 - RNA, 1701 nt, Artificial Sequence; identical to SEQ ID NO: 130717
  derived and/or modified CDS sequence (opt3) from hemagglutinin__InfluenzaA__AEO01369

SEQ ID NO: 135507 - RNA, 1701 nt, Artificial Sequence; identical to SEQ ID NO: 135435
  derived and/or modified CDS sequence (opt3) from hemagglutinin__InfluenzaA__AEO01370

SEQ ID NO: 135508 - RNA, 1701 nt, Artificial Sequence; identical to SEQ ID NO: 135482
  derived and/or modified CDS sequence (opt3) from hemagglutinin__InfluenzaA__AEO01371

SEQ ID NO: 135509 - RNA, 1701 nt, Artificial Sequence; identical to SEQ ID NO: 132314
  derived and/or modified CDS sequence (opt3) from hemagglutinin__InfluenzaA__AEO01372

SEQ ID NO: 135510 - RNA, 1701 nt, Artificial Sequence; identical to SEQ ID NO: 132314
  derived and/or modified CDS sequence (opt3) from hemagglutinin__InfluenzaA__AEO01373

SEQ ID NO: 135511 - RNA, 1701 nt, Artificial Sequence
  derived and/or modified CDS sequence (opt3) from hemagglutinin__InfluenzaA__AEO01374
augaaggccauccuggugguccuccuuuacaccuucgcuacagcaaacgccgacacucugugcauuggcuaucacgcgaauaacagcacggauaccguugacacaguguuggagaagaauguaacugugacccauuccgucaacuuacuggaagauaagcacaaugggaaacuauguaagcucagaggaguggcuccccugcaucuugguaaaugcgacauagccggcuggauccuggggaacccugagugugaaucuuugucaacagcaaguagcugguccuacauuguugagaccucuucgucagauaauggaacuugcuauccaggcgacuuuaucgauuacgaggagcucagggagcagcugagcaguguguccucuuucgaacgguuugagauuuucccgaagacaagcuccuggcccaaccacgacucaaauaagggugucaccgccgcuuguccucaugcaggggccaaaaguuuuuauaagaaccugaucuggcucgugaaaaagggaaauagcuacccaaaauuaucuaaguccuauauaaacgauaagggcaaagaaguacugguucuuuggggcauccaccaccccucaacgagcgcugaccaacagaguuuguaccagaaugccgaugcguacguguucgucgggacuucucgcuauuccaagaaauuuaagccugagauugcaauccgaccaaaagugcgugaccaggagggaagaaugaacuacuauuggacccugguggaacccggugauaagauuacauucgaggccacuggcaaucuagucguuccuagguacgcuuuugccauggaacggaacgcagggagcggaaucauaauuucggacaccccagugcaugacugcaacacaaccugucaaacgccgaaaggcgcuaucaauacuucucuccccuuccagaacauucacccuaucacaaucgguaagugcccaaaguauauuaaauccaccaagcugcgccuugccacugggcugagaaauguacccucaauacagaguaggggauuguuuggcgcgaucgccggcuucauugaagggggauggacagguaugguggauggcugguacggguaucaucaccagaacgaacaaggaagcggcuacgcagcugaccucaaauccacccagcacgccaucgaugagauaacgaauaaggucaacucugugauugagaaaaugaauacccaguuuacagcuguugguaaggaguucaaccaucuggaaaagcggaucgaaaauuuaaacaaaaagguggacgauggguuccuggacaucuggacuuacaaugccgagcuccuuguccuguuggaaaacgagcgcacccuagauuaucacgacagcaaugugaaaaaccuguacgagaagguacgaucacagcucaaaaauaacgcaaaggaaauuggcaacggauguuuugaguucuaucauaagugcgauaauacauguauggaaaguguuaaaaacggcacuuacgacuauccuaaguacuccgaggaagccaaacugaauagagaggagaucgauggggugaaacuugaaagcaccaggauuuaucaaauacuggcuaucuacucuacagucgcgucaaguuuggugcucgucgugagccugggagcaauuuccuuuuggaugugcucuaacgguucguuacagugccggaucuguaucuga

SEQ ID NO: 135512 - RNA, 1701 nt, Artificial Sequence; identical to SEQ ID NO: 135486
  derived and/or modified CDS sequence (opt3) from hemagglutinin__InfluenzaA__AEO01375

SEQ ID NO: 135513 - RNA, 1701 nt, Artificial Sequence; identical to SEQ ID NO: 130717
  derived and/or modified CDS sequence (opt3) from hemagglutinin__InfluenzaA__AEO01376

SEQ ID NO: 135514 - RNA, 1701 nt, Artificial Sequence; identical to SEQ ID NO: 132885
  derived and/or modified CDS sequence (opt3) from hemagglutinin__InfluenzaA__AEO01377

SEQ ID NO: 135515 - RNA, 1701 nt, Artificial Sequence
  derived and/or modified CDS sequence (opt3) from hemagglutinin__InfluenzaA__AEO01378
augaaggccauccuggugguccuccuuuacaccuucgcuacagcaaacgccgacacucugugcauuggcuaucacgcgaauaacagcacggauaccguugacacaguguuggagaaaaauguaacugugacccauuccgucaacuuacuggaagauaagcacaaugggaaacuauguaagcucagaggaguggcuccccugcaucuugguaaaugcaacauagccggcuggauccuggggaauccugagugugaaucuuugucaacagcaaguagcugguccuacauuguugagaccccaucuucggacaacggaacuugcuauccgggcgauuuuaucgacuacgaggagcucagggagcagcugucaagcgugaguuccuucgaacgguuugagauuuuccccaagacaucuagcuggccuaaucacgauuccaacaagggugucaccgccgcuuguccacaugcaggggccaaaucauuuuauaagaaucugaucuggcucgugaaaaagggaaacaguuaccccaaauuaagcaagucuuauauaaaugacaagggcaaagaaguacugguucuuuggggcauccaccacccuuccacgucagcugaucaacagagcuuguaccagaacgccgacgcguacguguucgucgggaccagucgcuauucuaagaaauuuaagccagagauugcaauccgacccaaagugcgugaucaggagggaagaaugaauuacuauuggacucugguggaaccuggugacaagauuacauucgaggccacuggcaaccuagucguuccaagguacgcuuuugccauggaacggaacgcaggguccggaaucauaauuagcgauaccccggugcaugacugcaauacaaccugucaaacgcccaaaggcgcuaucaacacuucgcucccuuuccagaauauucacccaaucacaaucgguaagugccccaaguauguaaaaucuaccaagcugcgccuugccacugggcugagaaacgugccuuccauucagucaaggggauuguuuggcgcgauagccggcuucaucgaagggggauggacagguauggucgacggcugguacggguaucaucaccagaaugaacaaggaaguggcuacgcagcugaucucaaaagcacccagaacgccauugacgagaucacgaauaaggugaacuccguuauagagaaaaugaauacccaguuuacagcuguggguaaggaguucaaccaccuggaaaagcggauugaaaauuuaaacaaaaaggucgaugacggguuccuggauaucuggacuuacaaugccgagcuccuugugcuguuggaaaacgagcgcacccuagacuaucaugauucuaauguaaagaaccuguacgagaagguucgaagccagcucaaaaacaaugcaaaggaaaucggcaacggauguuuugaguucuaucacaagugcgacaauacauguauggaaucagugaaaaacggcacuuacgauuauccaaaguacagugaggaagccaaacugaauagagaggagauugacggggucaaacuugaauccaccaggaucuaucaaauucuggcuauauacagcacaguggcgucuucauugguccucgugguuagucugggagcaaucagcuuuuggaugugcuccaacgguucuuuacagugccggauuuguaucuga

SEQ ID NO: 135516 - RNA, 1701 nt, Artificial Sequence; identical to SEQ ID NO: 131881
  derived and/or modified CDS sequence (opt3) from hemagglutinin__InfluenzaA__AEO01379

SEQ ID NO: 135517 - RNA, 1701 nt, Artificial Sequence; identical to SEQ ID NO: 135486
  derived and/or modified CDS sequence (opt3) from hemagglutinin__InfluenzaA__AEO01380

SEQ ID NO: 135518 - RNA, 1701 nt, Artificial Sequence; identical to SEQ ID NO: 135486
  derived and/or modified CDS sequence (opt3) from hemagglutinin__InfluenzaA__AEO01381

SEQ ID NO: 135519 - RNA, 1701 nt, Artificial Sequence; identical to SEQ ID NO: 131881
  derived and/or modified CDS sequence (opt3) from hemagglutinin__InfluenzaA__AEO01382

SEQ ID NO: 135520 - RNA, 1701 nt, Artificial Sequence; identical to SEQ ID NO: 132314
  derived and/or modified CDS sequence (opt3) from hemagglutinin__InfluenzaA__AEO01383

SEQ ID NO: 135521 - RNA, 1701 nt, Artificial Sequence
  derived and/or modified CDS sequence (opt3) from hemagglutinin__InfluenzaA__AEO01384
augaaggccauccuggugguccuccuuuacaccuucgcuacagcaaacgccgacacucugugcauuggcuaucacgcgaauaacagcacggauaccguugacacaguguuggagaaaaauguaacugugacccauuccgucaacuuacuggaagauaagcacaaugggaaacuauguaagcucagaggagugucuccccugcaucuugguaaaugcaacauagcuggcuggauccuggggaauccugagugugaaucauugaguacagccagcuccuggucuuacauuguugagaccucgucaagcgacaacggaacuugcuauccaggcgauuuuaucgacuacgaggagcucagggagcagcugaguuccgugucuagcuucgaacgguuugagauuuucccgaagacauccucauggcccaaucacgauaguaacaagggugucaccgcagccuguccucaugcuggggcaaagagcuuuuauaagaaucugaucuggcucgugaaaaagggaaacucuuacccaaaauuauccaagucauauauaaaugacaagggcaaagaaguacugguucuuuggggcauccaccaccccagcacgagugccgaucaacagucuuuguaccagaacgcugacgccuacguguucgucgggacuucccgcuauagcaagaaauuuaagccugagauugcgauccgaccaaaagugcgugaucaggagggaagaaugaauuacuauuggacccugguggaacccggugacaagauuacauucgaggcaacuggcaaccuagucguuccuagguacgccuuugcuauggaacggaacgccgggucgggaaucauaauuucugauaccccagugcaugacugcaauacaaccugucaaacgccgaaaggcgcaaucaacacuucccuccccuuccagaauauucacccuaucacaaucgguaagugcccaaaguauguaaaaucaaccaagcugcgccuugcuacugggcugagaaacgugcccaguauucagagcaggggauuguuuggcgccauagcgggcuucaucgaagggggauggacagguauggucgacggcugguacggguaucaucaccagaaugaacaaggauccggcuacgccgcagaucucaaaucuacccagaacgcuauugacgagaucacgaauaaggugaacagcguuauagagaaaaugaauacccaguuuacagccguggguaaggaguucaaccaccuggaaaagcggauugaaaauuuaaacaaaaaggucgaugacggguuccuggauaucuggacuuacaaugcugagcuccuugugcuguuggaaaacgagcgcacccuagacuaucaugauucaaauguuaaaaaccuguacgagaagguacgaagucagcucaaaaacaaugccaaggaaaucggcaacggauguuuugaguucuaucacaagugcgacaauacauguauggaauccgugaaaaacggcacuuacgauuauccuaaguacagcgaggaagcaaaacugaauagagaggagauugacggggucaaacuugaaucuaccaggaucuaucaaauucuggccauauacucaacaguggcuaguagcuugguccucgugguuucccugggagcgaucucuuuuuggaugugcucgaacgguagcuuacagugccggauuuguaucuga

SEQ ID NO: 135522 - RNA, 1701 nt, Artificial Sequence
  derived and/or modified CDS sequence (opt3) from hemagglutinin__InfluenzaA__AEO01385
augaaggccauccuggugguccuccuuuacaccuucgcuacagcaaacgccgacacucugugcauuggcuaucacgcgaauaacagcacggauaccguugacacaguguuggagaaaaauguaacugugacccauuccgucaacauauuagaagauaagcacaaugggaaacuguguaagcuaagaggaguggcuccccuccaucuggguaaaugcaacaucgccggcuggauucuugggaauccugagugugaaucucugucaacagcaaguagcugguccuacaucguugagaccucuucgucagacaacggaacuugcuauccaggcgauuuuauugacuacgaagaguugagggagcagcucagcaguguguccucuuucgaacgguuugagaucuucccgaagacaagcuccuggcccaaucacgauucaaacaagggugucaccgccgcuuguccucaugcaggggccaaaaguuuuuauaagaaucugauauggcuggugaaaaagggaaacagcuacccaaaacucucuaaguccuauaucaaugacaagggcaaagaaguauuaguucuguggggcauucaccaccccucaacgagcgcugaucaacagagucuuuaccagaacgccaaugcguacguguucgucgggacuucucgcuauuccaagaaauuuaagccugagaucgcaauucgaccaaaagugcgugaccaggagggaagaaugaacuacuauuggaccuugguggaacccggugauaagaucacauucgaggccacuggcaaccuggucguuccuagguacgcuuuugccauggaacggaaugcagggagcggaauaauuaucucggacaccccagugcaugauugcaacacaaccugucaaacgccgaaaggcgcuauuaauacuucucuacccuuccagaacauccacccuaucacaauugguaagugcccaaaguauguaaaauccaccaagcuccgccuggccacugggcuuagaaaugugcccucaauacagaguaggggacuguuuggcgcgaucgccggcuucauugaagggggauggacagguauggucgacggcugguacggguaucaucaccagaacgaacaaggaagcggcuacgcagcugacuugaaauccacccagaaugccaucgaugagauaacgaacaagguaaauucuguuauugagaaaaugaacacccaguuuacagcuguggguaaggaguucaaucaccucgagaagcggaucgaaaaccugaauaaaaaggucgacgauggguucuuagacaucuggacuuacaacgccgagcugcucgugcuucuggaaaaugagcgcaccuuggauuaucaugacagcaacgugaaaaaccuauacgagaagguucgaucacagcugaaaaauaacgcaaaggaaauuggcaauggauguuuugaguucuaucacaagugcgauaacacauguauggaaagugugaaaaauggcacuuacgacuauccuaaguacuccgaggaagccaaacucaacagagaggagaucgauggggucaagcuggaaagcaccaggauuuaucaaauacuugcuaucuacucuacaguggcgucaagucuggucuuggugguuagccucggagcaauuuccuuuuggaugugcucuaaugguucgcugcagugccggaucuguaucuga

SEQ ID NO: 135523 - RNA, 1701 nt, Artificial Sequence; identical to SEQ ID NO: 135426
  derived and/or modified CDS sequence (opt3) from hemagglutinin__InfluenzaA__AEO01386

SEQ ID NO: 135524 - RNA, 1701 nt, Artificial Sequence
  derived and/or modified CDS sequence (opt3) from hemagglutinin__InfluenzaA__AEO01387
augaaggccauccuggugguccuccuuuacaccuucgcuacagcaaacgccgacacucugugcauuggcuaucacgcgaauaacagcacggauaccguugacacaguguuggagaaaaauguaacugugacccauuccgucaacauauuagaagauaagcacaaugggaaacuguguaagcuaagaggaguggcuccccuccaucuggguaaaugcaacaucgccggcuggauucuugggaauccugagugugaaucucugucaacagcaaguagcugguccuacaucguugagaccucuucgucagacaacggaacuugcuauccaggcgauuuuauugacuacgaagaguugagggagcagcucagcaguguguccucuuucgaacgguuugagaucuucccgaagacaagcuccuggcccaaucacgauucaaacaagggugucaccgccgcuuguccucaugcaggggccaaaaguuuuuauaagaaucugauauggcuggugaaaaagggaaacagcuacccaaaacucucuaaguccuauaucaaugacaagggcaaagaaguauuaguucuguggggcauucaccaccccucaacgagcgcugaucaacagagucuuuaccagaacgccgacgcguacguguucgucgggacuucucgcuauuccaagaaauuuaagccugagaucgcaauucgaccaaaagugcgugaucaggagggaagaaugaauuacuauuggaccuugguggaacccggugacaagaucacauucgaggccacuggcaaccuggucguuccuagguacgcuuuugccauggaacggaacgcagggagcggaauaauuaucucggauaccccagugcaugacugcaauacaaccugucaaacgccgaaaggcgcuauuaacacuucucuacccuuccagaauauccacccuaucacaauugguaagugcccaaaguauguaaaauccaccaagcuccgccuggccacugggcuuagaaacgugcccucaauacagaguaggggacuguuuggcgcgaucgccggcuucauugaagggggauggacagguauggucgacggcugguacggguaucaucaccagaaugaacaaggaagcggcuacgcagcugauuugaaauccacccagaacgccaucgacgagauaacgaauaaggugaacucuguuauugagaaaaugaauauccaguuuaccgcuguggguaaggaguucaaccaccucgagaagcggaucgaaaaucugaacaaaaaggucgaugacggguucuuagauauuuggacauacaaugccgagcugcucgugcuucuggaaaacgagcgcacuuuggacuaucaugauagcaauguuaaaaaccuauacgagaagguacgaucacagcugaaaaacaaugcaaaggaaaucggcaacggauguuuugaguucuaucacaagugcgacaauaccuguauggaaagugugaaaaacggcacauacgauuauccuaaguacuccgaggaagccaaacucaauagagaggagauugacggggucaagcuggaaagcacuaggauauaucaaauccuugcuauuuacucuaccguggcgucaagucuggucuuggugguuagccucggagcaaucuccuuuuggaugugcucuaacgguucgcugcagugccggaucuguauuuga

SEQ ID NO: 135525 - RNA, 1701 nt, Artificial Sequence
  derived and/or modified CDS sequence (opt3) from hemagglutinin__InfluenzaA__AEO01388
augaaggccauccuggugguccuccuuuacaccuucgcuacagcaaacgccgacacucugugcauuggcuaucacgcgaauaacagcacggauaccguugacacaguguuggagaaaaauguaacugugacccauuccgucaacuuacuggaagauaagcacaaugggaaacuauguaagcucagaggaguggcuccccugcaucuugguaaaugcaacauagccggcuggauccuggggaauccugagugugaaucuuugucaacagcaaguagcugguccuacauuguugagaccucuucgucagacaacggaacuugcuauccaggcgauuuuaucgacuacgaggagcucagggagcagcugagcaguguguccucuuucgaaaaguuugagauuuucccgaagacaagcuccuggcccaaucacgauucaaacaaaggugucaccgccgcuuguccucaugcaggggccaagaguuuuuauaaaaaucugaucuggcucgugaagaaaggaaacagcuacccaaaguuaucuaaguccuauauaaaugacaaaggcaaggaaguacugguucuuuggggcauccaccaccccucaacgagcgcugaucaacagaguuuguaccagaacgccgacgcguacguguucgucgggacuucucgguauuccaaaaaguuuaaaccugagauugcaauccgcccaaaggugcgagaucaggagggacguaugaauuacuauuggacccugguggaacccggugacaaaauuacauucgaggccacuggcaaccuagucguuccuagauacgcuuuugccauggaaaggaacgcagggagcggaaucauaauuucggauaccccagugcaugacugcaauacaaccugucaaacgccgaagggcgcuaucaacacuucucuccccuuccagaauauucacccuaucacaaucgguaagugcccaaaauauguaaaguccaccaaacugcggcuugccacugggcugcgcaacgugcccucaauucagaguagaggauuguuuggcgcgauagccggcuucaucgaagggggauggacagguauggucgacggcugguacggguaucaucaccagaaugaacaaggaagcggcuacgcagcugaucucaaguccacccagaacgccauugacaaaaucacgaauaaggugaacucuguuauagagaagaugaauacccaguuuacagcuguggguaaagaguucaaccaccuggaaaagaggauugagaauuuaaacaaaaaggucgaugacggguuccuggauaucuggacuuacaaugccgaacuccuugugcuguuggagaacgaacggacccuagacuaucaugauagcaauguaaagaaccuguacgagaagguucgcucacagcucaagacaaacgcaaaagagaucggcaauggauguuuugaguucuaucacaagugcgacaacacuuguauggaaagugugaaaaauggcaccuacgauuauccuaaguacuccgaagaggccaaacugaaccgagaagagauugacggggucaaacuugagagcacaagaaucuaucaaauucuggcuauauacucuaccguggcgucaaguuugguccucgugguuagccugggagcaaucuccuuuuggaugugcucuaaugguucguuacagugcaggauuuguaucuga

SEQ ID NO: 135526 - RNA, 1701 nt, Artificial Sequence
  derived and/or modified CDS sequence (opt3) from hemagglutinin__InfluenzaA__AEO01389
augaaggccauccuggugguccuccuuuacaccuucgcuacagcaaacgccgacacucugugcauuggcuaucacgcgaauaacagcacggauaccguugacacaguguuggagaaaaauguaacugugacccauuccgucaacuuacuggaagauaagcacaaugggaaacuauguaagcucagaggaguggcuccccugcaucuugguaaaugcaacauagccggcuggauccuggggaauccugagugugaaucuuugucaacagcaaguagcugguccuacauuguugagaccucuucgucagacaacggaacuugcuauccaggcgauuuuaucgacuacgaggagcucagggagcagcugagcaguguguccucuuucgaacgguuugagauuuucccgaagacaagcuccuggcccaaucacgauucaaacaagggugucaccgccgcuuguccucaugcagggacgaaaaguuuuuauaagaaucugaucuggcucgugaaaaagggaaacagcuacccaaaauuaucuaaguccuauauaaaugacaagggcaaagaaguacugguucuuuggggcauccaccaccccucaacuagcgccgaucaacagaguuuguaccagaacgcugacgccuacguguucgucgggaccucucgcuauuccaagaaauuuaagccugagauugcgauccgaccaaaagugcgugaucaggagggaagaaugaauuacuauuggacacugguggaacccggugacaagauuacuuucgaggcaaccggcaaccuagucguuccuagguacgccuuugcuauggaacggaacgccgggagcggaaucauaauuucggauacaccagugcaugacugcaauaccacgugucaaacuccgaaaggcgcaaucaacacaucucuccccuuccagaauauucacccuaucaccaucgguaagugcccaaaguauguaaaauccacuaagcugcgccuugcuacagggcugagaaacgugcccucaauucagaguaggggauuguuuggcgccauagcgggcuucaucgaagggggauggaccgguauggucgacggcugguacggguaucaucaccagaaugaacaaggaagcggcuacgccgcagaucucaaauccacgcagaacgcuauugacaagaucaccaauaaagugaacucuguuauagagaagaugaauacacaguuuacugccguggguaaggaguucaaccaccuggaaaaacggauugagaauuuaaacaagaaagucgaugacggguuccuggauaucuggaccuacaaugcugaacuccuugugcuguuggagaacgaacgcacacuagacuaucaugauagcaauguaaagaaccuguacgagaaaguucgaucacagcucaagaacaaugccaaggagaucggcaacggauguuuugaguucuaucacaaaugcgacaauacuuguauggaaagugugaagaacggcaccuacgauuauccuaaauacuccgaagaggcaaagcugaauagagaagagauugacggggucaaacuugagagcacaaggaucuaucaaauucuggccauauacucuaccguggcuucaaguuugguccucgugguuagccugggagcgaucuccuuuuggaugugcucuaacgguucguuacagugccggauuuguaucuga

SEQ ID NO: 135527 - RNA, 1701 nt, Artificial Sequence
  derived and/or modified CDS sequence (opt3) from hemagglutinin__InfluenzaA__AEO01390
augaaggccauccuggugguccuccuuuacaccuucgcuauugcaaacgccgacacacugugcauaggcuaucacgcgaauaacagcacugauacgguugacaccguguuggagaaaaauguaacagugacucauuccgucaacuuacuggaagauaagcacaaugggaaacuauguaagcucagaggaguggcuccccugcaucuugguaaaugcaacaucgccggcuggauucuggggaauccugagugugaaucuuugucaaccgcaaguagcugguccuacaucguugagacaucuucgucagacaacggaaccugcuauccaggcgauuuuauugacuacgaggaacucagggagcagcugagcaguguguccucuuucgaacgguuugagaucuucccgaagacuagcuccuggcccaaucacgauucaaacaagggugucacagccgcuuguccucaugcaggggccaaaaguuuuuauaagaaucugauauggcucgugaaaaagggaaacagcuacccaaaauuaucuaaguccuauaucaaugacaagggcaaagaaguacugguucuuuggggcauucaccaccccucaaccagcgcugaucaacagaguuuguaccagaacgccgacgcguacguguucgucgagacgucucgcuauuccaagaaagugaagccugagaucgcaauucgaccacgugugagagaucaggaagggaggaugaauuacuauuggacucuggucgagcccggagacaaaaucaccuuugaagccacagguaaccuaguugugccucgguacgcuuucgccauggagcgcaacgcaggcagcgggauaauuaucucggauacuccaguacaugacugcaauaccacaugucaaaccccgaagggagcuauuaacacgucucuccccuuucagaauauccacccuaucacuauuggcaaaugcccaaaguaugugaaguccacaaaacugagacuugccaccggucugaggaacguccccucaauacagagucggggguuguucggagcgaucgccggcuuuauugaaggcggguggacuggaaugguggacgguugguacggcuaucaucaccagaaugagcaagggagcggauacgcagcugaucucaaguccacacagcacgccaucgacgagauaaccaacaaaguuaauucugugauugaaaagaugaacacgcaguucaccgcugucggcaaagaguuuaaucaucuggaaaagcgcaucgagaacuuaaauaagaaaguggaugacgguuuccuggauaucuggacauacaacgccgaacuccuuguacuguuggagaaugagcgaacucuagacuaucacgauagcaacguuaagaaucuguacgaaaaagugagaucacagcucaagaacaacgcaaaagagauugggaauggcuguuucgaauuuuaucauaagugcgacaacaccuguauggagagugucaagaauggaacauacgauuauccuaaauacuccgaaguggccaagcugaacagggaggagaucaauggcgucaaacuugaaagcacucggauuuaucaaauacuggcuaucuacucuaccguggcgucaaguuugguucucgugguaagccugggggcaauuuccuucuggaugugcucuaacggaucguuacagugccguaucuguaucuga

SEQ ID NO: 135528 - RNA, 1701 nt, Artificial Sequence; identical to SEQ ID NO: 135426
  derived and/or modified CDS sequence (opt3) from hemagglutinin__InfluenzaA__AEO01391

SEQ ID NO: 135529 - RNA, 1701 nt, Artificial Sequence; identical to SEQ ID NO: 135435
  derived and/or modified CDS sequence (opt3) from hemagglutinin__InfluenzaA__AEO01392

SEQ ID NO: 135530 - RNA, 1701 nt, Artificial Sequence; identical to SEQ ID NO: 132314
  derived and/or modified CDS sequence (opt3) from hemagglutinin__InfluenzaA__AEO01393

SEQ ID NO: 135531 - RNA, 1701 nt, Artificial Sequence; identical to SEQ ID NO: 131818
  derived and/or modified CDS sequence (opt3) from hemagglutinin__InfluenzaA__AEO01394

SEQ ID NO: 135532 - RNA, 1701 nt, Artificial Sequence
  derived and/or modified CDS sequence (opt3) from hemagglutinin__InfluenzaA__AEO01395
augaaggccauccuggugguccuccuuuacaccuucgcuacagcaaacgccgacacucugugcauuggcuaucacgcgaauaacagcacggauaccguugacacaguguuggagaaaaauguaacugugacccauuccgucaacuuacuggaagauaagcacaaugggaaacuauguaagcucagaggaguggcuccccugcaucuugguaaaugcaacauagccggcuggauccuggggaauccugagugugaaucuuugucaacagcaaguagcugguccuacauuguugagaccucuucgucagacaacggaacuugcuauccaggcgauuuucucgacuacgaagaacugagggagcagcugagcaguguguccucuuucgaacgguuugagaucuucccgaagacaagcuccuggcccaaucacgauucaaacaagggugucaccgccgcuuguccucaugcaggggccaaaaguuuuuauaagaaucucauuugguuagugaaaaagggaaacagcuacccaaaacugucuaaguccuauaucaaugacaagggcaaagaaguacuuguuuuguggggcauacaccaccccucaacgagcgcugaucaacagagucuguaccagaacgccgacgcguacguguucgucgggacuucucgcuauuccaagaaauuuaagccugagaucgcaauucgaccaaaagugcgugagcaggaaggaagaaugaauuacuauuggacccuaguggagcccggugauaagaucacauucgaagccacuggcaaccucgucguuccuagguacgcuuuugccauggagcggaacgcagggagcggaauuaucauaucggacaccccagugcaugauugcaauacaaccugucaaacgccgaaaggcgcuauuaacacuucucugcccuuccagaauauccacccuauuacaaucgguaagugcccaaaguauguaaaauccaccaaacuucgccuggccacuggguugagaaacgugcccucaauccagaguaggggacucuuuggcgcgauugccggcuucauagaagggggauggacagguauggucgacggcugguacggguaucaucaccagaaugagcaaggaagcggcuacgcagcugaccugaaauccacccagaacgccaucgaugagauuacgaauaaggugaacucuguuaucgaaaagaugaauacccaguuuacagcuguggguaaggaguucaaccacuuagaaaagcggauagagaaucugaacaaaaaggucgacgauggguuccucgacauuuggacuuacaaugccgaacuucugguguugcuagagaacgagcgcacccuggauuaucaugacagcaauguuaaaaaccucuacgaaaagguacgaucacagcugaaaaacaaugcaaaggagaucggcaacggauguuuugaguucuaucacaagugcgauaauacauguauggagagugugaaaaacggcacuuacgacuauccuaaguacuccgaagaggccaaacuuaauagagaggaaaucgauggggucaagcuggagagcaccaggauuuaucaaaucuuggcuauuuacucuacaguggcgucaagucucguccuggugguuagcuuaggagcaauauccuuuuggaugugcucuaacgguucgcugcagugccggaucuguauuuga

SEQ ID NO: 135533 - RNA, 1701 nt, Artificial Sequence; identical to SEQ ID NO: 131818
  derived and/or modified CDS sequence (opt3) from hemagglutinin__InfluenzaA__AEO01396

SEQ ID NO: 135534 - RNA, 1701 nt, Artificial Sequence
  derived and/or modified CDS sequence (opt3) from hemagglutinin__InfluenzaA__AEO01397
augaaggccauccuggugguccuccuuuacaccuucgcuacagcaaacgccgacacucugugcauuggcuaucacgcgaauaacagcacggauaccguugacacaguguuggagaaaaauguaacugugacccauuccgucaacauauuagaagauaagcacaaugggaaacuguguaagcuaagaggaguggcuccccuccaucuggguaaaugcaacaucgccggcuggauucuugggaauccugagugugaaucucugucaacagcaaguagcugguccuacaucguugagaccucuucgucagacaacggaacuugcuauccaggcgauuuuauugacuacgaagaguugagggagcagcucagcaguguguccucuuucgaacgguuugagaucuucccgaagacaagcuccuggcccaaucacgauucaaacaagggugucaccgccgcuuguccucaugcaggggccaaaaguuuuuauaagaaucugauauggcuggugaaaaagggaaacagcuacccaaaacucucuaaguccuauaucaaugacaagggcaaagaaguauuaguucuguggggcauucaccaccccucaacgagcgcugaucaacagagucuuuaccagaacacugacgccuacguguucgucgggaccucucgcuauuccaagaaauuuaagccugagaucgcgauucgaccaaaagugcgugaucaggagggaagaaugaauuacuauuggacauugguggaacccggugacaagaucacuuucgaggcaaccggcaaccuggucguuccuagguacgccuuugcuauggaacggaacgccgggagcggaauaauuaucucggauacaccagugcaugacugcaauaccacgugucaaacuccgaaaggcgcaauuaacacaucucuacccuuccagaauauccacccuaucaccauugguaagugcccaaaguauguaaaauccacuaagcuccgccuggcuacagggcuuagaaacgugcccucaauacagaguaggggacuguuuggcgccaucgcgggcuucauugaagggggauggaccgguauggucgacggcugguacggguaucaucaccagaaugaacaaggaagcggcuacgccgcagauuugaaauccacgcagaacgcuaucgacgagauaaccaauaaggugaacucuguuauugagaaaaugaauacacaguuuacugccguggguaaggaguucaaccaccucgagaagcggaucgaaaaucugaacaaaaaggucgaugacggguucuuagauaucuggaccuacaaugcugagcugcucgugcuucuggaaaacgagcgcacauuggacuaucaugauagcaauguuaaaaaccuauacgagaagguacgaucacagcugaaaaacaaugccaaggaaauuggcaacggauguuuugaguucuaucacaagugcgacaauacuuguauggaaagugugaaaaacggcaccuacgauuauccuaaguacuccgaggaagcaaaacucaauagagaggagaucgacggggucaagcuggaaagcacaaggauuuaucaaauacuugccaucuacucuaccguggcuucaagucuggucuuggugguuagccucggagcgauuuccuuuuggaugugcucuaacgguucgcugcagugccggaucuguaucuga

SEQ ID NO: 135535 - RNA, 1701 nt, Artificial Sequence
  derived and/or modified CDS sequence (opt3) from hemagglutinin__InfluenzaA__AEO01398
augaaggccauccuggugguccuccuuuacaccuucgcuacagcaaacgccgacacucugugcauuggcuaucacgcgaauaacagcacggauaccguugacacaguguuggagaagaauguaacugugacccauuccgucaacuuacuggaagauaagcacaaugggaaacuauguaagcucagaggaguggcuccccugcaucuugguaaaugcaacauagccggcuggauccuggggaauccugagugugaaucuuugucaacagcaaguagcugguccuacauuguugagaccucuucgucagacaacggaacuugcuauccaggcgauuuuaucgacuacgaagaacucagggagcagcugagcaguguguccucuuucgaacgguuugagauuuucccgaagacaagcuccuggcccaaucacgauucaaacaagggugucaccgccgcuuguccucaugcaggggccaaaaguuuuuauaagaaucugaucuggcucgugaaaaagggaaacagcuacccaaaauuaucuaaguccuauauaaaugacaagggcaaagaaguacugguucuuuggggcauccaccaccccucaacgagcgcugaucaacagaguuuguaccagaacgccgacgcgaauguguucgucgggacuucucgcuacuccaagaaauuuaagccugagauugcaauccgaccaaaagugcguggacaggaggguagaaugaacuauuacuggacccugguggaacccggcgauaagauuacauucgaggccacugggaaccuagucguuccuagguaugcuuuugccauggaacggaaugcaggaagcggcaucauaauuucggacaccccagugcaugauugcaacacaaccugucaaacgccgaaaggugcuaucaauacuucucuccccuuccagaacauucacccuaucacaaucgggaagugcccaaaguacguaaaauccaccaagcugcgccuugccacuggacugagaaaugugcccucaauucagaguaggggcuuguuuggcgcgauagccggguucaucgagggagguuggacaggcauggucgacgggugguauggauaccaucaccagaacgaacaaggcagcgguuaugcagcugaccucaaauccacccagaaugccauugaugagaucacgaacaagguaaauucuguuauagagaaaaugaacacccaguuuacagcuguggggaaggaguucaaucaccuggagaagcggauugaaaacuuaaauaaaaaggucgacgauggcuuccuggacaucuggacuuacaacgccgagcuccuugugcuguuggaaaaugagcgcacccuagauuaccaugacagcaacgugaaaaaccuguaugagaagguucgaaaucagcucaaaaacaaugcaaaggaaaucggaaacggcuguuuugaguucuaccacaagugcgauaauacauguauggaaucagugaaaaacgggacuuaugacuacccuaaguauagugaggaagccaaacugaauagagaggagauugauggagucaaacuugaauccaccaggaucuaccaaauucuggcuauauauagcacaguggcgucuucauugguccucgugguuagucugggugcaaucagcuuuuggaugugcuccaacggcucuuuacagugccggauuuguaucuga

SEQ ID NO: 135536 - RNA, 1701 nt, Artificial Sequence; identical to SEQ ID NO: 135435
  derived and/or modified CDS sequence (opt3) from hemagglutinin__InfluenzaA__AEO01399

SEQ ID NO: 135537 - RNA, 1701 nt, Artificial Sequence; identical to SEQ ID NO: 130717
  derived and/or modified CDS sequence (opt3) from hemagglutinin__InfluenzaA__AEO01402

SEQ ID NO: 135538 - RNA, 1701 nt, Artificial Sequence; identical to SEQ ID NO: 131881
  derived and/or modified CDS sequence (opt3) from hemagglutinin__InfluenzaA__AEO01403

SEQ ID NO: 135539 - RNA, 1701 nt, Artificial Sequence; identical to SEQ ID NO: 130717
  derived and/or modified CDS sequence (opt3) from hemagglutinin__InfluenzaA__AEO01404

SEQ ID NO: 135540 - RNA, 1701 nt, Artificial Sequence
  derived and/or modified CDS sequence (opt3) from hemagglutinin__InfluenzaA__AEO01405
augaaggccauccuggugguccuccuuuacaccuucgcuacagcaaacgccgacacucugugcauuggcuaucacgcgaauaacagcacggauaccguugacacaguguuggagaaaaauguaacugugacccauuccgucaacuuacuggaagauaagcacaaugggaaacuauguaagcucagaggaguggcuccccugcaucuugguaaaugcaacauagccggcuggauccuggggaauccugagugugaaucuuugucaacagcaaguagcugguccuacauuguugagaccucuucgucagacaacggaacuugcuauccaggcgauuuuaucgacuacgaggagcucagggagcagcugagcaguguguccucuuucgaacgguuugagauuuucccgaagacaagcuccuggcccaaucacgauucaaacaagggugucaccgccgcuuguccucaugcaggggccaaaaguuuuuauaagaaucugaucuggcucgugaaaaagggaaacagcuacccaaaauuaucuaaguccuauauaaaugacaagggcaaagaaguacugguucuuuggggcauccaccaccccucaacgagcgcugaucaacagaguuuguaccagaacgccgacgcguacguguucgucgggacuucucgcuauuccaagaaauuuaagccugagauugcaauccgaccaaaagugcgugaucaggagggaagaaugaauuacuauuggacccugguggaacccggugacaagauuacauucgaggccacuggcaaccuagucguuccuagguacgcuuuugccauggaacggaacgcagggagcggaaucauaauuucggauaccccagugcaugacugcaauacaaccugucaaacgccgaaaggcgcuaucaacacuucucuccccuuccagaauauucacccuaucacaaucgguaagugcccaaaguauguaaaauccaccaagcugcgccuugccacugggcugagaaacgugcccucaauucagaguaggggauuguuuggcgcgauagccggcuucaucgaagggggauggacagguauggucgacggcugguacggguaucaucaccagaaugaacaaggaagcggcuacgcagcugaucucaaauccacccagaacgccauugacgagaucacgaauaaggugaacucuguuauagagaaaaugaauacccaguuuacagcuguggguaaggaguucaaccaccuggaaaagcggauugaaaauuuaaacaaaaaggucgaugacggguuccuggauaucuggacuuacaaugccgagcuccuugugcuguuggaaaacgagcgcacccuagacuaucaugauagcaauguaaagaaccuguacgagaagguucgaucacagcucaaaaacaaugcaaaggaaaucggcaacggauguuuugaguucuaucacaagugcgacaauacauguauggaaagugugaaaaacggcacuuacgauuauccuaaguacuccgaggaagccaaacugaauagagaggagauugacggggucaaacuugaaagcaccaugaucuaucaaauucuggcuauauacucuacaguggcgucaaguuugguccucgugguuagccugggagcaaucuccuuuuggaugugcucuaacgguucguuacagugcaggauuuguaucuga

SEQ ID NO: 135541 - RNA, 1701 nt, Artificial Sequence
  derived and/or modified CDS sequence (opt3) from hemagglutinin__InfluenzaA__AEO01407
augaaggccauccuggugguccuccuuuacaccuucgcuacagcaaacgccgacacucugugcauuggcuaucacgcgaauaacagcacggauaccguugacacaguguuggagaagaauguaacugugacccauuccgucaacuuacuggaagauaagcacaaugggaaacuauguaagcucagaggaguggcuccccugcaucuugguaaaugcaacauagccggcuggauccuggggaauccugagugugaaucuuugucaacagcaaguagcugguccuacauuguugagaccucuucgucagacaacggaacuugcuauccaggcgauuuuaucgacuacgaggagcucagggagcagcugagcaguguguccucuuucgaacgguuugagauuuucccgaagacaagcuccuggcccaaucacgauucaaacaagggugucaccgccgcuuguccucaugcaggggccaaaaguuuuuauaagaaucugaucuggcucgugaaaaagggaaacagcuacccaaaauuaucuaaguccuauauaaaugacaagggcaaagaaguacugguucuuuggggcauccaccaccccucaacgagcgcugaucaacagaguuuguaccagaacgccgacgcguacguguucgucgggacuucucgcuauuccaagaaauuuaagccugagauugcaauccgaccaaaagugcgugaucaggagggaagaaugaauuacuauuggacccugguggaacccggugacaagauuacauucgaggccacuggcaaccuagucguuccuagguacgcuuuugccauggaacggaacgcagggagcggaaucauaauuucggauaccccagugcaugacugcaauacaaccugucaaacgccgaaaggcgcuaucaacacuucucuccccuuccagaauauucacccuaucacaaucgguaagugcccaaaguauguaaaauccaccaagcugcgccuugccacugggcugagaaacgugcccucaauucagaguaggggauuguuuggcgcgauagccggcuucaucgaagggggauggacagguauggucgacggcugguacggguaucaucaccagaaugaacaaggaagcggcuacgcagcugaucucaaauccacccagcacgccauugacgagaucacgaacaagguaaauucuguuauagagaaaaugaacacccaguuuacagcuguggguaaggaguucaaucaucuggaaaagcggauugaaaacuuaaauaaaaaggucgaugacggguuccuggauaucuggacuuacaacgccgagcuccuugugcuguuggaaaaugagcgcacccuagacuaucacgauagcaacgugaaaaaucuguacgagaagguucgaucacagcucaaaaacaacgcaaaggaaaucggcaauggauguuuugaguucuaucauaagugcgacaacacauguauggaaagugugaaaaauggcacuuacgauuauccuaaguacuccgaggaagccaaacugaacagagaggagauuaauggggucaaacuugaaagcaccaggaucuaucaaauucuggcuauauacucuacaguggcgucaaguuugguccucgugguuagccugggagcaaucuccuuuuggaugugcucuaacgguucguuacagugccggauuuguaucuga

SEQ ID NO: 135542 - RNA, 1701 nt, Artificial Sequence
  derived and/or modified CDS sequence (opt3) from hemagglutinin__InfluenzaA__AEO01408
augaaggccauccuggugguccuccuuuacaccuucgcuacagcaaacgccgacacucugugcauuggcuaucacgcgaauaacagcacggauaccguugacacaguguuggagaaaaauguaacugugacccauuccgucaacuuacuggaagauaagcacaaugggaaacuauguaagcucagaggaguggcuccccugcaucuugguaaaugcaacauagccggcuggauccuggggaauccugagugugaaucuuugucaacagcaaguagcugguccuacauuguugagaccucuucgucagacaacggaacuugcuauccaggcgauuuuaucgacuacgaagaacucagggagcagcugagcaguguguccucuuucgaacgguuugagauuuucccgaagacaagcuccuggcccaaucacgauucaaacaagggugucaccgccgcuuguccucaugcaggggccaaaaguuuuuauaagaaucugaucuggcucgugaaaaagggaaacagcuacccaaaauuaucuaaguccuauauaaaugacaagggcaaagaaguacugguucuuuggggcauccaccaccccucaacgagcgcugaucaacagaguuuguaccagaacgccgacgcguacguguucgucgggacuucucgcuauuccaagaaauuuaagccugagauugcaauccgaccaaaagugcgugagcaggaaggaagaaugaauuacuauuggacccugguggagcccggugauaagauuacauucgaagccacuggcaaccuagucguuccuagguacgcuuuugccauggagcggaacgcagggagcggaaucauaauuucggacaccccagugcaugauugcaauacaaccugucaaacgccgaaaggcgcuaucaacacuucucuccccuuccagaauauucacccuaucacaaucgguaagugcccaaaguauguaaaauccaccaagcugcgccuugccacugggcugagaaacgugcccucaauucagaguaggggauuguuuggcgcgauagccggcuucaucgaagggggauggacagguauggucgacggcugguacggguaucaucaccagaaugagcaaggaagcggcuacgcagcugaccucaaauccacccagaacgccauugaugagaucacgaauaaggugaacucuguuauagaaaagaugaauacccaguuuacagcuguggguaaggaguucaaccaccuggaaaagcggauugagaauuuaaacaaaaagaucgacgauggguuccuggacaucuggacuuacaaugccgaacuccuuguccuguuggagaacgagcgcacccuagauuaucaugacagcaaugugaaaaaccuguacgaaaagguacgaucacagcucaaaaacaaugcaaaggagauuggcaacggauguuuugaguucuaucacaagugcgauaauacauguauggagaguguuaaaaacggcacuuacgacuauccuaaguacuccgaagaggccaaacugaauagagaggaaaucgauggggugaaacuugagagcaccaggauuuaucaaauacuggcuaucuacucuacagucgcgucaaguuuggugcucgucgugagccugggagcaauuuccuuuuggaugugcucuaacgguucguuacagugccggaucuguaucuga

SEQ ID NO: 135543 - RNA, 1701 nt, Artificial Sequence; identical to SEQ ID NO: 131819
  derived and/or modified CDS sequence (opt3) from hemagglutinin__InfluenzaA__AEO01409

SEQ ID NO: 135544 - RNA, 1701 nt, Artificial Sequence; identical to SEQ ID NO: 135435
  derived and/or modified CDS sequence (opt3) from hemagglutinin__InfluenzaA__AEO01410

SEQ ID NO: 135545 - RNA, 1701 nt, Artificial Sequence; identical to SEQ ID NO: 134136
  derived and/or modified CDS sequence (opt3) from hemagglutinin__InfluenzaA__AEO01411

SEQ ID NO: 135546 - RNA, 1701 nt, Artificial Sequence; identical to SEQ ID NO: 131070
  derived and/or modified CDS sequence (opt3) from hemagglutinin__InfluenzaA__AEO01412

SEQ ID NO: 135547 - RNA, 1701 nt, Artificial Sequence
  derived and/or modified CDS sequence (opt3) from hemagglutinin__InfluenzaA__AEO01413
augaaggccauccuggugguccuccuuuacaccuucgcuacagcaaacgccgacacucugugcauuggcuaucacgcgaauaacagcacggauaccguugacacaguguuggagaaaaauguaacugugacccauuccgucaacuuacuggaagauaagcacaaugggaaacuauguaagcucagaggaguggcuccccugcaucuugguaaaugcaacauagccggcuggauccuggggaauccugagugugaaucuuugucaacagcaaguagcugguccuacauuguugagaccucuucgucagacaacggaacuugcuauccaggcgauuuuaucgacuacgaggagcucagggagcagcugagcaguguguccucuuucgaacgguuugagauuuucccgaagacaagcuccuggcccaaucacgauucaaacaagggugucaccgccgcuuguccucaugcaggggccaaaaguuuuuauaagaaucugaucuggcucgugaaaaagggaaacagcuacccaaaauuaucuaaguccuauauaaaugacaagggcaaagaaguacugguucuuuggggcauccaccaccccucaacgagcgcugaucaacagaguuuguaccagaacgccgacgcguacguguucgucgggacuucucgcuauuccaagaaauuuaagccugagauugcaauccgaccaaaagugcgugaucaggagggaagaaugaauuacuauuggacccugguggaacccggugacaagauuacauucgaggccacuggcaaccuagucguuccuagguacgcuuuugccauggaacggaacgcagggagcggaaucauaauuucggauaccccagugcaugacugcaauacaaccugucaaacgccgaaaggcgcuaucaacacuucucuccccuuccagaauauucacccuaucacaaucgguaagugcccaaaguauguaaaauccaccaagcugcgccuugccacugggcugagaaacgugcccucaauucagaguaggggauuguuuggcgcgauagccggcuucaucgaagggggauggacagguauggucgacggcugguacggguaucaucaccagaaugaacaaggaagcggcuacgcagcugaucucaaauccacccagaacgccauugacaagaucacgaauaaagugaacucuguuauagagaagaugaauacccaguuuacagcuguggguaaggaguucaaccaccuggaaaaacggauugagaauuuaaacaagaaagucgaugacggguuccuggauaucuggacuuacaaugccgaacuccuugugcuguuggagaacgaacgcacccuagacuaucaugauagcaauguaaagaaccuguacgagaaaguucgaucacagcucaagaguaacgcaaaggagaucggcaauggauguuuugaguucuaucacaaaugcgacaacacauguauggaauccgugaagaauggcacuuacgauuauccuaaauacagcgaagaggccaagcugaacagagaagagauugacggggucaaacuugagucuaccaggaucuaucaaauucuggcuauauacucaacaguggcgaguagcuugguccucgugguuucccugggagcaaucucuuuuuggaugugcucgaaugguagcuuacagugccggauuuguaucuga

SEQ ID NO: 135548 - RNA, 1701 nt, Artificial Sequence
  derived and/or modified CDS sequence (opt3) from hemagglutinin__InfluenzaA__AEO01414
augaaggccauccuggugguccuccuuuacaccuucgcuacagcaaacgccgacacucugugcauuggcuaucacgcgaauaacagcacggauaccguugacacaguguuggagaagaauguaacugugacccauuccgucaacuuacuggaagauaagcacaaugggaaacuauguaagcucagaggaguggcuccccugcaucuugguaaaugcaacauagccggcuggauccuggggaauccugagugugaaucuuugucaacagcaaguagcugguccuacauuguugagaccucuucgucagacaacggaacuugcuauccaggcgauuuuaucgacuacgaggagcucagggagcagcugagcaguguguccucuuucgaacgguuugagauuuucccgaagacaagcuccuggcccaaucacgauucaaacaagggugucaccgccgcuuguccucaugcaggggccaaaaguuuuuauaagaaucugaucuggcucgugaaaaagggaaacagcuacccaaaauuaucuaaguccuauauaaaugacaagggcaaagaaguacugguucuuuggggcauccaccaccccucaacgagcgcugaucaacagaguuuguaccagaacgccgacgcguacguguucgucgggacuucucgcuauuccaagaaauuuaagccugagauugcaauccgaccaaaagugcgugaucaggagggaagaaugaauuacuauuggacccugguggaacccggugacaagauuacauucgaggccacuggcaaccuagucguuccuagguacgcuuuugccauggaacggaacaccgggagcggaaucauaauuucggauacaccagugcaugacugcucuaccacgugucaaacuccgaaaggcgcaaucaauacaucccuccccuuccagaacguacacccuauuaccaucgguaagugcccaaaguaugugaaaucaacuaagcugcgccuugcuacagggcugagaaauguccccaguauccagagcaggggauuguuuggcgccauugcgggcuucauagaagggggauggaccgguaugguggacggcugguacggguaucaucaccagaacgaacaaggauccggcuacgccgcagaucucaaaucuacgcagaaugcuaucgacgagauuaccaacaagguuaauagcgugaucgagaaaaugaacacacaguuuacugccgucgguaaggaguucaaucaccuggaaaagcggauagaaaacuuaaauaaaaagguggaugacggguuccuggauauuuggaccuacaacgcugagcuccuuguacuguuggaaaaugagcgcacacuagacuaucaugauucaaacguuaaaaaucuguacgagaaggugcgaagucagcucaaaaacaacgccaaggaaaucggcaauggauguuuugaguucuaucacaagugcgacaacacuuguauggaauccgucaaaaauggcaccuacgauuauccuaaguacagcgaggaagcaaaacugaacagagaggagaucgacggggugaaacuugaaucuacaaggauuuaucaaauccuggccauuuacucaaccgucgcuaguagcuuggugcucguugugucccugggagcgauaucuuuuuggaugugcucgaaugguagcuuacagugccggaucuguauuuga

SEQ ID NO: 135549 - RNA, 1701 nt, Artificial Sequence; identical to SEQ ID NO: 134348
  derived and/or modified CDS sequence (opt3) from hemagglutinin__InfluenzaA__AEO01416

SEQ ID NO: 135550 - RNA, 1701 nt, Artificial Sequence; identical to SEQ ID NO: 131881
  derived and/or modified CDS sequence (opt3) from hemagglutinin__InfluenzaA__AEO01418

SEQ ID NO: 135551 - RNA, 1701 nt, Artificial Sequence; identical to SEQ ID NO: 131881
  derived and/or modified CDS sequence (opt3) from hemagglutinin__InfluenzaA__AEO01419

SEQ ID NO: 135552 - RNA, 1701 nt, Artificial Sequence
  derived and/or modified CDS sequence (opt3) from hemagglutinin__InfluenzaA__AEO01420
augaaggccauccuggugguccuccuuuacaccuucgcuacagcaaacgccgacacucugugcauuggcuaucacgcgaauaacagcacggauaccguugacacaguguuggagaaaaauguaacugugacccauuccgucaacuuacuggaauacaagcacaaugggaaacuauguaagcucagaggaguggcuccccugcaucuugguaaaugcaacauagccggcuggauccuggggaauccugagugugaaucuuugucaacagcaaguagcugguccuauauuguugagaccucuaacucggauaauggaacuugcuacccaggcgacuuuaucgauuaugaggagcucagggagcagcugucaagcgugaguuccuucgaacgguuugagauuuucccgaagacaucuagcuggcccaaccacgacuccaauaagggugucaccgccgcuuguccucaugcaggggccaaaucauuuuacaagaaccugaucuggcucgugaaaaagggaaauaguuauccaaaauuaagcaagucuuacauaaacgauaagggcaaagaaguacugguucuuuggggcauccaccaccccuccacgucagcugaccaacagagcuuguaccagaaugccgaugcguauguguucgucgggacuucccgcuacucuaagaaauuuaagccugagauugcaauccgaccaaaagugcgugaccaggagggaagaaugaacuauuacuggacccugguggaacccggugauaagauuacauucgaggccacuggcaaccuagucguuccuagguaugcuuuugccauggaacggaaugcaggguccggaaucauaauuagcgacaccccagugcaugauugcaacacaaccugucaaacgccgaaaggcgcuaucaauacuucgcuccccuuccagaacauucacccuaucacaaucgguaagugcccaaaguacguaaaaucuaccaagcugcgccuugccacugggcugagaaaugugcccuccauucagucaaggggauuguuuggcgcgauagccggcuucaucgaagggggauggacagguauggucgacggcugguauggguaccaucaccagaacgaacaaggaaguggcuacgcagcugaccucaaaagcacccagaaugccauugaugagaucacgaacaaggugaauaguguuauagagaaaaugaacacccaguuuacagcuguggguaaggaguucaaucaccuggaaaagcggauugaaaacuuaaauaaaaaggucgacgauggguuccuggacaucuggacuuauaacgccgagcuccuugugcuguuggaaaaugagcgcacccuagauuaccaugacucuaacguaaagaaccuguaugagaagguucgaagccagcucaaaaauaacgcaaaggaaaucggcaauggauguuuugaguucuaccacaagugcgauaacacauguauggaaucagugaaaaauggcacuuaugacuacccuaaguauagugaggaagccaaacugaacagagaggagauugauggggucaaacuugaauccaccaggaucuaccaaauucuggcuauauacagcacaguggcgucuucauugguccucgugguuagucugggagcaaucagcuuuuggaugugcuccaaugguucuuuacagugccggauuuguaucuga

SEQ ID NO: 135553 - RNA, 1701 nt, Artificial Sequence
  derived and/or modified CDS sequence (opt3) from hemagglutinin__InfluenzaA__AEO01421
augaaggccauccuggugguccuccuuuacaccuucgcuacagcaaacgccgacacucugugcauuggcuaucacgcgaauaacagcacggauaccguugacacaguguuggagaaaaauguaacugugacccauuccgucaacuuacuggaagauaagcacaaugggaaacuauguaagcucagaggaguggcuccccugcaucuugguaaaugcaacauagccggcuggauccuggggaauccugagugugaaucuuugucaacagcaaguagcugguccuacauuguugagaccucuucgucagacaacggaacuugcuauccaggcgauuuuaucgacuacgaggagcucagggagcagcugagcaguguguccucuuucgaaaaguuugagauuuucccgaagacaagcuccuggcccaaucacgauucaaacaaaggugucaccgccgcuuguccucaugcaggggccaagaguuuuuauaaaaaucugaucuggcucgugaagaaaggaaacagcuacccaaaguuaucuaaguccuauauaaaugacaaaggcaaggaaguacugguucuuuggggcauccaccaccccucaacgagcgcugaucaacagaguuuguaccagaacgccgacgcguacguguucgucgggacuucucgguauuccaaaaaguuuaaaccugagauugcaauccgcccaaaggugcgagaucaggagggacguaugaauuacuauuggacccugguggaacccggugacaaaauuacauucgaggccacuggcaaccuagucguuccuagauacgcuuuugccauggaaaggaacgcagggagcggaaucauaauuucggauaccccagugcaugacugcaauacaaccugucaaacgccgaagggcgcuaucaacacuucucuccccuuccagaauauucacccuaucacaaucgguaagugcccaaaauauguaaaguccaccaaacugcggcuugccacugggcugcgcaacgugcccucaauucagaguagaggauuguuuggcgcgauagccggcuucaucgaagggggauggacagguauggucgacggcugguacggguaucaucaccagaaugaacaaggaagcggcuacgcagcugaucucaaguccacccagaacgccauugacaaaaucacgaauaaggugaacucuguuauagagaagaugaauacccaguuuacagcuguggguaaagaguucaaccaccuggaaaagaggauugagaauuuaaacaaaaaggucgaugacggguuccuggauaucuggacuuacaaugccgaacuccuugugcuguuggagaacgaacggacccuagacuaucaugauagcaauguaaagaaccuguacgagaagguucgcucacagcucaagaacaaugcaaaagagaucggcaacggauguuuugaguucuaucacaagugcgacaauacauguauggaaagugugaaaaacggcacuuacgauuauccuaaguacuccgaagaggccaaacugaaucgagaagagauugacggggucaaacuugagagcaccagaaucuaucaaauucuggcuauauacucuacaguggcgucaaguuugguccucgugguuagccugggagcaaucuccuuuuggaugugcucuaacgguucguuacagugcaggauuuguaucuga

SEQ ID NO: 135554 - RNA, 1701 nt, Artificial Sequence
  derived and/or modified CDS sequence (opt3) from hemagglutinin__InfluenzaA__AEO01422
augaaggccauccuggugguccuccuuuacaccuucgcuauugcaaacgccgacacacugugcauaggcuaucacgcgaauaacagcacugauacgguugacaccguguuggagaaaaauguaacagugacucauuccgucaacuuacuggaagauaagcacaaugggaaacuauguaagcucagaggaguggcuccccugcaucuugguaaaugcaacaucgccggcuggauucuggggaauccugagugugaaucuuugucaaccgcaaguagcugguccuacaucguugagacaucuucgucagacaacggaaccugcuauccaggcgauuuuauugacuacgaggagcucagggagcagcugagcaguguguccucuuucgaacgguuugagaucuucccgaagacuagcuccuggcccaaucacgauucaaacaagggugucacagccgcuuguccucaugcaggggccaaaaguuuuuauaagaaucugauauggcucgugaaaaagggaaacuuauacccaaaacugagcaagucuuauaucaaugacaagggcaaagaaguacuuguuuuguggggcauucaccaccccuccaccucagcugaucaacagagccuguaccagaacgccgacgcguacguguucgucgggacgagucgcuauucuaagaaauuuaagccugagaucgcaauucgaccaaaagugcgugaucaggagggaagaaugaauuacuauuggacucuaguggaacccggugacaagaucaccuucgaggccacaggcaaccucgucguuccuagguacgcuuuugccauggaacggaacgcaggguccggaauaauuaucagcgauacuccagugcaugacugcaauaccacaugucaaaccccgaaaggcgcuauuaacacgucgcugcccuuccagaauauccacccuaucacuauugguaagugcccaaaguauguaaaaucuacaaaacuucgccuggccaccggguugagaaacgugcccuccauacagucaaggggacucuuuggcgcgaucgccggcuucauugaagggggauggacugguauggucgacggcugguacggguaucaucaccagaaugaacaaggaaguggcuacgcagcugaucugaaaagcacacagcacgccaucgacgagauaaccaacaagguuaauuccgugauugagaaaaugaacacgcaguuuaccgcuguggguaaggaguucaaucauuuagaaaagcggaucgaaaaccugaauaaaaaggucgaugacggguuccucgauaucuggacauacaacgccgagcuucugguguugcuagaaaaugagcgcacucuggacuaucacgauucuaacguaaagaaucucuacgagaagguucgaagccagcugaaaaacaacgcaaaggaaauuggcaauggauguuuugaguucuaucauaagugcgacaacaccuguauggaaucagugaaaaauggcacauacgauuauccuaaguacagugaggaagccaaacuuaacagagaggagaucaauggggucaagcuggaauccacuaggauuuaucaaauauuggcuaucuacagcaccguggcgucuucacucguccuggugguuaguuuaggagcaauuagcuuuuggaugugcuccaacgguucucugcagugccggaucuguaucuga

SEQ ID NO: 135555 - RNA, 1701 nt, Artificial Sequence
  derived and/or modified CDS sequence (opt3) from hemagglutinin__InfluenzaA__AEO01423
augaaggccauccugauugugcuccuuuacaccuucgcuacagcaaacgccgacacucugugcauaggcuaucacgcgaauaacagcacggauaccgucgacacaguuuuggagaagaaugugacuguaacccauuccgugaacuuacuggaagauaagcacaaugggaaacuauguaagcucagaggagucgcuccccugcaucuugguaaaugcaacaucgccggcuggauucuggggaauccugagugugaaucuuugucaacagcaaguagcugguccuacaucguggagaccucuucgucagacaacggaacuugcuauccaggcgauuuuauugacuacgaggagcucagggagcagcugagcaguguuuccucuuucgaacgguuugagaucuucccgaagacaagcuccuggcccaaucacgauucaaacaagggugugaccgccgcuuguccucaugcaggggccaaaaguuuuuauaagaaucugauauggcucgucaaaaagggaaacagcuacccaaaauuaucuaaguccuauaucaaugacaagggcaaagaagugcugguacuuuggggcauucaccaccccucaacgagcgcugaucaacagaguuuguaccagaacgccgacgcguacguuuucguggggacuucucgcuauuccaagaaauuuaagccugagaucaccauucgaccaaaaguccgugaucaggagggaagaaugaauuacuauuggacacugguggaacccggugacaagaucacuuucgaggcaaccggcaaccuaguggucccuagguacgccuuugcuauggaacggaacgccgggagcggaauaauuaucucggauacaccaguucaugacugcaauaccacgugucaaacuccgaaaggcgcaauuaacacaucucuccccuuccagaauauccacccuaucaccauugguaagugcccaaaguaugugaaauccacuaagcugcgccuugcuacagggcugagaaacguacccucaauacagaguaggggauuguuuggcgccaucgcgggcuucauugaagggggauggaccgguaugguggacggcugguacggguaucaucaccagaaugaacaaggaagcggcuacgccgcagaucucaaauccacgcagaacgcuaucgacgagauaaccaauaaggucaacucugugauugagaaaaugaauacacaguuuacugccguugguaaggaguucaaccaccuggaaaagcggaucgaaaauuuaaacaaaaagguggaugacggguuccuggauaucuggaccuacaaugcugagcuccuuguccuguuggaaaacgagcgcacacuagacuaucaugauagcaaugugaaaaaccuguacgagaagguacgaucacagcucaaaaacaaugccaaggaaauuggcaacggauguuuugaguucuaucacaagugcgacaauacuuguauggaaaguguuaaaaacggcaccuacgauuauccuaaguacuccgaggaagcaaaacugaauagagaggagaucgacggggugaaacuugaaagcacaaggauuuaucaaauacuggccaucuacucuaccgucgcuucaaguuuggugcucgucgugagccugggagcgauuuccuuuuggaugugcucuaacgguucguuacagugccggaucuguaucuga

SEQ ID NO: 135556 - RNA, 1701 nt, Artificial Sequence; identical to SEQ ID NO: 135553
  derived and/or modified CDS sequence (opt3) from hemagglutinin__InfluenzaA__AEO01424

SEQ ID NO: 135557 - RNA, 1701 nt, Artificial Sequence; identical to SEQ ID NO: 135553
  derived and/or modified CDS sequence (opt3) from hemagglutinin__InfluenzaA__AEO01425

SEQ ID NO: 135558 - RNA, 1701 nt, Artificial Sequence; identical to SEQ ID NO: 130717
  derived and/or modified CDS sequence (opt3) from hemagglutinin__InfluenzaA__AEO01426

SEQ ID NO: 135559 - RNA, 1701 nt, Artificial Sequence
  derived and/or modified CDS sequence (opt3) from hemagglutinin__InfluenzaA__AEO01427
augaaggccauccuggugguccuccuuuacaccuucgcuacagcaaacagcgacacucugugcauuggcuaucacgccaauaacuccacggauaccguugacacaguguuggagaaaaauguaacugugacccauucugucaacuuacuggaagauaagcacaaugggaaacuauguaagcucagaggaguggcgccccugcaucuugguaaaugcaacauagcuggcuggauccuggggaauccugagugugaaucauugaguacagccagcuccuggucuuacauuguugagaccucgucaagcgacaacggaacuugcuauccaggcgauuuuaucgacuacgaggagcucagggagcagcugaguuccgugucuagcuucgaacgguuugagauuuucccgaagacauccucauggcccaaucacgauaguaacaagggugucaccgcagccuguccucaugcuggggcaaagagcuuuuauaaaaaucugaucuggcucgugaaaaagggaaacucuuacccaaaauuauccaagucauauauaaaugacaagggcaaagaaguacugguucuuuggggcauccaccaccccagcacgagugccgaucaacagucuuuguaccagaacgcugacgccuacguguucgucgggacuucccgcuauagcaagaaauuuaagccugagauugcgauccgaccaaaagugcgugaucaggagggaagaaugaauuacuauuggacccugguggaacccggugacaagauuacauucgaggcaacuggcaaccuagucguuccuagguacgccuuugcuauggaacggaacgccgggucgggaaucauaauuucugauaccccagugcaugacugcaauacaaccugucaaacgccgaaaggcgcaaucaacacuucccuccccuuccagaauauucacccuaucacaaucgguaagugcccaaaguauguaaaaucaaccaagcugcgccuugcuacugggcugagaaacgugcccaguauucagagcaggggauuguuuggcgccauagcgggcuucaucgaagggggauggacagguauggucgacggcugguacggguaucaucaccagaaugaacaaggauccggcuacgccgcagaucucaaaucuacccagaacgcuauugacaagaucacgaauaaagugaacagcguuauagagaagaugaauacccaguuuacagccguggguaaggaguucaaccaccuggaaaaacggauugagaauuuaaacaagaaagucgaugacggguuccuggauaucuggacuuacaaugcugaacuccuugugcuguuggagaacgaacgcacccuagacuaucaugauucaaauguaaagaaccuguacgagaaaguucgaagucagcucaagaacaaugccaaggagaucggcaacggauguuuugaguucuaucacaaaugcgacaauacauguauggaauccgugaagaacggcacuuacgauuauccuaaauacagcgaagaggcaaagcugaauagagaagagauugacggggucaaacuugagucuaccaggaucuaucaaauucuggccauauacucaacaguggcuaguagcuugguccucgugguuucccugggagcgaucucuuuuuggaugugcucgaacgguagcuuacagugccggauuuguaucuga

SEQ ID NO: 135560 - RNA, 1701 nt, Artificial Sequence
  derived and/or modified CDS sequence (opt3) from hemagglutinin__InfluenzaA__AEO01428
augaaggccauccuggugguccuccuuuacaccuucgcuacagcaaacgccgacacucugugcauuggcuaucacgcgaauaacagcacggauaccguugacacaguguuggagaaaaauguaacugugacccauuccgucaacuuacuggaagauaagcacaaugggaaacuauguaagcucagaggaguggcuccccugcaucuugguaaaugcaacauagccggcuggauccuggggaauccugagugugaaucuuugucaacagcaaguagcugguccuacauuguugagaccucuucgucagacaacggaacuugcuauccaggcgauuuuaucgacuacgaggagcucagggagcagcugagcaguguguccucuuucgaacgguuugagauuuucccgaagacaagcuccuggcccgaucacgacucaaauaagggugucaccgccgcuuguccucaugcaggggccaaaaguuuuuauaagaaccugaucuggcucgugaaaaagggaaauagcuacccaaaauuaucuaaguccuauauaaacgauaagggcaaagaaguacugguucuuuggggcauccaccaccccucaacgagcgcugaccaacagaguuuguaccagaaugccgaugcguacguguucgucgggacuucucgcuauuccaagaaauuuaagccugagauugcaauccgaccaaaagugcgugaccaggagggaagaaugaacuacuauuggacccugguggaacccggugauaagauuacauucgaggccacuggcaaucuagucguuccuagguacgcuuuugccauggaacggaacgcagggagcggaaucauaauuucggacaccccagugcaugacugcaacacaaccugucaaacgccgaaaggcgcuaucaauacuucucuccccuuccagaacauucacccuaucacaaucgguaagugcccaaaguauguaaaauccaccaagcugcgcauggccacugggcuuagaaaugugcccucaauucagaguaggggacuguuuggcgcgauagccggcuucaucgaagggggauggacagguauggucgauggcugguacggguaucaucaccagaacgaacaaggaagcggcuacgcagcugacuugaaauccacccagaaugccauugaugagaucacgaacaagguaaauucuguuauagagaaaaugaacacccaguuuacagcuguggguaaggaguucaaucaccucgaaaagcggauugaaaaccugaauaaaaaggucgacgauggguucuuagacaucuggacuuacaacgccgagcugcucgugcuucuggaaaaugagcgcaccuuggauuaucaugacagcaacgugaaaaaucuauacgagaagguucgaucacagcugaaaaacaacgcaaaggaaaucggcaauggauguuuugaguucuaucacaagugcgauaacacauguauggaaagugugaaaaauggcacuuacgacuauccuaaguacuccgaggaagccaaacucaacagagaggagauugauggggucaagcuggaaagcaccaggaucuaucaaauucuugcuauauacucuacaguggcgucaagucuggucuuggugguuagccucggagcaaucuccuuuuggaugugcucuaaugguucgcugcagugccggauuuguaucuga

SEQ ID NO: 135561 - RNA, 1701 nt, Artificial Sequence; identical to SEQ ID NO: 131881
  derived and/or modified CDS sequence (opt3) from hemagglutinin__InfluenzaA__AEO01429

SEQ ID NO: 135562 - RNA, 1701 nt, Artificial Sequence
  derived and/or modified CDS sequence (opt3) from hemagglutinin__InfluenzaA__AEO01430
augaaggccauccuggugguccuccuuuacaccuucgcuacagcaaacgccgacacucugugcauuggcuaucacgcgaauaacagcacggauaccguugacacaguguuggagaaaaauguaacugugacccauuccgucaacuuacuggaagauaagcacaaugggaaacuauguaagcucagaggaguggcuccccugcaucuugguaaaugcaacauagccggcuggauccuggggaauccugagugugaaucuuugucaacagcaaguagcugguccuacauuguugagaccucuucgucagacaacggaacuugcuauccaggcgauuuuaucgacuacgaggagcucagggagcagcugagcaguguguccucuuucgaacgguuugagauuuucccgaagacaagcuccuggcccaaucacgauucaaacaagggugucaccgccgcuuguccucaugacggggcaaaaaguuuuuauaagaaucugaucuggcucgugaaaaagggaaacagcuacccaaaauuaucuaaguccuauauaaaugauaagggcaaagaaguacugguucuuuggggcauccaccaccccucaacgagcgccgaccaacagaguuuguaccagaacgcugaugccuacguguucgucgggacuucucgcuauuccaagaaauuuaagccugagauugcgauccgaccaaaagugcgugaccaggagggaagaaugaauuacuauuggacccugguggaacccggugauaagauuacauucgaggcaacuggcaaccuagucguuccuagguacgccuuugcuauggaacggaacgccgggagcggaaucauaauuucggacaccccagugcaugacugcaauacaaccugucaaacgccgaaaggcgcaaucaacacuucucuccccuuccagaauauucacccuaucacaaucgguaagugcccaaaguauguaaaauccaccaagcugcgccuugcuacugggcugagaaacgugcccucaauucagaguaggggauuguuuggcgccauagcgggcuucaucgaagggggauggacagguauggucgauggcugguacggguaucaucaccagaaugaacaaggaagcggcuacgccgcagaccucaaauccacccagaacgcuauugaugagaucacgaauaaggugaacucuguuauagagaaaaugaauacccaguuuacagccguggguaaggaguucaaccaccuggaaaagcggauugaaaauuuaaacaaaaaggucgacgauggguuccuggacaucuggacuuacaaugcugagcuccuugugcuguuggaaaacgagcgcacccuagauuaucaugacagcaauguaaagaaccuguacgagaagguucgaucacagcucaaaaacaaugccaaggaaaucggcaacggauguuuugaguucuaucacaagugcgauaauacauguauggaaagugugaaaaacggcacuuacgacuauccuaaguacuccgaggaagcaaaacugaauagagaggagauugauggggucaaacuugaaagcaccaggaucuaucaaauucuggccauauacucuacaguggcuucaaguuugguccucgugguuagccugggagcgaucuccuuuuggaugugcucuaacgguucguuacagugccggauuuguaucuga

SEQ ID NO: 135563 - RNA, 1701 nt, Artificial Sequence; identical to SEQ ID NO: 135435
  derived and/or modified CDS sequence (opt3) from hemagglutinin__InfluenzaA__AEO01431

SEQ ID NO: 135564 - RNA, 1701 nt, Artificial Sequence; identical to SEQ ID NO: 130717
  derived and/or modified CDS sequence (opt3) from hemagglutinin__InfluenzaA__AEO01432

SEQ ID NO: 135565 - RNA, 1701 nt, Artificial Sequence
  derived and/or modified CDS sequence (opt3) from hemagglutinin__InfluenzaA__AEO01434
augaaggccauccuggugguccuccuuuacaccuucgcuacagcaaacgccgacacucugugcauuggcuaucacgcgaauaacagcacggauaccguugacacaguguuggagaaaaauguaacugugacccauuccgucaacuuacuggaagauaagcacaaugggaaacuauguaagcucagaggaguggcuccccugcaucuuggugagugcaacauagccggcuggauccuggggaauccugaaugugagucuuugucaacagcaaguagcugguccuacauuguugaaaccucuucgucagacaacggaacuugcuauccaggcgauuuuaucgacuacgaggagcucagggaacagcugagcaguguguccucuuucgagcgguuugaaauuuucccgaaaacaagcuccuggcccaaucacgauucaaacaagggugucaccgccgcuuguccucaugcaggggccaagaguuuuuauaaaaaucugaucuggcucgugaagaaaggaaacagcuacccaaaguuaaauaaaucuuauauaaacgacaagggcaaggagguacugguucuuuggggcauccaccaccccuccacgucagcugaucaacagagcuuguaccagaaugccgacgcguacguguucgucgggacuucccgcuauucuaaaaaguuuaaaccugagauugcaauccgaccaaaggugcgugaucaggaaggaagaaugaacuacuauuggacccugguggagcccggugacaaaauuacauucgaagccacuggcaaccuagucguuccuagguacgcuuuugccauggagcggaaugcaggguccggaaucauaauuagcgauaccccagugcaugacugcaacacaaccugucaaacgccgaagggcgcuaucaauacuucgcuccccuuccagaacauucacccuaucacaaucggugaaugcccaaaauauguaaagucuaccaagcugcgccuugccacugggcugagaaaugugcccuccauucagucaaggggauuguuuggcgcgauagccggcuucaucgaagggggauggacagguauggucgacggcugguacggguaucaucaccagaacgagcaaggaaguggcuacgcagcugaucucaaaagcacccagaaugccauugacaagaucacgaacaaagugaauaguguuauagaaaagaugaacacccaguuuacagcuguggguaaagaguucaaucaccuggaaaagcggauugagaacuuaaauaagaaagucgaugacggguuccuggauaucuggacuuacaacgccgaacuccuugugcuguuggagaaugagcgcacccuagacuaucaugauucuaacguaaagaaccuguacgaaaaaguucgaagccagcucaagaauaacgcaaaagagaucggcaauggauguuuugaguucuaucacaagugcgacaacacauguauggagucagugaagaauggcacuuacgauuauccuaaauacagugaagaggccaagcugaacagagaggaaauugacggggucaaacuugaguccaccaggaucuaucaaauucuggcuauauacagcacaguggcgucuucauugguccucgugguuagucugggagcaaucagcuuuuggaugugcuccaaugguucuuuacagugccggauuuguaucuga

SEQ ID NO: 135566 - RNA, 1701 nt, Artificial Sequence
  derived and/or modified CDS sequence (opt3) from hemagglutinin__InfluenzaA__AEO01435
augaaggccauccuggugguccuccuuuacaccuucgcuacagcaaacgccgacacucugugcauuggcuaucacgcgaauaacagcacggauaccguugacacaguguuggagaaaaauguaacugugacccauuccgucaacuuacuggaagauaagcacaaugggaaacuauguaagcucagaggaguggcuccccugcaucuugguaaaugcaacauagccggcuggauccuggggaauccugagugugaaucuuugucaacagcaaguagcugguccuacauuguugagaccucuucgucagacaacggaacuugcuauccaggcgauuuuaucgacuacgaggagcucagggagcagcugagcaguguguccucuuucgaacgguuugagauuuucccgaagacaagcuccuggcccaaucacgauucaaacaagggugucaccgccgcuuguccucaugcaggggccaaaaguuuuuauaagaaucugaucuggcucgugaaaaagggaaacagcuacccaaaauuaucuaaguccuauauaaaugacaagggcaaagaaguacugguucuuuggggcauccaccaccccucaacgagcgcugaucaacagaguuuguaccagaacgccgacgcguacguguucgucgggacuucucgcuauuccaagaaauuuaagccugagauugcaauccgaccaaaagugcgugaucaggagggaagaaugaauuacuauuggacccugguggaacccggugacaagauuacauucgaggccacuggcaaccuagucguuccuagguacgcuuuugccauggaacggaacgcagggagcggaaucauaauuucggauaccccaguguaugacugcaauacaaccugucaaacgccgaaaggcgcuaucaacacuucucuccccuuccagaauauucauccuaucacaaucgguaagugcccaaaguacguaaaauccaccaagcugcgccuugccacugggcugagaaacgugcccucaauucagaguaggggauuguuuggcgcgauagccggcuucaucgaagggggauggacagguauggucgacggcugguauggguaccaccaucagaaugaacaaggaagcggcuacgcagcugaucucaaauccacccagaacgccauugacaagaucacgaauaaagugaacucuguuauagagaagaugaauacccaguuuacagcuguggguaaggaguucaaccaccuggaaaaacggauugagaauuuaaacaagaaagucgaugacggguuccuggauaucuggacuuauaaugccgaacuccuugugcuguuggagaacgaacgcacccuagacuaccacgauagcaauguaaagaaccuguaugagaaaguucgaaaccagcucaagaauaacgcaaaggagaucggcaauggauguuuugaguucuaccauaaaugcgacaacacauguauggaaucagugaagaauggcacuuaugauuacccuaaauauagugaagaggccaagcugaacagagaagagauugacggggucaaacuugaguccaccaggaucuaccaaauucuggcuauauacagcacaguggcgucuucauugguccucgugguuagucugggagcaaucagcuuuuggaugugcuccaaugguucuuuacagugccggauuuguaucuga

SEQ ID NO: 135567 - RNA, 1701 nt, Artificial Sequence; identical to SEQ ID NO: 135553
  derived and/or modified CDS sequence (opt3) from hemagglutinin__InfluenzaA__AEO01436

SEQ ID NO: 135568 - RNA, 1701 nt, Artificial Sequence; identical to SEQ ID NO: 135435
  derived and/or modified CDS sequence (opt3) from hemagglutinin__InfluenzaA__AEO01437

SEQ ID NO: 135569 - RNA, 1701 nt, Artificial Sequence; identical to SEQ ID NO: 135486
  derived and/or modified CDS sequence (opt3) from hemagglutinin__InfluenzaA__AEO01438

SEQ ID NO: 135570 - RNA, 1701 nt, Artificial Sequence; identical to SEQ ID NO: 131070
  derived and/or modified CDS sequence (opt3) from hemagglutinin__InfluenzaA__AEO01440

SEQ ID NO: 135571 - RNA, 1701 nt, Artificial Sequence
  derived and/or modified CDS sequence (opt3) from hemagglutinin__InfluenzaA__AEO01441
augaaggccauccuggugguccuccuuuacaccuucgcuacagcaaacgccgacacucugugcauuggcuaucacgcgaauaacagcacggauaccguugacacaguguuggagaaaaauguaacugugacccauuccgucaacuuacuggaagauaagcacaaugggaaacuauguaagcucagaggaguggcuccccugcaucuugguaaaugcaacauagccggcuggauccuggggaauccugagugugaaucuuugucaacagcaaguagcugguccuacauuguugagaccucuucgucagacaacggaacuugcuauccaggcgauuuuaucgacuacgaggagcucagggagcagcugagcaguguguccucuuucgaacgguuugagauuuucccgaagacaagcuccuggcccaaucacgauucaaacaagggugucaccgccgcuuguccucaugcaggggccaaaaguuuuuauaagaaucugaucuggcucgugaaaaagggaaacagcuacccaaaauuaucuaaguccuauauaaaugacaagggcaaagaaguacugguucuuuggggcauccaccaccccucaacgagcgcugaucaacagaguuuguaccagaacgccgacgcguacguguucgucgggacuucucgcuauuccaagaaauuuaagccugagauugcaauccgaccaaaagugcgugaucaggagggaagaaugaauuacuauuggacccugguggaacccggugacaagauuacauucgaggccacuggcaaccuagucguuccuagguacgcuuuugccauggaacggaacgaugggagcggaaucauaauuucggacaccccagugcaugacugcaauacaaccugucaaacgccgaaaggcgcaaucaacacuucucuccccuuccagaauauucacccuaucacaaucgguaagugcccaaaguauguaaaauccaccaagcugcgccuugcuacugggcugagaaacgugcccucaauucagaguaggggauuguuuggcgccauagcgggcuucaucgaagggggauggacagguauggucgauggcugguacggguaucaucaccagaaugaacaaggaagcggcuacgccgcagaccucaaauccacccagaacgcuauugauaagaucacgaauaaagugaacucuguuauagagaagaugaauacccaguuuacagccguggguaaggaguucaaccaccuggaaaaacggauugagaauuuaaacaagaaagucgacgauggguuccuggacaucuggacuuacaaugcugaacuccuugugcuguuggagaacgaacgcacccuagauuaucaugacagcaauguaaagaaccuguacgagaaaguucgaucacagcucaagaacaaugccaaggagaucggcaacggauguuuugaguucuaucacaaaugcgauaauacauguauggaaagugugaagaacggcacuuacgacuauccuaaauacuccgaagaggcaaagcugaauagagaagagauugauggggucaaacuugagagcaccaggaucuaucaaauucuggccauauacucuacaguggcuucaaguuugguccucgugguuagccugggagcgaucuccuuuuggaugugcucuaacgguucguuacagugccggauuuguaucuga

SEQ ID NO: 135572 - RNA, 1701 nt, Artificial Sequence; identical to SEQ ID NO: 132137
  derived and/or modified CDS sequence (opt3) from hemagglutinin__InfluenzaA__AEO01442

SEQ ID NO: 135573 - RNA, 1701 nt, Artificial Sequence
  derived and/or modified CDS sequence (opt3) from hemagglutinin__InfluenzaA__AEO01443
augaaggccauccuggugguccuccuuuacaccuucgcuacagcaaacgccgacacucugugcauuggcuaucacgcgaauaacagcacggauaccguugacacaguguuggagaaaaauguaacugugacccauuccgucaacuuacuggaagauaagcacaaugggaaacuauguaagcucagaggaguggcuccccugcaucuugguaaaugcaacauagccggcuggauccuggggaauccugagugugaaucuuugucaacagcaaguagcugguccuacauuguugagaccucuucgucagacaacggaacuugcuauccaggcgauuuuaucgacuacgaagaacucagggagcagcugagcaguguguccucuuucgaacgguuugagauuuucccgaagacaagcuccuggcccaaucacgauucaaacaagggugucaccgccgcuuguccucaugcaggggccaaaaguuuuuauaagaaucugaucuggcucgugaaaaaggaaaacagcuacccaaaauuaucuaaguccuauauaaaugacaagggaaaagagguacugguucuuuggggcauccaccaccccucaacgagcgcugaucaacagaguuuguaccagaacgccgacgcguacguguucgucggcacuucucgcuauuccaagaaauuuaagccugagauugcaauccgaccaaaagugcgugaucaggaagggagaaugaauuacuauuggacccugguggagcccggagacaagauuacauucgaagccacugguaaccuagucguuccuagguacgcuuuugccauggagcggaacgcaggcagcgggaucauaauuucggauaccccagugcaugacugcaauacaaccugucaaacgccgaaaggagcuaucaacacuucucuccccuuccagaauauucacccuaucacaaucggcaagugcccaaaguauguaaaauccaccaagcugcgccuugccacuggucugagaaacgugcccucaauucagaguaggggguuguuuggagcgauagccggcuucaucgaaggcggguggacaggaauggucgacgguugguacggcuaucaucaccagaaugagcaagggagcggauacgcagcugaucucaaauccacccagaacgccauugacaagaucacgaauaaagugaacucuguuauagagaagaugaauacccaguuuacagcugugggcaaggaguucaaccaccuggagaaacggauugaaaauuuaaacaagaaagucgaugacgguuuccuggauaucuggacuuacaaugccgagcuccuugugcuguuggaaaacgagcgcacccuagacuaucaugauagcaauguaaagaaccuguacgagaaaguucgaucacagcucaagaacaaugcaaaggaaaucgggaacggcuguuuugaguucuaucacaaaugcgacaauacauguauggaaagugugaagaacggaacuuacgauuauccuaaauacuccgaggaagccaagcugaauagagaggagauugacggcgucaaacuugaaagcaccaggaucuaucaaauucuggcuauauacucuacaguggcgucaaguuugguccucgugguuagccugggggcaaucuccuuuuggaugugcucuaacggaucguuacagugccggauuuguaucuga

SEQ ID NO: 135574 - RNA, 1701 nt, Artificial Sequence
  derived and/or modified CDS sequence (opt3) from hemagglutinin__InfluenzaA__AEO01444
augaaggccauccuggugguccuccuuuacaccuucgcuacagcaaacgccgacacucugugcauuggcuaucacgcgaauaacagcacggauaccguugacacaguguuggagaaaaauguaacugugacccauuccgucaacuuacuggaagauaagcacaaugggaaacuauguaagcucagaggaguggcuccccugcaucuugguaaaugcaacauagccggcuggauccuggggaauccugagugugaaucuuugucaacagcaaguagcugguccuacauuguugagaccucuaacucggacaauggaacuugcuauccaggcgauuuuaucgacuacgaggagcucagggagcagcugucaagcgugaguuccuucgaacgguuugagauuuucccgaagacaucuagcuggcccaaccacgauuccgacaagggugucaccgccgcuuguccucaugcaggggccaaaucauuuuauaagaaucugaucuggcucgugaaaaagggaaacaguuacccaaaauuaagcaagucuuauauaaaugauaagggcaaagaaguacugguucuuuggggcauccaccaccccuccacgucagcugaccaacagagcuuguaccagaacgccgaugcguacguguucgucgggaccagucgcuauucuaagaaauuuaagccugagauugcaauccgaccaaaagugcgugaccaggagggaagaaugaauuacuauuggacucugguggaacccggugauaagauuacauucgaggccacuggcaaccuagucguuccuagguacgcuuuugccauggaacggaacgcaggguccggaaucauaauuagcgacaccccagugcaugacugcaauacaaccugucaaacgccgaaaggcgcuaucaacacuucgcuccccuuccagaauauucacccuaucacaaucgguaagugcccaaaguauguaaaaucuaccaagcugcgccuugccacugggcugagaaacgugcccuccauucagucaaggggauuguuuggcgcgauagccggcuucaucgaagggggauggacagguauggucgauggcugguacggguaucaucaccagaaugaacaaggaaguggcuacgcagcugaccucaaaagcacccagaacgccauugauaagaucacgaauaaagugaacuccguuauagagaagaugaauacccaguuuacagcuguggguaaggaguucaaccaccuggaaaaacggauugagaauuuaaacaagaaagucgacgauggguuccuggacaucuggacuuacaaugccgaacuccuugugcuguuggagaacgaacgcacccuagauuaucaugacucuaauguaaagaaccuguacgagaaaguucgaagccagcucaagaacaaugcaaaggagaucggcaacggauguuuugaguucuaucacaaaugcgauaauacauguauggaaucagugaagaacggcacuuacgacuauccuaaauacagugaagaggccaagcugaauagagaagagauugauggggucaaacuugaguccaccaggaucuaucaaauucuggcuauauacagcacaguggcgucuucauugguccucgugguuagucugggagcaaucagcuuuuggaugugcuccaacgguucuuuacagugccggauuuguaucuga

SEQ ID NO: 135575 - RNA, 1701 nt, Artificial Sequence; identical to SEQ ID NO: 132885
  derived and/or modified CDS sequence (opt3) from hemagglutinin__InfluenzaA__AEO01445

SEQ ID NO: 135576 - RNA, 1701 nt, Artificial Sequence; identical to SEQ ID NO: 135435
  derived and/or modified CDS sequence (opt3) from hemagglutinin__InfluenzaA__AEO01446

SEQ ID NO: 135577 - RNA, 1701 nt, Artificial Sequence
  derived and/or modified CDS sequence (opt3) from hemagglutinin__InfluenzaA__AEO01447
augaaggccauccuggugguccuccuuuacaccuucgcuacagcaaacgccgacacucugugcauuggcuaucacgcgaauaacagcacggauaccguugacacaguguuggagaaaaauguaacugugacccauuccgucaacuuacuggaagauaagcacaaugggaaacuauguaagcucagaggaguggcuccccugcaucuugguaaaugcaacauagccggcuggauccuggggaauccugagugugaaucuuugucaacagcaaguagcugguccuacauuguugagaccucuucgucagacaacggaacuugcuauccaggcgauuuuaucgacuacgaggagcucagggagcagcugagcaguguguccucuuucgaacgguuugagauuuucccgaagacaagcuccuggcccaaucacgauucaaacaagggugucaccgccgcuuguccucaugcaggggccaaaaguuuuuauaagaaucugaucuggcucgugaaaaagggaaacagcuacccaaaauuaucuaaguccuauauaaaugacaagggcaaagaaguacugguucuuuggggcauccaccaccccucaacgagcgcugaucaacagaguuuguaccagaacgccgacgcguacguguucgucgggacuucucgcuauuccaagaaauuuaagccugagauugcaauccgaccaaaagugcgugaucaggagggaagaaugaauuacuauuggacccugguggaacccggugacaagauuacauucgaggccacuggcaaccuagucguuccuagguacgcuuuugccauggaacggaacgcagggagcggaaucauaauuucggauaccccagugcaugacugcaauacaaccugucaaacgccgaaaggcgcuaucaacacuucucuccccuuccagaauauucacccuaucacaaucgguaagugcccaaaguauguaaaauccaccaagcugcgccuugccacugggcugagaaacgugcccucaauucagaguaggggauuguuuggcgcgauagccggcuucaucgaagggggauggacagguauggucgacggcugguacggguaucaucaccagaaugaacaaggaagcggcuacgcagcugaucucaaauccacccagaacgccauugacgagaucacgaauaaggugaacucuguuauagagaaaaugaauacccaguuuacagcuguggguaaggaguucaaccaccuggaaaagcggauugaaaauuuaaacaaaaaggucgaugacggguuccuggauaucuggacuuacaaugccgagcuccuugugcuguuggaaaacgagcgcacccuagacuaucaugauagcaauguaaagaaccuguacgagaagguucgaucacagcucaaaaacaaugcaaaggaaaucggcaacggauguuuugaguucuaucacaagugcgacaauacauguauggaaagugugaaaaacggcacuuacgauuauccuaaguacuccgaggaagccaaacugaauagagaggagauugacggggucaaacuugaaagcaccaggaucuaucaaauucuggcuauauacucuacaaucgcgucaaguuuggugcucgucgugagccugggagcaauuuccuuuuggaugugcucuaacgguucguuacagugccggaucuguaucuga

SEQ ID NO: 135578 - RNA, 1701 nt, Artificial Sequence; identical to SEQ ID NO: 131070
  derived and/or modified CDS sequence (opt3) from hemagglutinin__InfluenzaA__AEO01448

SEQ ID NO: 135579 - RNA, 1701 nt, Artificial Sequence; identical to SEQ ID NO: 135553
  derived and/or modified CDS sequence (opt3) from hemagglutinin__InfluenzaA__AEO01449

SEQ ID NO: 135580 - RNA, 1701 nt, Artificial Sequence
  derived and/or modified CDS sequence (opt3) from hemagglutinin__InfluenzaA__AEO01450
augaaggccauccuggugguccuccuuuacaccuucgcuacagcaaacgccgacacucugugcauuggcuaucacgcgaauaacagcacggauaccguugacacaguguuggagaagaauguaacugugacccauuccgucaacuuacuggaagauaagcacaaugggaaacuauguaagcucagaggaguggcuccccugcaucuugguaaaugcaacauagccggcuggauccuggggaauccugagugugaaucuuugucaacagcaaguagcugguccuacauuguugagaccucuucgucagacaacggaacuugcuauccaggcgauuuuaucgacuacgaggagcucagggagcagcugagcaguguguccucuuucgaacgguuugagauuuucccgaagacaagcuccuggcccaaucacgauucaaacaagggugucaccgccgcuuguccucaugcaggggccaaaaguuuuuauaagaaucugaucuggcucgugaaaaagggaaacagcuacccaaaauuaucuaaguccuauauaaaugacaagggcaaagaaguacugguucuuuggggcauccaccaccccucaacgagcacugaucaacagaguuuguaccagaacgcugacgccuacguguucgucgggaccucucgcuauuccaagaaauuuaagccugagauugcgauccgaccaaaagugcgugaucaggagggaagaaugaauuacuauuggacacugguggaacccggugacaagauuacuuucgaggcaaccggcaaccuagucguuccuagguacgccuuugcuauggaacggaacgccgggagcggaaucauaauuucggauacaccagugcaugacugcaauaccacgugucaaacuccgaaaggcgcaaucaacacaucucuccccuuccagaauauucacccuaucaccaucgguaagugcccaaaguauguaaaauccacuaagcugcgccuugcuacagggcugagaaacgugcccucaauucagaguaggggauuguuuggcgccauagcgggcuucaucgaagggggauggaccgguauggucgacggcugguacggguaucaucaccagaaugaacaaggaagcggcuacgccgcagaucucaaauccacgcagcacgcuauugacgagaucaccaacaagguaaauucuguuauagagaaaaugaacacacaguuuacugccguggguaaggaguucaaucaucuggaaaagcggauugaaaacuuaaauaaaaaggucgaugacggguuccuggauaucuggaccuacaacgcugagcuccuugugcuguuggaaaaugagcgcacacuagacuaucacgauagcaacgugaaaaaucuguacgagaagguucgaucacagcucaaaaacaacgccaaggaaaucggcaauggauguuuugaguucuaucauaagugcgacaacacuuguauggaaagugugaaaaauggcaccuacgauuauccuaaguacuccgaggaagcaaaacugaacagagaggagauugacggggucaaacuugaaagcacaaggaucuaucaaauucuggccauauacucuaccguggcuucaaguuugguccucgugguuagccugggagcgaucuccuuuuggaugugcucuaaugguucguuacagugccggauuuguaucuga

SEQ ID NO: 135581 - RNA, 1701 nt, Artificial Sequence; identical to SEQ ID NO: 130717
  derived and/or modified CDS sequence (opt3) from hemagglutinin__InfluenzaA__AEO01451

SEQ ID NO: 135582 - RNA, 1701 nt, Artificial Sequence
  derived and/or modified CDS sequence (opt3) from hemagglutinin__InfluenzaA__AEO01452
augaaggccauccuggugguccuccuuuacaccuucgcuacagcaaacgccgacacucugugcauuggcuaucacgcgaauaacagcacggauaccguugacacaguguuggagaaaaauguaacugugacccauuccgucaacuuacuggaagauaagcacaaugggaaacuauguaagcucagaggaguggcuccccugcaucuugguaaaugcaacauagccggcuggauccuggggaauccugagugugaaucuuugucaacagcaaguagcugguccuacauuguugagaccucuucgucagacaacggaacuugcuauccaggcgauuuuaucgacuacgaagaacucagggagcagcugagcaguguguccucuuucgaacgguuugagauuuucccgaagacaagcuccuggcccaaucacgauucaaacaagggugucaccgccgcuuguccucaugcagaagccaaaaguuuuuauaagaaucugaucuggcucgugaaaaaggggaacagcuacccaaaauuaucuaaguccuauauaaaugacaagggaaaagagguacugguucuuuggggcauccaccaccccucaacgagcgcugaucaacagaguuuguaccagaacgccgacgcguacguguucgucggcacuucucgcuauuccaagaaauuuaagccugagauugcaauccgaccaaaagugcgugaucaggaagggagaaugaauuacuauuggacccugguggagcccggagacaagauuacauucgaagccacugguaaccuagucguuccuagguacgcuuuugccauggagcggaacgcaggcagcgggaucauaauuucggauaccccagcucaugacugcaauacaaccugucaaacgccgaaaggagccaucaacacuucucuccccuuccagaauauucacccuaucacaaucggcaagugcccaaaguaugugaaauccaccaagcugcgccuugcgacuggucugagaaacguacccucaauucagaguaggggguuguuuggagccauagcaggcuucaucgaaggcggguggacaggaaugguggacgguugguacggcuaucaucaccagaaugagcaagggagcggauacgcugccgaucucaaauccacccagaacgcuauugacgagaucacgaauaaggucaacucugugauagagaaaaugaauacccaguuuacagccguuggcaaggaguucaaccaccuggaaaagcggauugagaauuuaaacaaaaagguggaugacgguuuccuggauaucuggacuuacaaugcagaacuccuuguccuguuggagaacgagcgcacccuagacuaucaugauagcaaugugaaaaagcuguacgaaaaaguacgaucacagcucaagaacaacgccaaggagaucgggaauggcuguuuugaguucuaucacaaaugcgacaacacauguauggaaaguguuaagaauggaacuuacgauuauccuaaauacuccgaagaggcuaagcugaacagagaggaaauugacggcgugaaacuugagagcaccaggaucuaucaaauucuggcgauauacucuacagucgcaucaaguuuggugcucgucgugagccugggggccaucuccuuuuggaugugcucuaauggaucguuacagugccggauuuguaucuga

SEQ ID NO: 135583 - RNA, 1701 nt, Artificial Sequence
  derived and/or modified CDS sequence (opt3) from hemagglutinin__InfluenzaA__AEO01453
augaaggccauccuggugguccuccuuuacaccuucgcuauugcaaacgccgacacacugugcauaggcuaucacgcgaauaacagcacugauacgguugacaccguguuggagaagaauguaacagugacucauuccgucaacuuacuggaagauaagcacaaugggaaacuauguaagcucagaggaguggcuccccugcaucuugguaaaugcaacaucgccggcuggauucuggggaauccugagugugaaucuuugucaaccgcaaguagcugguccuacaucguugagacaucuucgucagacaacggaaccugcuauccaggcgauuuuauugacuacgaggagcucagggagcagcugagcaguguguccucuuucgaacgguuugagaucuucccgaagacuagcuccuggcccaaucacgauucaaacaagggugucacagccgcuuguccucaugcaggggccaaaaguuuuuauaagaaucugauauggcucgugaaaaagggaaacagcuacccaaaauuaucuaaguccuauaucaaugacaagggcaaagaaguacugguucuuuggggcgugcaccaccccucaaccagcgcugaucaacagaguuuguaccagaacgccgacgcguacgucuucguggggacgucucgcuauuccaagaaauuuaagcgagagauugcaauccguccuaaagugagagaucaggagggaaggaugaauuacuauuggacucuggucgaaccaggugacaagauuaccuucgaggccacaggcaaccuaguugugccccgguacgcuuuugccauggaacgcaacgcagggagcggaaucauaauuucggauacuccuguacaugacugcaauaccacaugucaaaccccaaaaggcgcuaucaacacgucucucccguuccagaauauucaccccaucacuaucgguaagugcccuaaguaugugaaauccacaaagcugagacuugccaccgggcugaggaacgucccaucaauucagagucggggauuguuuggcgcgauagccggcuucaucgaagggggauggacugguaugguggacggcugguacggguaucaucaccagaaugaacaaggaagcggcuacgcagcugaucucaaauccacacagcacgccauugacgagaucaccaacaagguuaauucugugauagagaaaaugaacacgcaguuuaccgcugucgguaaggaguucaaucaucuggaaaagcgcauugaaaacuuaaauaaaaagguggaugacggguuccuggauaucuggacauacaacgccgagcuccuuguacuguuggaaaaugagcgaacucuagacuaucacgauagcaacguuaaaaaucuguacgagaaggugagaucacagcucaaaaacaacgcaaaggaaaucggcaauggauguuuugaguucuaucauaagugcgacaacaccuguauggaaagugucaaaaauggcacauacgauuaucccaaguacuccgaggaagccaaacugaacagggaggagauuaauggggugaaacuugaaagcacucggaucuaucaaauucuggcuauauacucuaccgucgcgucaaguuuggugcucguugugagccugggagcaaucuccuuuuggaugugcucuaacgguucguuacagugccguauuuguaucuga

SEQ ID NO: 135584 - RNA, 1701 nt, Artificial Sequence
  derived and/or modified CDS sequence (opt3) from hemagglutinin__InfluenzaA__AEO01454
augaaggccauccuggugguccuccuuuacaccuucgcuacagcaaacgccgacacucugugcauuggcuaucacgcgaauaacagcacggauaccguugacacaguguuggagaaaaauguaacugugacccauuccgucaacauauuagaagauaagcacaaugggaaacuguguaagcuaagaggaguggcuccccuccaucuggguaaaugcaacaucgccggcuggauucuugggaauccugagugugaaucucugucaacagcaaguagcugguccuacaucguugagaccucuucgucagacaacggaacuugcuauccaggcgauuuuauugacuacgaagaguugagggagcagcucagcaguguguccucuuucgaacgguuugagaucuucccgaagacaagcuccuggcccaaucacgauucaaacaagggugucaccgccgcuuguccucaugcaggggccaaaaguuuuuauaagaaucugauauggcuggugaaaaagggaaacagcuacccaaaacucucuaaguccuauaucaaugacaagggcaaagaaguauuaguucuguggggcauucaccaccccucaacgagcgcugaucaacagagucuuuaccagaacgccgacgcguacguguucgucgggacuucucgcuauuccaagaaauuuaagccugagaucgcaauucgaccaaaagugcgugaucaggagggaagaaugaauuacuauuggaccuugguggaacccggugacaagaucacauucgaggccacuggcaaccuggucguuccuagguacgcuuuugccauggaacggaacgcagggagcggaauaauuaucucggauaccccagugcaugacugcaauacaaccugucaaacgccgaaaggcgcuauuaacacuucucuacccuuccagaauauccacccuacaaccaucgguaagugcccaaaguauguaaaauccacuaagcuccgccuggccacagggcuuagaaacgugcccucaauucagaguaggggacuguuuggcgcgauagccggcuucaucgaagggggauggaccgguauggucgacggcugguacggguaucaucaccagaaugaacaaggaagcggcuacgcagcugauuugaaauccacgcagaacgccauugacgagaucaccaauaaggugaacucuguuauagagaaaaugaauacacaguuuacugcuguggguaaggaguucaaccaccucgagaagcggauugaaaaucugaacaaaaaggucgaugacggguucuuagauaucuggaccuacaaugccgagcugcucgugcuucuggaaaacgagcgcacauuggacuaucaugauagcaauguuaaaaaccuauacgagaagguacgaucacagcugaaaaacaaugcaaaggaaaucggcaacggauguuuugaguucuaucacaagugcgacaauacuuguauggaaagugugaaaaacggcaccuacgauuauccuaaguacuccgaggaagccaaacucaauagagaggagauugacggggucaagcuggaaagcacaaggaucuaucaaauucuugcuauauacucuaccguggcgucaagucuggucuuggugguuagccucggagcaaucuccuuuuggaugugcucuaacgguucgcugcagugccggauuuguaucuga

SEQ ID NO: 135585 - RNA, 1701 nt, Artificial Sequence
  derived and/or modified CDS sequence (opt3) from hemagglutinin__InfluenzaA__AEO01455
augaaggccauccuggugguccuccuuuacaccuucgcuacagcaaacgccgacacucugugcauuggcuaucacgcgaauaacagcacggauaccguugacacaguguuggagaaaaauguaacugugacccauuccgucaacuuacuggaagauaagcacaaugggaaacuauguaagcucagaggaguggcuccccugcaucuugguaaaugcaacauagccggcuggauccuggggaauccugagugugaaucuuugucaacagcaaguagcugguccuacauuguugagaccucuucgucagacaacggaacuugcuauccaggcgauuuuaucgacuacgaagaacucagggagcagcugagcaguguguccucuuucgaacgguuugagauuuucccgaagacaagcuccuggcccaaucacgauucaaacaagggugucaccgccgcuuguccucaugcaggggccaaaaguuuuuauaagaaucugaucuggcucgugaaaaagggaaacagcuacccaaaauuaucuaaguccuauauaaaugacaagggcaaagaaguacugguucuuuggggcauccaccaccccucaacgagcgcugaucaacagaguuuguaccagaacgccgacgcguacguguucgucgggacuucucgcuauuccaagaaauuuaagccugagauugcaauccgaccaaaagugcgugagcaggaaggaagaaugaauuacuauuggacccugguggagcccggugauaagauuacauucgaagccacuggcaaccuagucguuccuagguacgcuuuugccauggagcggaacgcagggagcggaaucauaauuucggacaccccagugcaugauugcaauacaaccugucaaacgccgaaaggcgcuaucaacacuucucuccccuuccagaauauucacccuaucacaaucgguaagugcccaaaguauguaaaauccaccaagcugcgccuugccacugggcugagaaacauucccucaauacagaguaggggauuguuuggcgcgaucgccggcuucauugaagggggauggacagguaugguggacggcugguacggguaucaucaccagaaugagcaaggaagcggcuacgcagcugaccucaaauccacccagaacgccaucgaugagauaacgaauaaggucaacucugugauugaaaagaugaauacccaguuuacagcuguugguaaggaguucaaccaccuggaaaagcggaucgagaauuuaaacaaaaagguggacgauggguuccuggacaucuggacuuacaaugccgaacuccuuguccuguuggagaacgagcgcacccuagauuaucaugacagcaaugugaaaaaccuguacgaaaagguacgaucacagcucaaaaacaaugcaaaggagauuggcaacggauguuuugaguucuaucacaagugcgauaauacauguauggagaguguuaaaaacggcacuuacgacuauccuaaguacuccgaagaggccaaacugaauagagaggaaaucgauggggugaaacuugagagcaccaggauuuaucaaauacuggcuaucuacucuacagucgcgucaaguuuggugcucgucgugagccugggagcaauuuccuuuuggaugugcucuaacgguucguuacagugccggaucuguaucuga

SEQ ID NO: 135586 - RNA, 1701 nt, Artificial Sequence
  derived and/or modified CDS sequence (opt3) from hemagglutinin__InfluenzaA__AEO01456
augaaggccauccugauugugcuccuuuacaccuucgcuacagcaaacgccgacacucugugcauaggcuaucacgcgaauaacagcacggauaccgucgacacauuguuagagaaaaauguuacugugacccauuccguaaaccugcuagaagauaagcacaaugggaaacucuguaagcugagaggaguggcuccccuucaucuggguaaaugcaacaucgccggcuggauuuuggggaauccugagugugaaucucucucaacagcaaguagcugguccuacaucgucgagaccucuucgucagacaacggaacuugcuauccaggcgauuuuauugacuacgaagaacugagggagcagcugagcaguguguccucuuucgaacgguuugagaucuucccgaagacaagcuccuggcccaaucacgauucaaacaaggguguuaccgccgcuuguccucaugcaggggccaaaaguuuuuauaagaaucucauaugguuagugaaaaagggaaacagcuacccaaaacugucuaaguccuauaucaaugacaagggcaaagaaguccuuguguuguggggcauucaccaccccucaacgagcgcugaucaacagagucuguaccagaacgccgacgcguacguauucguugggacuucucgcuauuccaagaaauuuaagccugagaucgcaauucgaccaaaagugcgugaucaggagggaagaaugaauuacuauuggacccuagucgaacccggugacaagaucacauucgaggccacuggcaaccucguggugccuagguacgcuuuugccauggaucggaacgcagggagcggaauaauuaucucggacgcuccaguccaugacugcaauaccacaugucaaaccccgaaaggcgccauuaacacgucucugcccuuccagaauauccacccuaucacuauugguaagugcccaaaguauguuaaauccacaaaacuucgccuggcgaccggguugagaaacgugcccucaauacagaguaggggacucuuuggcgccaucgcaggcuucauugaagggggauggacugguaugguagauggcugguacggguaucaucaccagaaugagcaaggaagcggcuacgcugccgaccugaaauccacacagaacgcuaucgaugaaauaaccaauaaggugaacucugucauugagaaaaugaauacgcaguuuaccgccguggguaaggaguucaaccacuuagaaaagcggaucgagaaucugaacaaaaagguugacgauggguuccucgacaucuggacauacaaugcagaacuucugguguugcuagagaacgaacgcacucuggauuaucaugacagcaaugucaaaaaccucuacgagaaggugcgaucacagcugaaaaacaaugccaaggagauuggcaacggauguuuugaguucuaucacaagugcgauaauaccuguauggagaguguaaagaacggcacauacgacuauccuaaguacuccgaagaggcuaaacuuaauagagaagagaucgaugggguuaagcuggagagcacuaggauuuaucaaauauuggcgaucuacucuaccguggcaucaagucucguccugguggucagcuuaggagccauuuccuuuuggaugugcucuaacgguucgcugcagugccggaucuguaucuga

SEQ ID NO: 135587 - RNA, 1701 nt, Artificial Sequence; identical to SEQ ID NO: 135486
  derived and/or modified CDS sequence (opt3) from hemagglutinin__InfluenzaA__AEO01457

SEQ ID NO: 135588 - RNA, 1701 nt, Artificial Sequence; identical to SEQ ID NO: 135482
  derived and/or modified CDS sequence (opt3) from hemagglutinin__InfluenzaA__AEO01458

SEQ ID NO: 135589 - RNA, 1701 nt, Artificial Sequence; identical to SEQ ID NO: 135482
  derived and/or modified CDS sequence (opt3) from hemagglutinin__InfluenzaA__AEO01459

SEQ ID NO: 135590 - RNA, 1701 nt, Artificial Sequence; identical to SEQ ID NO: 132137
  derived and/or modified CDS sequence (opt3) from hemagglutinin__InfluenzaA__AEO01461

SEQ ID NO: 135591 - RNA, 1701 nt, Artificial Sequence; identical to SEQ ID NO: 131818
  derived and/or modified CDS sequence (opt3) from hemagglutinin__InfluenzaA__AEO01462

SEQ ID NO: 135592 - RNA, 1701 nt, Artificial Sequence; identical to SEQ ID NO: 131070
  derived and/or modified CDS sequence (opt3) from hemagglutinin__InfluenzaA__AEO01463

SEQ ID NO: 135593 - RNA, 1701 nt, Artificial Sequence
  derived and/or modified CDS sequence (opt3) from hemagglutinin__InfluenzaA__AEO01464
augaaggccauccuggugguccuccuuuacaccuucgcuacagcaaacgccgacacucugugcauuggcuaucacgcgaauaacagcacggauaccguugacacauuguuagagaaaaaugugacuguaacccauuccgugaaccugcuagaagauaagcacaaugggaaacucuguaagcugagaggagucgcuccccuucaucuggguaaaugcaacauagccggcuggaucuuggggaauccugagugugaaucucucucaacagcaaguagcugguccuacauuguggagaccucuucgucagacaacggaacuugcuauccaggcgauuuuaucgacuacgaagaacugagggagcagcugagcaguguuuccucuuucgaacgguuugagauuuucccgaagacaagcuccuggcccaaucacgauucaaacaagggugugaccgccgcuuguccucaugcaggggccaaaaguuuuuauaagaaucucaucugguuagucaaaaagggaaacagcuacccaaaacugucuaaguccuauauaaaugacaagggcaaagaagugcuuguauuguggggcauccaccaccccucaacgagcgcugaucaacagagucuguaccagaacgccgacgcguacguuuucguggggacuucucgcuauuccaagaaauuuaagccugagauugcaauccgaccaaaaguccgugaucaggagggaagaaugaauuacuauuggacccuaguggaacccggugacaagauuacauucgaggccacuggcaaccucguggucccuagguacgcuuuugccauggaucggaacgcagggagcggaaucauaauuucggacaccucuguucaugacugcaauacaaccugucaaacgccaaaaggcgcuaucaacacuucccugccguuccagaauauucaccccaucacaaucgguaagugcccuaaguaugugaaaucaaccaaacuucgccuggccacuggguugagaaacguaccaaguauucagagcaggggacucuuuggcgcgauagccggcuucaucgaagggggauggacagguaugguggauggcugguacggguaucaucaccagaaugagcaaggauccggcuacgcagcugaccugaagucuacccagaacgccauugaugaaaucacgaauaaggucaacagcgugauagagaaaaugaauacccaguuuacagcuguugguaaggaguucaaccacuuagaaaagcggauugagaaucugaacaaaaagguggacgauggguuccucgacaucuggacuuacaaugccgaacuucuggucuugcuagagaacgaacgcacccuggauuaucaugacucaaaugugaaaaaccucuacgagaagguacgaagucagcugaaaaacaaugcaaaggagaucggcaacggauguuuugaguucuaucacaagugcgauaauacauguauggaguccguuaaaaacggcacuuacgacuaucccaaguacagcgaagaggccaaacuuaauagagaagagauugauggggugaagcuggagucuaccaggaucuaucaaauuuuggcuauauacucaacagucgcgaguagccucgugcuggucguguccuuaggagcaaucucuuuuuggaugugcucgaacgguagccugcagugccggauuuguaucuga

SEQ ID NO: 135594 - RNA, 1701 nt, Artificial Sequence; identical to SEQ ID NO: 135573
  derived and/or modified CDS sequence (opt3) from hemagglutinin__InfluenzaA__AEO01465

SEQ ID NO: 135595 - RNA, 1701 nt, Artificial Sequence; identical to SEQ ID NO: 132589
  derived and/or modified CDS sequence (opt3) from hemagglutinin__InfluenzaA__AEO01466

SEQ ID NO: 135596 - RNA, 1701 nt, Artificial Sequence; identical to SEQ ID NO: 131070
  derived and/or modified CDS sequence (opt3) from hemagglutinin__InfluenzaA__AEO01467

SEQ ID NO: 135597 - RNA, 1701 nt, Artificial Sequence; identical to SEQ ID NO: 131881
  derived and/or modified CDS sequence (opt3) from hemagglutinin__InfluenzaA__AEO01468

SEQ ID NO: 135598 - RNA, 1701 nt, Artificial Sequence; identical to SEQ ID NO: 130717
  derived and/or modified CDS sequence (opt3) from hemagglutinin__InfluenzaA__AEO01469

SEQ ID NO: 135599 - RNA, 1701 nt, Artificial Sequence
  derived and/or modified CDS sequence (opt3) from hemagglutinin__InfluenzaA__AEO01470
augaaggccauccuggugguccuccuuuacaccuucgcuacagcaaacgccgacacucugugcauuggcuaucacgcgaauaacagcacggauaccguugacacaguguuggagaagaauguaacugugacccauuccgucaacuuacuggaagauaagcacaaugggaaacuauguaagcucagaggaguggcuccccugcaucuugguaaaugcaacauagccggcuggauccuggggaauccugagugugaaucuuugucaacagcaaguagcugguccuacauuguugagaccucuucgucagacaacggaacuugcuauccaggcgauuuuaucgacuacgaggagcucagggagcagcugagcaguguguccucuuucgaacgguuugagauuuucccgaagacaagcuccuggcccaaucacgauucaaacaagggugucaccgccgcuuguccucaugcaggggccaaaaguuuuuauaagaaucugaucuggcucgugaaaaagggaaacagcuacccaaaauuaucuaaguccuauauaaaugacaagggcaaagaaguacugguucuuuggggcauccaccaccccucaacgagcgcugaucaacagaguuuguaccagaacgccgacgcguacguguucgucgggacuucucgcuauuccaagaaauuuaagccugagauugcaauccgaccaaaagugcgugaucaggagggaagaaugaauuacuauuggacccugguggaacccggugacaagauuacauucgaggccacuggcaaccuagucaucccuagguacgcuuuugccauggaacggaacgcagggagcggaauaauuaucucggauaccccaguucaugacugcaauacaaccugucaaacgccgaaaggcgcuauuaacacuucucuccccuuccagaauauccacccuaucacaauugguaagugcccaaaguaugugaaauccaccaagcugcgccuugccacugggcugagaaacguacccucaauacagaguaggggauuguuuggcgcgaucgccggcuucauugaagggggauggacagguaugguggacggcugguacggguaucaucaccagaaugaacaaggaagcggcuacgcagcugaucucaaauccacccagaacgccaucgacgagauaacgaauaaggucaacucugugauugagaaaaugaauacccaguuuacagcuguugguaaggaguucaaccaccuggaaaagcggaucgaaaauuuaaacaaaaagguggaugacggguuccuggauaucuggacuuacaaugccgagcuccuuguccuguuggaaaacgagcgcacccuagacuaucaugauagcaaugugaaaaaccuguacgagaagguacgaucacagcucaaaaacaaugcaaaggaaauuggcaacggauguuuugaguucuaucacaagugcgacaauacauguauggaaaguguuaaaaacggcacuuacgauuauccuaaguacuccgaggaagccaaacugaauagagaggagaucgacggggugaaacuugaaagcaccaggauuuaucaaauacuggcuaucuacucuacagucgcgucaaguuuggugcucgucgugagccugggagcaauuuccuuuuggaugugcucuaacgguucguuacagugccggaucuguaucuga

SEQ ID NO: 135600 - RNA, 1701 nt, Artificial Sequence; identical to SEQ ID NO: 135426
  derived and/or modified CDS sequence (opt3) from hemagglutinin__InfluenzaA__AEO01471

SEQ ID NO: 135601 - RNA, 1701 nt, Artificial Sequence; identical to SEQ ID NO: 132344
  derived and/or modified CDS sequence (opt3) from hemagglutinin__InfluenzaA__AEO01472

SEQ ID NO: 135602 - RNA, 1701 nt, Artificial Sequence
  derived and/or modified CDS sequence (opt3) from hemagglutinin__InfluenzaA__AEO01473
augaaggccauccuggugguccuccuuuacaccuucgcuacagcaaacgccgacacucugugcauuggcuaucacgcgaauaacagcacggauaccguugacacaguguuggagaaaaauguaacugugacccauuccgucaacuuacuggaagauaagcacaaugggaaacuauguaagcucagaggaguggcuccccugcaucuugguaaaugcaacauagccggcuggauccuggggaauccugagugugaaucuuugucaacagcaaguagcugguccuacauuguugagaccucuucgucagacaacggaacuugcuauccaggcgauuuuaucgacuacgaggagcucagggagcagcugagcaguguguccucuuucgaacgguuugagauuuucccgaagacaagcuccuggcccaaucacgauucaaacaagggugucaccgccgcuuguccucaugcaggggccaaaaguuuuuauaagaaucugaucuggcucgugaaaaagggaaacagcuacccaaaauuaaauaagucuuauauaaacgacaagggcaaagaaguacugguucuuuggggcauccaccaccccuccacgucagcugaucaacagagcuuguaccagaaugccgacgcguacguguucgucgggacuucccgcuauucuaagaaauuuaagccugagauugcaauccgaccaaaagugcgugaucaggagggaagaaugaacuacuauuggacccugguggaacccggugacaagauuacauucgaggccacuggcaaccuagucguuccuagguacgcuuuugccauggaacggaaugcaggguccggaaucauaauuagcgauaccccagugcaugacugcaacacaaccugucaaacgccggagggcgcuaucaauacuucgcuccccuuccagaacauucacccuaucacaaucggugaaugcccaaaauauguaaagucuaccaagcugcgccuugccacugggcugagaaaugugcccuccauucagucaaggggauuguuuggcgcgauagccggcuucaucgaagggggauggacagguauggucgacggcugguacggguaucaucaccagaacgagcaaggaaguggcuacgcagcugaucucaaaagcacccagaaugccauugacaagaucacgaacaaagugaauaguguuauagaaaagaugaacacccaguuuacagcuguggguaaagaguucaaucaccuggaaaagcggauugagaacuuaaauaagaaagucgaugacggguuccuggauaucuggacuuacaacgccgaacuccuugugcuguuggagaaugagcgcacccuagacuaucaugauucuaacguaaagaaccuguacgaaaaaguucgaagccagcucaagaauaacgcaaaagagaucggcaauggauguuuugaguucuaucacaagugcgacaacacauguauggaaucagugaagaauggcacuuacgauuauccuaaauacagugaagaggccaagcugaacagagaggaaauugacggggucaaacuugaguccaccaggaucuaucaaauucuggcuauauacagcacaguggcgucuucauugguccucgugguuagucugggagcaaucagcuuuuggaugugcuccaaugguucuuuacagugccggauuuguaucuga

SEQ ID NO: 135603 - RNA, 1701 nt, Artificial Sequence
  derived and/or modified CDS sequence (opt3) from hemagglutinin__InfluenzaA__AEO01474
augaaggccauccuggugguccuccuuuacaccuucgcuacagcaaacgccgacacucugugcauuggcuaucacgcgaauaacagcacggauaccguugacacaguguuggagaaaaauguaacugugacccauuccgucaacuuacuggaagauaagcacaaugggaaacuauguaagcucagaggaguggcuccccugcaucuugguaaaugcaacauagccggcuggauccuggggaauccugagugugaaucuuugucaacagcaaguagcugguccuacauuguugagaccucuucgucagacaacggaacuugcuauccaggcgauuuuaucgacuacgaggagcucagggagcagcugagcaguguguccucuuucgaacgguuugagauuuucccgaagacaagcuccuggcccaaucacgauucagacaagggugucaccgccgcuuguccucaugcaggggccaaaaguuuuuauaagaaccugaucuggcucgugaaaaagggaaauagcuacccaaaauuaucuaaguccuauauaaacgauaagggcaaagaaguacugguucuuuggggcauccaccaccccucaacgagcgcugaccaacagaguuuguaccagaaugccgaugcguacguguucgucgggacuucucgcuauuccaagaaauuuaagccugagauugcaauccgaccaaaagugcgugaccaggagggaagaaugaacuacuauuggacccugguggaacccggugauaagauuacauucgaggccacuggcaaucuagucguuccuagguacgcuuuugccauggaacggaacgcagggagcggaaucauaauuucggacaccccagugcaugacugcaacacaaccugucaaacgccgaaaggcgcuaucaauacuucucuccccuuccagaacauucacccuaucacaaucgguaagugcccaaaguauguaaaauccaccaagcugcgccuugccacugggcugagaaaugugcccucaauucagaguaggggauuguuuggcgcgauagccggcuucaucgaagggggauggacagguauggucgauggcugguacggguaucaucaccagaacgaacaaggaagcggcuacgcagcugaccucaaauccacccagaaugccauugauaagaucacgaacaaaguuaauucugugauagagaagaugaacacccaguuuacagcuguggguaaggaguucaaucaccuggaaaaacggauugagaacuuaaauaagaaagucgacgauggguuccuggacaucuggacuuacaacgccgaacuccuugugcuguuggagaaugaacgcacccuagauuaucaugacagcaacguaaagaaucuguacgagaaaguucgaucacagcucaagaacaacgcaaaggagaucggcaauggauguuuugaguucuaucacaaaugcgauaacacauguauggaaagugugaagaauggcacuuacgacuauccuaaauacuccgaagaggccaagcugaacagagaagagauugauggggucaaacuugagagcaccaggaucuaucaaauucuggcuauauacucuacaguggcgucaaguuugguccucgugguuagccugggagcaaucuccuuuuggaugugcucuaaugguucguuacagugccggauuuguaucuga

SEQ ID NO: 135604 - RNA, 1701 nt, Artificial Sequence
  derived and/or modified CDS sequence (opt3) from hemagglutinin__InfluenzaA__AEO01475
augaaggccauccuggugguccuccuuuacaccuucgcuacagcaaacgccgacacucugugcauuggcuaucacgcgaauaacagcacggauaccguugacacaguguuggagaaaaauguaacugugacccauuccgucaacuuacuggaagauaagcacaaugggaaacuauguaagcucagaggaguggcuccccugcaucuugguaaaugcaacauagccggcuggauccuggggaauccugagugugaaucuuugucaacagcaaguagcugguccuacauuguugagaccucuaacucggacaauggaacuugcuauccaggcgauuuuaucgacuacgaggagcucagggagcagcugucaagcgugaguuccuucgaacgguuugagauuuucccgaagacaucuagcuggcccaaccacgauuccaauaagggugucaccgccgcuuguccucaugcaggggccaaaucauuuuauaagaaccugaucuggcucgugaaaaagggaaauaguuacccaaaauuaagcaagucuuauauaaacgacaagggcaaagaaguacugguucuuuggggcauccaccaccccuccacgucagcugaucaacagagcuuguaccagaaugccgacgcguacguguucgucgggaccagucgcuauucuaagaaauuuaagccugagauugcaauccgaccaaaagugcgugaucaggagggaagaaugaacuacuauuggacucugguggaacccggugacaagauuacauucgaggccacuggcaaccuagucguuccuagguacgcuuuugccauggaacggaaugcaggguccggaaucauaauuagcgauaccccagugcaugacugcaacacaaccugucaaacgccgaaaggcgcuaucaauacuucgcuccccuuccagaacauucacccuaucacaaucgguaagugcccaaaguauguaaaaucuaccaagcugcgccuugccacugggcugagaaaugugcccuccauucagucaaggggauuguuuggcgcgauagccggcuucaucgaagggggauggacagguauggucgacggcugguacggguaucaucaccagaacgaacaaggaaguggcuacgcagcugaucucaaaagcacccagcacgccauugacgagaucacgaauaaggugaacuccguuauagagaaaaugaauacccaguuuacagcuguggguaaggaguucaaccaucuggaaaagcggauugaaaauuuaaacaaaaaggucgaugacggguuccuggauaucuggacuuacaaugccgagcuccuugugcuguuggaaaacgagcgcacccuagacuaucacgauucuaauguaaagaaccuguacgagaagguucgaagccagcucaaaaacaaugcaaaggaaaucggcaacggauguuuugaguucuaucauaagugcgacaauacauguauggaaucagugaaaaacggcacuuacgauuauccuaaguacagugaggaagccaaacugaauagagaggagauugacggggucaaacuugaauccaccaggaucuaucaaauucuggcuauauacagcacaguggcgucuucauugguccucgugguuagucugggagcaaucagcuuuuggaugugcuccaacgguucuuuacagugccggauuuguaucuga

SEQ ID NO: 135605 - RNA, 1701 nt, Artificial Sequence
  derived and/or modified CDS sequence (opt3) from hemagglutinin__InfluenzaA__AEO01476
augaaggccauccuggugguccuccuuuacaccuucagcacagcuaacgcagacacucugugcauuggcuaucacgccaauaacuccacggauaccguugacacaguguuggagaaaaauguaacugugacccauucugucaacuuacuggaagauaagcacaaugggaaacuauguaagcucagaggaguggcgccccugcaucuugguaaaugcaacauagcuggcuggauccuggggaauccugagugugaaucauugaguacagccagcuccuggucuuacauuguugagaccucgucaagcgacaacggaacuugcuauccaggcgauuuuaucgacuacgaggagcucagggagcagcugaguuccgugucuagcuucgaacgguuugagauuuucccgaagacauccucauggcccaaucacgauaguaacaagggugucaccgcagccuguccucaugcuggggcaaagagcuuuuauaagaaucugaucuggcucgugaaaaagggaaacucuuacccaaaauuauccaagucauauauaaaugacaagggcaaagaaguacugguucuuuggggcauccaccaccccagcacgagugccgaucaacagucuuuguaccagaacgcugacgccuacguguucgucgggacuucccgcuauagcaagaaauuuaagccugagauugcgauccgaccaaaagugcgugaucaggagggaagaaugaauuacuauuggacccugguggaacccggugacaagauuacauucgaggcaacuggcaaccuagucguuccuagguacgccuuugcuauggaacggaacgccgggucgggaaucauaauuucugauaccccagugcaugacugcaauacaaccugucaaacgccgaaaggcgcaaucaacacuucccuccccuuccagaauauucacccuaucacaaucgguaagugcccaaaguauguaaaaucaaccaagcugcgccuugcuacugggcugagaaacgugcccaguauucagagcaggggauuguuuggcgccauagcgggcuucaucgaagggggauggacagguauggucgacggcugguacggguaucaucaccagaaugaacaaggauccggcuacgccgcagaucucaaaucuacccagaacgcuauugacgagaucacgaauaaggugaacagcguuauagagaaaaugaauacccaguuuacagccguggguaaggaguucaaccaccuggaaaagcggauugaaaauuuaaacaaaaaggucgaugacggguuccuggauaucuggacuuacaaugcugagcuccuugugcuguuggaaaacgagcgcacccuagacuaucaugauucaaauguuaaaaaccuguacgagaagguacgaagucagcucaaaaacaaugccaaggaaaucggcaacggauguuuugaguucuaucacaagugcgacaauacauguauggaauccgugaaaaacggcacuuacgauuauccuaaguacagcgaggaagcaaaacugaauagagaggagauugacggggucaaacuugaaucuaccaggaucuaucaaauucuggccauauacucaacaguggcuaguagcuugguccucgugguuucccugggagcgaucucuuuuuggaugugcucgaacgguagcuuacagugccggauuuguaucuga

SEQ ID NO: 135606 - RNA, 1701 nt, Artificial Sequence
  derived and/or modified CDS sequence (opt3) from hemagglutinin__InfluenzaA__AEO01477
augaaggccauccuggugguccuccuuuacaccuucgcuacagcaaacgccgacacucugugcauuggcuaucacgcgaauaacagcacggauaccguugacacaguguuggagaaaaauguaacugugacccauuccgucaacuuacuggaagauaagcacaaugggaaacuauguaagcucagaggaguggcuccccugcaucuugguaaaugcaacauagccggcuggauccuggggaauccugagugugaaucuuugucaacagcaaguagcugguccuacauuguugagaccucuucgucagacaacggaacuugcuauccaggcgauuuuaucgacuacgaagaacucagggagcagcugagcaguguguccucuuucgaacgguuugagauuuucccgaagacaagcuccuggcccaaucacgauucaaacaagggugucaccgccgcuuguccucaugcaggggccaaaaguuuuuauaagaaucugaucuggcucgugaaaaagggaaacagcuacccaaaauuaucuaaguccuauauaaaugacaagggcaaagaaguacugguucuuuggggcauccaccaccccucaacgagcgcugaucaacagaguuuguaccagaacgccgacgcguacgcauucguggggacuucucgcuauuccaagaaauuuaagccugagauugccauccgaccaaaaguccgugagcaggaaggaagaaugaauuacuauuggacccugguggagcccggugauaagauuacauucgaagcuacuggcaaccuaguggucccuagguacgccuuugcaauggagcggaacgcugggagcggaaucauaauuucggacaccccaguucaugauugcaauacaaccugucaaacgccgaaaggcgccaucaacacuucucuccccuuccagaauauucacccuaucacaaucgguaagugcccaaaguaugugaaauccaccaagcugcgccuugcgacugggcugagaaacguacccucaauucagaguaggggauuguuuggcgccauagcaggcuucaucgaagggggauggacagguaugguggacggcugguacggguaucaucaccagaaugagcaaggaagcggcuacgcugccgaccucaaauccacccagaacgcuauugaugagaucacgaauaaggucaacucugugauagaaaagaugaauacccaguuuacagccguugguaaggaguucaaccaccuggaaaagcggauugagaauuuaaacaaaaagguggacgauggguuccuggacaucuggacuuacaaugcagaacuccuuguccuguuggagaacgagcgcacccuagauuaucaugacagcaaugugaaaaaccuguacgaaaagguacgaucacagcucaaaaacaaugccaaggagaucggcaacggauguuuugaguucuaucacaagugcgauaauacauguauggagaguguuaaaaacggcacuuacgacuauccuaaguacuccgaagaggcuaaacugaauagagaggaaauugauggggugaaacuugagagcaccaggaucuaucaaauucuggcgauauacucuacagucgcaucaaguuuggugcucgucgugagccugggagccaucuccuuuuggaugugcucuaacgguucguuacagugccggauuuguaucuga

SEQ ID NO: 135607 - RNA, 1701 nt, Artificial Sequence; identical to SEQ ID NO: 132045
  derived and/or modified CDS sequence (opt3) from hemagglutinin__InfluenzaA__AEO01478

SEQ ID NO: 135608 - RNA, 1701 nt, Artificial Sequence; identical to SEQ ID NO: 135435
  derived and/or modified CDS sequence (opt3) from hemagglutinin__InfluenzaA__AEO01479

SEQ ID NO: 135609 - RNA, 1701 nt, Artificial Sequence; identical to SEQ ID NO: 135482
  derived and/or modified CDS sequence (opt3) from hemagglutinin__InfluenzaA__AEO01480

SEQ ID NO: 135610 - RNA, 1701 nt, Artificial Sequence
  derived and/or modified CDS sequence (opt3) from hemagglutinin__InfluenzaA__AEO01482
augaaggccauccuggugguccuccuuuacaccuucgcuacagcaaacgccgacacucugugcauuggcuaucacgcgaauaacagcacggauaccguugacacaguguuggagaaaaauguaacugugacccauuccgucaacuuacuggaagauaagcacaaugggaaacuauguaagcucagaggaguggcuccccugcaucuugguaaaugcaacauagccggcuggauccuggggaauccugagugugaaucuuugucaacagcaaguagcugguccuacauuguugagaccucuucgucagacaacggaacuugcuauccaggcgauuuuaucgacuacgaggagcucagggagcagcugagcaguguguccucuuucgaacgguuugagauuuucccgaagacaagcuccuggcccaaucacgauucaaacaagggugucaccgccgcuuguccucaugcaggggccaaaaguuuuuauaagaaucugaucuggcucgugaaaaagggaaacagcuacccaaaauuaucuaaguccuauauaaaugacaagggcaaagaaguacugguucuuuggggcauccaccaccccucaacgagcgcugaucaacagaguuuguaccagaacgccgacgcguacguguucgucgggacuucucgcuauuccaagaaauuuaagccugagauugcaauccgaccaaaagugcgugaucaggagggaagaaugaauuacuauuggacccugguggaacccggugacaagauuacauucgaggccacuggcaaccuagucguuccuagguacgcuuuugccauggaacggaacgcagggagcggaaucauaauuucggauaccccagugcaugacugcaauacaaccugucaaacgccgaaaggcgcuaucaacacuucucuccccuuccagaauauucacccuaucacaaucgguaagugcccaaaguauguaaaauccaccaagcugcgccuugccacugggcugagaaacgugcccucaauucagaguaggggauuguuuggcgcgauagccggcuucaucgaagggggauggacagguauggucgacggcugguacggguaucaucaccagaaugaacaaggaagcggcuacgcagcugaucucaaauccacccagaacgccauugacaagaucacgaauaaagugaacucuguuauagagaagaugaauacccaguuuacagcuguggguaaggaguucaaccaccuggaaaaacggauugagaauuuaaacaagaaagucgaugacggguuccuggauaucuggacuuacaaugccgaacuccuugugcuguuggagaacgaacgcacccuagacuaucaugauagcaauguaaagaaccuguacgagaaaguucgaucacagcucaagaacaaugcaaaggagaucggcaacggauguuuugaguucuaucacaaaugcaauaacacauguauggaaagugugaagaauggcacuuacgacuauccuaaauacuccgaagaggccaagcugaacagagaagagauugauggggucaaacuugagagcaccaggaucuaucaaauucuggcuauauacucuacaguggcgucaaguuugguccucgugguuagccugggagcaaucuccuuuuggaugugcucuaaugguucguuacagugccggauuuguaucuga

SEQ ID NO: 135611 - RNA, 1701 nt, Artificial Sequence
  derived and/or modified CDS sequence (opt3) from hemagglutinin__InfluenzaA__AEO01483
augaaggccauccuggugguccuccuuuacaccuucgcuacagcaaacgccgacacucugugcauuggcuaucacgcgaauaacagcacggauaccguugacacaguguuggagaaaaauguaacugugacccauuccgucaacuuacuggaagauaagcacaaugggaaacuauguaagcucagaggaguggcuccccugcaucuugguaaaugcaacauagccggcuggauccuggggaauccugagugugaaucuuugucaacagcaaguagcugguccuacauuguugagaccucuaacucggacaauggaacuugcuauccaggcgauuuuaucgacuacgaggagcucagggagcagcugucaagcgugaguuccuucgaacgguuugagauuuucccgaagacaucuagcuggcccaaccacgauuccaauaagggugucaccgccgcuuguccucaugcaggggccaaaucauuuuauaagaaccugaucuggcucgugaaaaagggaaauaguuacccaaaauuaagcaagucuuauauaaacgacaagggcaaagaaguacugguucuuuggggcauccaccaccccuccacgucagcugaucaacagagcuuguaccagaaugccgacgcguacguguucgucgggacuucccgcuauucuaagaaauuuaagccugagauugcaauccgaccaaaagugcgugaucaggagggaagaaugaacuacuauuggacccugguggaacccggugacaagauuacauucgaggccacuggcaaccuagucguuccuagguacgcuuuugccauggaacggaaugcaggguccggaaucauaauuagcgauaccccagugcaugacugcaacacaaccugucaaacgccgaaaggcgcuaucaauacuucgcuccccuuccagaacauucacccuaucacaaucgguaagugcccaaaguauguaaaaucuaccaagcugcgccuugccacugggcugagaaaugugcccuccauucagucaaggggauuguuuggcgcgauagccggcuucaucgaagggggauggacagguauggucgacggcugguacggguaucaucaccagaacgaacaaggaaguggcuacgcagcugaucucaaaagcacccagaaugccauugacaagaucacgaacaaagugaauaguguuauagagaagaugaacacccaguuuacagcuguggguaaggaguucaaucaccuggaaaaacggauugagaacuuaaauaagaaagucgaugacggguuccuggauaucuggacuuacaacgccgaacuccuugugcuguuggagaaugaacgcacccuagacuaucaugauucuaacguaaagaaccuguacgagaaaguucgaagccagcucaagaauaacgcaaaggagaucggcaauggauguuuugaguucuaucacaaaugcgacaacacauguauggaaucagugaagaauggcacuuacgauuauccuaaauacagugaagaggccaagcugaacagagaagagauugacggggucaaacuugaguccaccaggaucuaucaaauucuggcuauauacagcacagcggcaucuucauuggugcucgucgugagucugggagccaucagcuuuuggaugugcuccaaugguucuuuacagugccggauuuguaucuga

SEQ ID NO: 135612 - RNA, 1701 nt, Artificial Sequence
  derived and/or modified CDS sequence (opt3) from hemagglutinin__InfluenzaA__AEO01484
augaaggccauccuggugguccuccuuuacaccuucgcuacagcaaacgccgacacucugugcauuggcuaucacgcgaauaacagcacggauaccguugacacaguguuggagaaaaauguaacugugacccauuccgucaacuuacuggaagauaagcacaaugggaaacuauguaagcucaaaggaguggcuccccugcaucuugguaagugcgacauagccggcuggauccuggggaacccugagugugaaucuuugucaacagcaaguagcugguccuacauuguugagaccucuucgucagauaauggaacuugcuauccaggcgacuuuaucgauuacgaggagcucagagagcagcugagcaguguguccucuuucgaaagguuugagauuuucccgaagacaagcuccuggcccaaccacgacucaaauaaaggugucaccgccgcuuguccucaugcaggggccaagaguuuuuauaaaaaccugaucuggcucgugaagaaaggaaauagcuacccaaaguuaucuaaguccuauauaaacgauaaaggcaaggaaguacugguucuuuggggcauccaccaccccucaacgagcgcugaccaacagaguuuguaccagaaugccgaugcguacguguucgucgggacuucucgguauuccaaaaaguuuaaaccugagauugcaauccgcccaaaggugcgagaccaggagggacguaugaacuacuauuggacccugguggaacccggugauaaaauuacauucgaggccacuggcaaucuagucguuccuagauacgcuuuugccauggaaaggaacgcagggagcggaaucauaauuucggacaccccagugcaugacugcaacacaaccugucaaacgccgaagggcgcuaucaauacuucucuccccuuccagaacauucacccuaucacaaucgguaagugcccaaaauauguaaaguccaccaaacugcggcuugccacugggcugcgcaaugugcccucaauucagaguagaggauuguuuggcgcgauagccggcuucaucgaagggggauggacagguauggucgauggcugguacggguaucaucaccagaacgaacaaggaagcggcuacgcagcugaccucaaguccacccagcacgccauugaugagaucacgaauaaagugaacucuguuauagagaagaugaauacccaguuuacagcuguggguaaggaauuuaaccaucuggagaaaaggauugaaaauuuaaacaagaaagucgacgauggguuccuggacaucuggacuuacaaugccgagcuccuugugcuguuggaaaacgagcggacccuagauuaucacgacagcaauguaaagaaccuguacgagaaaguucgcucacagcucaagaauaacgcaaaggaaaucggcaacggauguuucgaguucuaucauaaaugcgauaauacauguauggaaagugugaagaacggcacuuacgacuauccuaaauacuccgaggaagccaagcugaaucgagaggagauugauggggucaaacuugaaagcaccagaaucuaucaaauucuggcuauauacucuacaguggcgucaaguuugguccucgugguuagccugggagcaaucuccuuuuggaugugcucuaacgguucguuacagugcaggauuuguaucuga

SEQ ID NO: 135613 - RNA, 1701 nt, Artificial Sequence
  derived and/or modified CDS sequence (opt3) from hemagglutinin__InfluenzaA__AEO01485
augaaggccauccuggugguccuccuuuacaccuucgcuacagcaaacgccgacacucugugcauuggcuaucacgcgaauaacagcacggauaccguugacacaguguuggagaaaaauguaacugugacccauuccgucaacuuacuggaagauaagcacaaugggaaacuauguaagcucagaggaguggcuccccugcaucuugguaaaugcaacauagccggcuggauccuggggaauccugagugugaaucuuugucaacagcaaguagcugguccuacauuguugagaccucuucgucagacaacggaacuugcuauccaggcgauuuuaucgacuacgaggagcucagggagcagcugagcaguguguccucuuucgaacgguuugagauuuucccgaagacaagcuccuggcccaaucacgauucaaacaagggugucaccgccgcuuguccucaugcaggggccaaaaguuuuuauaagaaucugaucuggcucgugaaaaagggaaacagcuacccaaaauuaucuaaguccuauauaaaugacaagggcaaagaaguacugguucuuuggggcauccaccaccccucaacgagcgcugaucaacagaguuuguaccagaacgccgacgcguacguguucgucgggacuucucgcuauuccaagaaauuuaagccugagauuaccauccgaccaaaagugcgugaucaggagggaagaaugaauuacuauuggacacugguggaacccggugacaagauuacuuucgaggcaaccggcaaccuagucguuccuagguacgccuuugcuauggaacggaacgccgggagcggaaucauaauuucggauacaccagugcaugacugcaauaccacgugucaaacuccgaaaggcgcaaucaacacaucucuccccuuccagaauauucacccuaucaccaucgguaagugcccaaaguauguaaaauccacuaagcugcgccuugcuacagggcugagaaacgugcccucaauucagaguaggggauuguuuggcgccauagcgggcuucaucgaagggggauggaccgguauggucgacggcugguacggguaucaucaccagaaugaacaaggaagcggcuacgccgcagaucucaaauccacgcagaacgcuauugacgagaucaccaauaaggugaacucuguuauagagaaaaugaauacacaguuuacugccguggguaaggaguucaaccaccuggaaaagcggauugaaaauuuaaacaaaaaggucgaugacggguuccuggauaucuggaccuacaaugcugagcuccuugugcuguuggaaaacgagcgcacacuagacuaucaugauagcaauguaaagaaccuguacgagaagguucgaucacagcucaaaaacaaugccaaggaaaucggcaacggauguuuugaguucuaucacaagugcgacaauacuuguauggaaagugugaaaaacggcaccuacgauuauccuaaguacuccgaggaagcaaaacugaauagagaggagauugacggggucaaacuugaaagcacaaggaucuaucaaauucuggccauauacucuaccguggcuucaaguuugguccucgugguuagccugggagcgaucuccuuuuggaugugcucuaacgguucguuacagugccggauuuguaucuga

SEQ ID NO: 135614 - RNA, 1701 nt, Artificial Sequence
  derived and/or modified CDS sequence (opt3) from hemagglutinin__InfluenzaA__AEO01487
augaaggccauccuggugguccuccuuuacaccuucgcuacagcaaacgccgacacucugugcauuggcuaucacgcgaauaacagcacggauaccguugacacaguguuggagaaaaauguaacugugacccauuccgucaacuuacuggaagauaagcacaaugggaaacuauguaagcucagaggaguggcuccccugcaucuugguaaaugcaacauagccggcuggauccuggggaauccugagugugaaucuuugucaacagcaaguagcugguccuacauuguugagaccucuucgucagacaacggaacuugcuauccaggcgauuuuaucgacuacgaggagcucagggagcagcugagcaguguguccucuuucgaacgguuugagauuuucccgaagacaagcuccuggcccaaucacgauucaaacaagggugucaccgccgcuuguccucaugcaggggccaaaaguuuuuauaagaaucugaucuggcucgugaaaaagggaaacagcuacccaaaauuaucuaaguccuauauaaaugacaagggcaaagaaguacugguucuuuggggcauccaccaccccucaacgagcgcugaucaacagaguuuguaccagaacgccgacgcguacguguucgucgggacuucucgcuauuccaagaaauuuaagccugagauugcaauccgaccaaaagugcgugaucaggagggaagaaugaauuacuauuggacccugguggaacccggugacaagauuacauucgaggccacuggcaaccuagucguuccuagguacgcuuuugccauggaacggaacgcagggagcggaaucauaauuucggauaccccagugcaugacugcaauacaaccugucaaacgccgaaaggcgcuaucaacacuucucuccccuuccagaauauucacccuaucacaaucgguaagugcccaaaguauguaaaauccaccaagcugcgccuugccacugggcugagaaacgugcccucaauucagaguaggggauuguuuggcgcgauagccggcuucaucgaagggggauggacagguauggucgacggcugguacggguaucaucaccagaaugaacaaggaagcggcuacgcagcugaucucaaauccacccagaacgccauugacgagaucacgaauaaggugaacucuguuauagagaaaaugaauacccaguuuacagcuguggguaaggaguucaaccaccuggaaaagcggauugaaaauuuaaacaaaaaggucgaugacggguuccuggauaucuggacuuacaaugccgagcuccuugugcuguuggaaaacgagcgcacccuagacuaucaugauagcaauguuaaaaaccuguacgagaagguacgaucacagcucaaaaacaaugcaaaggaaaucggcaacggauguuuugaguucuaucacaagugcgacaauacauguauggaaagugugaaaaacggcacuuacgauuauccuaaguacuccgaggaagccaaacugaauagagaggagauugacggggucacccuugaaagcacaaggaucuaucaaauucuggcuauauacucuaccguggcgucaaguuugguccucgugguuagccugggagcaaucuccuuuuggaugugcucuaacgguucguuacagugccggauuuguaucuga

SEQ ID NO: 135615 - RNA, 1701 nt, Artificial Sequence
  derived and/or modified CDS sequence (opt3) from hemagglutinin__InfluenzaA__AEO01488
augaaggccauccuggugguccuccuuuacaccuucgcuacagcaaacgccgacacucugugcauuggcuaucacgcgaauaacagcacggauaccguugacacaguguuggagaaaaauguaacugugacccauuccgucaacuuacuggaagauaagcacaaugggaaacuauguaagcucagaggaguggcuccccugcaucuugguaaaugcaacauagccggcuggauccuggggaauccugagugugaaucuuugucaacagcaaguagcugguccuacauuguugagaccucuucgucagacaacggaacuugcuauccaggcgauuuuaucgacuacgaggagcucagggagcagcugagcaguguguccucuuucgaacgguuugagauuuucccgaagacaagcuccuggcccaaucacgauucaaacaagggugucaccgccgcuuguccucaugcaggggccaaaaguuuuuauaagaaucugaucuggcucgugaaaaagggaaacagcuacccaaaauuaucuaaguccuauauaaaugacaagggcaaagaaguacugguucuuuggggcauccaccaccccucaacgagcgcugaucaacagaguuuguaccagaacgccgacgcguacguguucgucgggacuucucgcuauuccaagaaauuuaagccugagauugcaauccgaccaaaagugcgugaucaggagggaagaaugaauuacuauuggacccugguggaacccggugacaagauuacauucgaggccacuggcaaccuagucguuccuagguacgcuuuuaccauggaacggaacgccgggagcggaaucauaauuucggauacaccagugcaugacugcaauaccacgugucaaacuccgaaaggcgcaaucaacacaucucuccccuuccagaauauucacccuaucaccaucgguaagugcccaaaguauguaaaauccacuaagcugcgccuugcuacagggcugagaaacgugcccucaauucagaguaggggauuguuuggcgccauagcgggcuucaucgaagggggauggaccgguauggucgacggcugguacggguaucaucaccagaaugaacaaggaagcggcuacgccgcagaucucaaauccacgcagaacgcuauugacgguaucaccaauaaggugaacucuguuauagagaaaaugaauacacaguuuacugccguggggaaggaguucaaccaccuggaaaagcggauugagaauuuaaacaaaaaggucgaugacggcuuccuggauaucuggaccuacaaugcugaacuccuugugcuguuggagaacgaacgcacacuagacuaucaugauagcaauguaaagaaccuguacgagaagguucgaucacagcucaaaaacaaugccaaggagaucggaaacggcuguuuugaguucuaucacaagugcgacaauacuuguauggaaagugugaaaaacgggaccuacgauuauccuaaguacuccgaagaggcaaaacugaauagagaagagauugacggagucaaacuugagagcacaaggaucuaucaaauucuggccauauacucuaccguggcuucaaguuugguccucgugguuagccugggugcgaucuccuuuuggaugugcucuaacggcucguuacagugccggauuuguaucuga

SEQ ID NO: 135616 - RNA, 1701 nt, Artificial Sequence
  derived and/or modified CDS sequence (opt3) from hemagglutinin__InfluenzaA__AEO01489
augaaggccauccuggugguccuccuuuacaccuucgcuacagcaaacgccgacacucugugcauuggcuaucacgcgaauaacagcacggauaccguugacacaguguuggagaaaaauguaacugugacccauuccgucaacuuacuggaagauaagcacaaugggaaacuauguaagcucagaggaguggcuccccugcaucuugguaaaugcaacauagccggcuggauccuggggaauccugagugugaaucuuugucaacagcaaguagcugguccuacauuguugagaccucuucgucagacaacggaacuugcuauccaggcgauuuuaucgacuacgaggagcucagggagcagcugagcaguguguccucuuucgaacgguuugagauuuucccgaagacaagcuccuggcccaaucacgauucaaacaagggugucaccgccgcuuguccucaugcaggggccaaaaguuuuuauaagaaucugaucuggcucgugaaaaagggaaacagcuacccaaaauuaucuaaguccuauauaaaugacaagggcaaagaaguacugguucuuuggggcauccaccaccccucaacgagcgcugaucaacagaguuuguaccagaacgccgacgcguacguguucgucgggacuucucgcuauuccaagaaauuucgaccugagauugcaauccguccaaaggugagagaucaggagggaaggaugaauuacuauuggacccugguggaacccggugacaaaauuacauucgaggccacuggcaaccuagucguuccucgguacgcuuuugccauggaacgcaacgcagggagcggaaucauaauuucggauaccccagugcaugacugcaauacaaccugucaaacgccgaagggcgcuaucaacacuucucuccccuuccagaauauucacccuaucacaaucgguaaaugcccaaaguauguaaaguccaccaaacugagacuugccacugggcugaggaacgugcccucaauucagagucggggauuguuuggcgcgauagccggcuucaucgaagggggauggacagguauggucgacggcugguacggguaucaucaccagaaugaacaaggaagcggcuacgcagcugaucucaaguccacccagaacgccauugacgagaucacgaauaaagugaacucuguuauagagaagaugaauacccaguuuacagcuguggguaaagaguucaaccaccuggaaaagcgcauugaaaauuuaaacaagaaagucgaugacggguuccuggauaucuggacuuacaaugccgagcuccuugugcuguuggaaaacgagcgaacccuagacuaucaugauagcaauguaaagaaccuguacgagaaaguuagaucacagcucaagaacaaugcaaaagaaaucggcaacggauguuuugaguucuaucacaagugcgacaauacauguauggaaagugugaagaacggcacuuacgauuauccuaaauacuccgaggaagccaagcugaauagggaggagauugacggggucaaacuugaaagcacccggaucuaucaaauucuggcuauauacucuacaguggcgucaaguuugguccucgugguuagccugggagcaaucuccuuuuggaugugcucuaacgguucguuacagugccguauuuguaucuga

SEQ ID NO: 135617 - RNA, 1701 nt, Artificial Sequence
  derived and/or modified CDS sequence (opt3) from hemagglutinin__InfluenzaA__AEO01490
augaaggccauccuggugguccuccuuuacaccuucgcuacagcaaacgccgacacucugugcauuggcuaucacgcgaauaacagcacggauaccguugacacaguguuggagaaaaauguaacugugacccauuccgucaacuuacuggaagauaagcacaaugggaaacuauguaagcucagaggaguggcuccccugcaucuugguaaaugcaacauagccggcuggauccuggggaauccugagugugaaucuuugucaacagcaaguagcugguccuacauuguugagaccucuucgucagacaacggaacuugcuauccaggcgauuuuaucgacuacgaggagcucagggagcagcugagcaguguguccucuuucgaacgguuugagauuuucccgaagacaagcuccuggcccaaucacgauucaaacaagggugucaccgccgcuuguccucaugcaggggccaaaaguuuuuauaagaaucugaucuggcucgugaaaaagggaaacagcuacccaaaauuaucuaaguccuauauaaaugacaagggcaaagaaguacugguucuuuggggcauccaccaccccucaacgagcgcugaucaacagaguuuguaccagaacgccgacgcguacguguucgucgggacuucucgcuauuccaagaaauuuaagccugagauugcaauccgaccaaaagugcgugaucaggagggaagaaugaauuacuauuggacccugguggaacccggugacaagauuacauucgaggccacuggcaaccuagucguuccuagguacgcuuuugccauggaacggaacgcagggagcggaaucauaauuucggauaccccagugcaugacugcaauacaaccugucaaacgccgaaaggcgcuaucaacacuucucuccccuuccagaauauucacccuaucacaaucgguaagugcccaaaguauguaaaauccaccaagcugcgcauggccacugggcuuagaaacgugcccucaauucagaguaggggacuguuuggcgcgauagccggcuucaucgaagggggauggacagguauggucgacggcugguacggguaucaucaccagaaugaacaaggaagcggcuacgcagcugauuugaaauccacccagaacgccauugacgagaucacgaauaaggugaacucuguuauagagaaaaugaauacccaguuuacagcuguggguaaggaguucaaccaccucgaaaagcggauugaaaaucugaacaaaaaggucgaugacggguucuuagauaucuggacuuacaaugccgagcugcucgugcuucuggaaaacgagcgcaccuuggacuaucaugauagcaauguuaaaaaccuauacgagaagguacgaaaccagcugaaaaauaacgcaaaggaaaucggcaauggauguuuugaguucuaucacaagugcgacaacacauguauggaaucagugaaaaauggcacuuacgauuauccuaaguacagugaggaagccaaacucaacagagaggagauugacggggucaagcuggaauccaccaggaucuaucaaauucuugcuauauacagcacaguggcgucuucacuggucuuggugguuagucucggagcaaucagcuuuuggaugugcuccaaugguucucugcagugccggauuuguaucuga

SEQ ID NO: 135618 - RNA, 1701 nt, Artificial Sequence
  derived and/or modified CDS sequence (opt3) from hemagglutinin__InfluenzaA__AEO01491
augaaggccauccuggugguccuccuuuacaccuucgcuacagcaaacgccgacacucugugcauuggcuaucacgcgaauaacagcacggauaccguugacacaguguuggagaaaaauguaacugugacccauuccgucaacuuacuggaagauaaguacaaugggaaacuauguaagcucagaggaguggcuccccugcaccuugguaaaugcaacauagccggcuggauccuggggaauccugagugugaaucuuugucaacagcaaguagcugguccuauauuguugagaccucuucgucagacaacggaacuugcuacccaggcgauuuuaucgacuaugaggagcucagggagcagcugagcaguguguccucuuucgaacgguuugagauuuucccgaagacaagcuccuggcccaaucaugauucaaacaagggugucaccgccgcuuguccucacgcaggggccaaaaguuuuuacaagaaucugaucuggcucgugaaaaagggaaacagcuauccaaaauuaucuaaguccuacauaaaugacaagggcaaagaaguacugguucuuuggggcauccaucaccccucaacgagcgcugaucaacagaguuuguaccagaacgccgacgcguauguguucgucgggacuucucgcuacuccaagaaauuuaagccugagauugcaauccgaccaaaagugcgugaucaggagggaagaaugaauuaucacuggacccugguggaacccggugacaagauuacauucgaggccacuggcaaccuagucguuccuagguacgcuuuugccauggaacggaacgcagggagcggaaucauaauuucggauaccccagugcaugacugcaauacaaccugucaaacgccgaaaggcgcuaucaacacuucucuccccuuccagaauauucacccuaucacaaucgguaagugcccaaaguauguaaaauccaccaagcugcgccuugccacugggcugagaaacgugcccucaauucagaguaggggauuguuuggcgcgauagccggcuucaucgaagggggauggacagguauggucgacggcugguacggguaucaucaccagaaugaacaaggaagcggcuacgcagcugaucucaaauccacccagaacgccauugacgagaucacgaauaaggugaacucuguuauagagaaaaugaauacccaguuuacagcuguggguaaggaguucaaccaccuggaaaagcggauugaaaauuuaaacaaaaaggucgaugacggguuccuggauaucuggacuuacaaugccgagcuccuugugcuguuggaaaacgagcgcacccuagacuaucaugauagcaauguaaagaaccuguacgagaagguucgaucacagcucaaaaacaaugcaaaggaaaucggcaacggauguuuugaguucuaucacaagugcgacaauacauguauggaaagugugaaaaacggcacuuacgauuauccuaaguacuccgaggaagccaaacugaauagagaggagauugacggggucaaacuugaaagcaccaggaucuaucaaauucuggcuauauacucuacaguggcgucaaguuugguccucgugguuagccugggagcaaucuccuuuuggaugugcucuaacgguucguuacagugccggauuuguaucuga

SEQ ID NO: 135619 - RNA, 1701 nt, Artificial Sequence; identical to SEQ ID NO: 135486
  derived and/or modified CDS sequence (opt3) from hemagglutinin__InfluenzaA__AEO01492

SEQ ID NO: 135620 - RNA, 1701 nt, Artificial Sequence
  derived and/or modified CDS sequence (opt3) from hemagglutinin__InfluenzaA__AEO01493
augaaggccauccuggugguccuccuuuacaccuucgcuacagcaaacgccgacacucugugcauuggcuaucacgcgaauaacagcacggauaccguugacacaguguuggagaaaaauguaacugugacccauuccgucaacauauuagaagauaagcacaaugggaaacuguguaagcuaagaggaguggcuccccuccaucuggguaaaugcaacaucgccggcuggauucuugggaauccugagugugaaucucugucaacagcaaguagcugguccuacaucguugagaccucuucgucagacaacggaacuugcuauccaggcgauuuuauugacuacgaagaguugagggagcagcucagcaguguguccucuuucgaacgguuugagaucuucccgaagacaagcuccuggcccaaucacgauucaaacaagggugucaccgccgcuuguccucaugcaggggccaaaaguuuuuauaagaaucugauauggcuggugaaaaagggaaacagcuacccaaaacucucuaaguccuauaucaaugacaagggcaaagaaguauuaguucuguggggcauucaccaccccucaacgagcgcugaucaacagagucuuuaccagaacgccgacgcguacguguucgucgggacuucucgcuauuccaagaaauuuaagccugagaucgcaauucgaccaaaagugcgugaucaggagggaagaaugaauuacuauuggaccuugguggaacccggugacaagaucacauucgaggccacuggcaaccuggucguuccuagguacgcuuuugccauggaacggagcgcagggucgggaauaauuaucucugauaccccagugcaugacugcaacacaaccugucaaacgccgaaaggcgcuauuaauacuucccuacccuuccagaacauccacccuaucacaauugguaagugcccaaaguauguaaaaucaaccaagcuccgccuggccacugggcuuagaaaugugcccaguauacagagcaggggacuguuuggcgcgaucgccggcuucauugaagggggauggacagguauggucgacggcugguacggguaucaucaccagaacgaacaaggauccggcuacgcagcugauuugaaaucuacccagaaugccaucgacgagauaacgaacaaggugaauagcguuauugagaaaaugaacacccaguuuacagcuguggguaaggaguucaaucaccucgagaagcggaucgaaaaccugaauaaaaaggucgaugacggguucuuagauaucuggacuuacaacgccgagcugcucgugcuucuggaaaaugagcgcaccuuggacuaucaugauucaaacguuaaaaaucuauacgagaagguacgaagucagcugaaaaacaacgcaaaggaaauuggcaauggauguuuugaguucuaucacaagugcgacaacacauguauggaauccgugaaaaauggcacuuacgauuauccuaaguacagcgaggaagccaaacucaacagagaggagaucgacggggucaagcuggaaucuaccaggauuuaucaaauacuugcuaucuacucaacaguggcgaguagccuggucuuggugguuucccucggagcaauuucuuuuuggaugugcucgaaugguagccugcagugccggaucuguaucuga

SEQ ID NO: 135621 - RNA, 1701 nt, Artificial Sequence
  derived and/or modified CDS sequence (opt3) from hemagglutinin__InfluenzaA__AEO01494
augaaggccauccuggugguccuccuuuacaccuucgcuacagcaaacgccgacacucugugcacgggcuaucacgcgaauaacagcaccgauacaguugacacuguguuggagaaaaauguaaccgugacacauuccgucaacuuacuggaagauaagcacaaugggaaacuauguaagcucagaggaguggcuccccugcaucuugguaaaugcaacauugccggcuggauacuggggaauccugagugugaaucuuugucaaccgcaaguagcugguccuacaucguugagacuucuucgucagacaacggaacaugcuauccaggcgauuuuauugacuacgaggagcucagggagcagcugagcaguguguccucuuucgaacgguuugagaucuucccgaagaccagcuccuggcccaaucacgauucaaacaagggugucacggccgcuuguccucaugcaggggccaaaaguuuuuauaagaaucugauuuggcucgugaaaaagggaaacagcuacccaaaauuaucuaaguccuauaucaaugacaagggcaaagaaguacugguucuuuggggcauacaccaccccucaacuagcgcugaucaacagaguuuguaccagaacgccgacgcguacguguucgucgggaccucucgcuauuccaagaaauuuaagccugagaucgcaauucgaccaaaagugcgugaucaggagggaagaaugaauuacuauuggacacugguggaacccggugacaagaucacuuucgaggccaccggcaaccuagucguuccuagguacgcuuuugccauggaacggaacgcagggagcggaauuaucauaucggauacaccagugcaugacugcaauaccacgugucaaacuccgaaaggcgcuauuaacacaucucuccccuuccagaauauccacccuauuaccaucgguaagugcccaaaguauguaaaauccacuaagcugcgccuugccacagggcugagaaacgugcccucaauccagaguaggggauuguuuggcgcgauugccggcuucauagaagggggauggaccgguauggucgacggcugguacggguaucaucaccagaaugaacaaggaagcggcuacgcagcugaucucaaauccacgcagaacgccaucgacgagauuaccaauaaggugaacucuguuaucgagaaaaugaauacacaguuuacugcuguggguaaggaguucaaccaccuggaaaagcggauagaaaauuuaaacaaaaaggucgaugacggguuccuggauauuuggaccuacaaugccgagcuccuugugcuguuggaaaacgagcgcacacuagacuaucaugauagcaauguaaagaaccuguacgagaagguucgaaaccagcucaaaaauaacgcaaaggaaaucggcaauggauguuuugaguucuaucacaagugcgacaacacuuguauggaaucagugaaaaauggcaccuacgauuauccuaaguacagugaggaagccaaacugaacagagaggagaucgacggggucaaacuugaauccacaaggauuuaucaaauccuggcuauuuacagcaccguggcgucuucauugguccucgugguuagucugggagcaaucagcuuuuggaugugcuccaaugguucuuuacagugccggauauguauuuga

SEQ ID NO: 135622 - RNA, 1701 nt, Artificial Sequence; identical to SEQ ID NO: 132314
  derived and/or modified CDS sequence (opt3) from hemagglutinin__InfluenzaA__AEO01496

SEQ ID NO: 135623 - RNA, 1701 nt, Artificial Sequence; identical to SEQ ID NO: 131070
  derived and/or modified CDS sequence (opt3) from hemagglutinin__InfluenzaA__AEO01497

SEQ ID NO: 135624 - RNA, 1701 nt, Artificial Sequence; identical to SEQ ID NO: 132314
  derived and/or modified CDS sequence (opt3) from hemagglutinin__InfluenzaA__AEO01498

SEQ ID NO: 135625 - RNA, 1701 nt, Artificial Sequence
  derived and/or modified CDS sequence (opt3) from hemagglutinin__InfluenzaA__AEO01499
augaaggccauccuggugguccuccuuuacaccuucgcuauugcaaacgccgacacacugugcauaggcuaucacgcgaauaacagcacugauacgguugacaccguguuggagaagaauguaacagugacucauuccgucaacuuacuggaagauaagcacaaugggaaacuauguaagcucagaggaguggcuccccugcaucuugguaaaugcaacaucgccggcuggauucuggggaauccugagugugaaucuuugucaaccgcaaguagcugguccuacaucguugagacaucuucgucagacaacggaaccugcuauccaggcgauuuuauugacuacgaggagcucagggagcagcugagcaguguguccucuuucgaacgguuugagaucuucccgaagacuagcuccuggcccaaucacgauucaaacaagggugucacagccgcuuguccucaugcaggggccaaaaguuuuuauaagaaucugauauggcucgugaaaaagggaaacagcuacccaaaauuaucuaaguccuauaucaaugacaagggcaaagaaguacugguucuuuggggcauucaccaccccuacaccucagcugaucaacagagcuuguaccagaacgccgacgcguauguguucgucgggacgagucgcuacucuaagaaauuuaagccugagaucgcaauucgaccaaaagugcgugaucaggagggaagaaugaauuauuacuggacucugguggaacccggugacaagaucaccuucgaggccacaggcaaccuagucguuccuagguaugcuuuugccauggaacggaacgcaggguccggaauaauuaucagcgauacuccagugcaugacugcaauaccacaugucaaaccccgaaaggcgcuauuaacacgucgcuccccuuccagaauauccacccuaucacuauugguaagugcccaaaguacguaaaaucuacaaagcugcgccuugccaccgggcugagaaacgugcccuccauacagucaaggggauuguuuggcgcgaucgccggcuucauugaagggggauggacugguauggucgacggcugguauggguaccaucaccagaaugaacaaggaaguggcuacgcagcugaucucaaaagcacacagcacgccaucgacgagauaaccaacaagguaaauuccguuauugagaaaaugaacacgcaguuuaccgcuguggguaaggaguucaaucaucuggaaaagcggaucgaaaacuuaaauaaaaaggucgaugacggguuccuggauaucuggacauauaacgccgagcuccuugugcuguuggaaaaugagcgcacucuagacuaccacgauucuaacgugaaaaaucuguaugagaagguucgaagccagcucaaaaacaacgcaaaggaaauuggcaauggauguuuugaguucuaccauaagugcgacaacaccuguauggaaucagugaaaaauggcacauaugauuacccuaaguauagugaggaagccaaacugaacagagaggagaucaauggggucaaacuugaauccacuaggauuuaccaaauacuggcuaucuacagcaccguggcgucuucauugguccucgugguuagucugggagcaauuagcuuuuggaugugcuccaacgguucuuuacagugccggaucuguaucuga

SEQ ID NO: 135626 - RNA, 1701 nt, Artificial Sequence; identical to SEQ ID NO: 131818
  derived and/or modified CDS sequence (opt3) from hemagglutinin__InfluenzaA__AEO01500

SEQ ID NO: 135627 - RNA, 1701 nt, Artificial Sequence; identical to SEQ ID NO: 131881
  derived and/or modified CDS sequence (opt3) from hemagglutinin__InfluenzaA__AEO01501

SEQ ID NO: 135628 - RNA, 1701 nt, Artificial Sequence; identical to SEQ ID NO: 131881
  derived and/or modified CDS sequence (opt3) from hemagglutinin__InfluenzaA__AEO01502

SEQ ID NO: 135629 - RNA, 1701 nt, Artificial Sequence; identical to SEQ ID NO: 132137
  derived and/or modified CDS sequence (opt3) from hemagglutinin__InfluenzaA__AEO01503

SEQ ID NO: 135630 - RNA, 1701 nt, Artificial Sequence; identical to SEQ ID NO: 132314
  derived and/or modified CDS sequence (opt3) from hemagglutinin__InfluenzaA__AEO01505

SEQ ID NO: 135631 - RNA, 1701 nt, Artificial Sequence; identical to SEQ ID NO: 131818
  derived and/or modified CDS sequence (opt3) from hemagglutinin__InfluenzaA__AEO01506

SEQ ID NO: 135632 - RNA, 1701 nt, Artificial Sequence; identical to SEQ ID NO: 135426
  derived and/or modified CDS sequence (opt3) from hemagglutinin__InfluenzaA__AEO01507

SEQ ID NO: 135633 - RNA, 1701 nt, Artificial Sequence; identical to SEQ ID NO: 132314
  derived and/or modified CDS sequence (opt3) from hemagglutinin__InfluenzaA__AEO01508

SEQ ID NO: 135634 - RNA, 1701 nt, Artificial Sequence; identical to SEQ ID NO: 132045
  derived and/or modified CDS sequence (opt3) from hemagglutinin__InfluenzaA__AEO01510

SEQ ID NO: 135635 - RNA, 1701 nt, Artificial Sequence
  derived and/or modified CDS sequence (opt3) from hemagglutinin__InfluenzaA__AEO01511
augaaggccauccuggugguccuccuuuacaccuucgcuacagcaaacgccgacacucugugcauuggcuaucacgcgaauaacagcacggauaccguugacacaguguuggagaaaaauguaacugugacccauuccgucaacuuacuggaagauaagcacaaugggaaacuauguaagcucagaggagugacaccccugcaucuugguaaaugcaacauagcuggcuggauccuggggaauccugagugugaaucuuugucaaccacaaguagcugguccuacauuguugagacuucuucgucagacaacggaaccugcuauccaggcgauuuuaucgacuacgaagaacucagggagcagcugagcaguguguccucuuucgaacgguuugagauuuucccgaagacgagcuccuggcccaaucacgauucaaacaagggugucacugccgcauguccucaugccggggcuaaaaguuuuuauaagaaucugaucuggcucgugaaaaagggaaacagcuacccaaaauuaucuaaguccuauauaaaugacaagggcaaagaaguacugguucuuuggggcauccaccaccccucaaccagcgcagaucaacagaguuuguaccagaacgccgacgcuuacguguucgucgggacaucucgcuauuccaagaaauuuaagccugagauugccauccgaccaaaagugcgugagcaggaaggaagaaugaauuacuauuggacucugguggagcccggugauaagauuaccuucgaagcgacaggcaaccuagucguuccuagguacgcauuugccauggagcggaacgcugggagcggaaucauaauuucggacaccccagugcaugauugcaauacgacuugucaaacaccgaaaggcgccaucaacaccucucuccccuuccagaauauucacccuaucacuaucgguaagugcccaaaguauguaaaauccacaaagcugcgccuugcaaccgggcugagaaacgugcccucaauucagaguaggggauuguuuggcgcuauagccggcuucaucgaagggggauggacggguauggucgacggcugguacggguaucaucaccagaaugagcaaggaagcggcuacgcggccgaccucaaauccacccagaacgcaauugauaagaucacaaauaaagugaacucuguuauagagaagaugaauacucaguuuaccgcuguggguaaggaguucaaccaccuggagaaacggauugaaaauuuaaacaagaaagucgacgauggguuccuggacaucuggacauacaaugccgagcuccuugugcuguuggaaaacgagcgcacucuagauuaucaugacagcaauguaaagaaccuguacgagaaaguucgaucacagcucaagaacaaugcuaaggaaaucggcaacggauguuuugaguucuaucacaaaugcgauaauaccuguauggaaagugugaagaacggcacauacgacuauccuaaauacuccgaggaagccaagcugaauagagaggagauugauggggucaaacuugaaagcaccaggaucuaucaaauucuggcaauauacucuacuguggccucaaguuugguccucgugguuagccugggagcuaucuccuuuuggaugugcucuaacgguucguuacagugccggauuuguaucuga

SEQ ID NO: 135636 - RNA, 1701 nt, Artificial Sequence
  derived and/or modified CDS sequence (opt3) from hemagglutinin__InfluenzaA__AEO01512
augaaggccauccuggugguccuccuuuacaccuucgcuacagcaaacgccgacacucugugcauuggcuaucacgcgaauaacagcacggauaccguugacacaguguuggagaaaaauguaacugugacccauuccgucaacuuacuggaagauaagcacaaugggaaacuauguaagcucagaggaguggcuccccugcaucuugguaaaugcaacauagccggcuggauccuggggaauccugagugugaaucuuugucaacagcaaguagcugguccuacauuguugagaccucuucgucagacaacggaacuugcuauccaggcgauuuuaucgacuacgaagaacucagggagcagcugagcaguguguccucuuucgaacgguuugagauuuucccgaagacaagcuccuggcccaaucacgauucaaacaagggugucaccgccgcuuguccucaugcaggggccaaaaguuuuuauaagaaucugaucuggcucgugaaaaagggaaacagcuacccaaaauuaucuaaguccuauauaaaugacaagggcaaagaaguacugguucuuuggggcauccaccaccccucaacgagcgcugaucaacagaguuuguaccagaacgccgacgcguacguguucgucgggacuucucgcuauuccaagaaauuuaagccugagauugcaauccgaccaaaagugcgugagcaggaaggaagaaugaauuacuauuggacccugguggagcccggugauaagauuacauucgaagccacuggcaaccuagucguuccuagguacgcuuuugccauggagcggaacgcagggagcggaaucauaauuucggacaccccagugcaugauugcaauacaaccugucaaacgccgaaaggcgcuaucaacacuucucuccccuuccagaauauucacccuaucacaaucgguaagugcccaaaguauguaaaauccaccaagcugcgccuugccacugggcugagaaacgugcccucaauucagaguaggggauuguuuggcgcgauagccggcuucaucgaagggggauggacagguauggucgacggcugguacggguaucaucaccagaaugagcaaggaagcggcuacgcagcugaccucaaauccacccagaacgccauugaugagaucacgaauaaggugaacucuguuauagagaaaaugaauacccaguuuacagcuguggguaaggaguucaaccaccuggaaaagcggauugagaauuuaaacaaaaaggucgacgauggguuccuggacaucuggacuuacaaugccgaacuccuugugcuguuggagaacgagcgcacccuagauuaucaugacagcaauguuaaaaaccuguacgaaaagguacgaucacagcucaaaaacaaugcaaaggagaucggcaacggauguuuugaguucuaucacaagugcgauaauaaauguauggaaagugugaagaacggcacauacgacuauccuaaauacuccgaagaggccaagcugaauagagaggaaauugauggggucaaacuugagagcacuaggaucuaucaaauucuggcuauauacucuaccguggcgucaaguuugguccucgugguuagccugggagcaaucuccuuuuggaugugcucuaacgguucguuacagugccggauuuguaucuga

SEQ ID NO: 135637 - RNA, 1701 nt, Artificial Sequence
  derived and/or modified CDS sequence (opt3) from hemagglutinin__InfluenzaA__AEO01513
augaaggccauccuggcugugcuccuuuacaccuucgcaacagccaacgcggacacucugugcauuggcuaucacgcuaauaacagcacggauaccgucgacacaguuuuggagaaaaaugugacuguaacccauuccgugaacauauuagaagauaagcacaaugggaaacuguguaagcuaagaggagucgcaccccuccaucuggguaaaugcaacaucgccggcuggauucuugggaauccugagugugaaucucugucaacagccaguagcugguccuacaucguggagaccucuucgucagacaacggaacuugcuauccaggcgauuuuauugacuacgaagaguugagggagcagcucagcaguguuuccucuuucgaacgguuugagaucuucccgaagacaagcuccuggcccaaucacgauucaaacaagggugugaccgcugcauguccucaugccggggcuaaaaguuuuuauaagaaucugauauggcuggucaaaaagggaaacagcuacccaaaacucucuaaguccuauaucaaugacaagggcaaagaaguguuaguacuguggggcauucaccaccccucaacgagcgccgaucaacagagucuuuaccagaacgcggacgcauacguuuucguggggucuucccgcuauagcaagaaauuuaagccugagaucgccauucgaccaaaaguccgugaucaggagggaagaaugaauuacuauuggacuuugguggaacccggugacaagaucaccuucgaggcuacaggcaaccugguggucccuagguacgccuuugcaauggaacggaacgcugggucgggaauaauuaucucugauacuccaguucaugacugcaauaccacaugucaaaccccgaaaggcgccauuaacacgucccuacccuuccagaauauccacccugugacuaucgguaagugcccaaaguauguaaaaucaacaaagcuccgccuggcgaccgggcuuagaaacgugcccaguauucagagcaggggacuguuuggcgccauagcaggcuucaucgaagggggauggacugguauggucgacggcugguacggguaucaucaccagaaugaacaaggauccggcuacgcugccgauuugaaaucuacacagaacgcuauugacgagaucaccaauaaggugaacagcguuauagagaaaaugaauacgcaguuuaccgccguggguaaggaguucaaccaccucgagaagcggauugaaaaucugaacaaaaaggucgaugacggguucuuagauaucuggacauacaaugcagagcugcucgugcuucuggaaaacgagcgcacuuuggacuaucaugauucaaauguuaaaaaccuauacgagaagguacgaagucagcugaaaaacaaugccaaggaaaucggcaacggauguuuugaguucuaucacaagugcgacaauaccuguauggaauccgugaaaaacggcacauacgauuauccuaaguacagcgaggaagcuaaacucaauagagaggagauugacggggucaagcuggaaucuacuaggaucuaucaaauucuugcgauauacucaaccguggcaaguagccuggucuuggugguuucccucggagccaucucuuuuuggaugugcucgaacgguagccugcagugccggauuuguaucuga

SEQ ID NO: 135638 - RNA, 1701 nt, Artificial Sequence
  derived and/or modified CDS sequence (opt3) from hemagglutinin__InfluenzaA__AEO01514
augaaggccauccuggugguccuccuuuacaccuucgcuacagcaaacgccgacacucugugcauuggcuaucacgcgaauaacagcacggauaccguugacacaguguuggagaaaaauguaacugugacccauuccgucaacuuacuggaagauaugcacaaugggaagcuauguaaacucagaggaguggcuccccugcaucuugguaagugcaacauagccggcuggauccuggggaauccugagugugaaucuuugucaacagcaaguagcugguccuacauuguugagaccucuucgucagacaacggaacuugcuauccaggcgauuuuaucgacuacgaagaacucagggagcagcugagcaguguguccucuuucgaacgguuugagauuuucccgaaaacaagcuccuggcccaaucacgauucaaacaagggugucaccgccgcuuguccucaugcaggggccaagaguuuuuauaaaaaucugaucuggcucgugaagaaaggaaacagcuacccaaaguuaucuaaauccuauauaaaugacaagggcaaggaaguacugguucuuuggggcauccaccaccccucaacgagcgcugaucaacagaguuuguaccagaacgccgacgcguacguguucgucgggacuucucgcuauuccaaaaaguuuaaaccugagauugcaauccgaccaaaggugcgugagcaggaaggaagaaugaauuacuauuggacccugguggagcccggugauaaaauuacauucgaagccacuggcaaccuagucguuccuagguacgcuuuugccauggagcggaacgcagggagcggaaucauaauuucggacaccccagugcaugauugcaauacaaccugucaaacgccgaagggcgcuaucaacacuucucuccccuuccagaauauucacccuaucacaaucgguaaaugcccaaaguauguaaaguccaccaaacugcgccuugccacugggcugagaaacgugcccucaauucagaguaggggauuguuuggcgcgauagccggcuucaucgaagggggauggacagguauggucgacggcugguacggguaucaucaccagaaugagcaaggaagcggcuacgcagcugaccucaaguccacccagaacgccauugauaaaaucacgaauaaggugaacucuguuauagagaaaaugaauacccaguuuacagcuguggguaaggaguucaaccaccuggagaagcggauugaaaauuuaaacaaaaaggucgacgauggguuccuggacaucuggacuuacaaugccgagcuccuugugcuguuggaaaacgagcgcacccuagauuaucaugacagcaauguaaagaaccuguacgagaagguucgaucacagcucaaaaacaaugcaaaggaaaucggcaacggauguuuugaguucuaucacaagugcgauaauacauguauggaaagugugaaaaacggcacuuacgacuauccuaaguacuccgaggaagccaaacugaauagagaggagauugauggggucaaacuugaaagcaccaggaucuaucaaauucuggcuauauacucuacaguggcgucaaguuugguccucgugguuagccugggagcaaucuccuuuuggaugugcucuaacgguucguuacagugccggauuuguaucuga

SEQ ID NO: 135639 - RNA, 1701 nt, Artificial Sequence; identical to SEQ ID NO: 132904
  derived and/or modified CDS sequence (opt3) from hemagglutinin__InfluenzaA__AEO01515

SEQ ID NO: 135640 - RNA, 1701 nt, Artificial Sequence; identical to SEQ ID NO: 135486
  derived and/or modified CDS sequence (opt3) from hemagglutinin__InfluenzaA__AEO01516

SEQ ID NO: 135641 - RNA, 1701 nt, Artificial Sequence
  derived and/or modified CDS sequence (opt3) from hemagglutinin__InfluenzaA__AEO01517
augaaggccauccuggugguccuccuuuacaccuucgcuacagcaaacgccgacacucugugcauuggcuaucacgcgaauaacagcacggauaccguugacacaguguuggagaaaaauguaacugugacccauuccgucaacuuacuggaagauaagcacaaugggaaacuauguaagcucagaggaguggcuccccugcaucuugguaaaugcaacauagccggcuggauccuggggaauccugagugugaaucuuugucaacagcaaguagcugguccuacauuguugagaccucuucgucagacaacggaacuugcuauccaggcgauuuuaucgacuacgaagaacucagggagcagcugagcaguguguccucuuucgaacgguuugagauuuucccgaagacaagcuccuggcccaaucacgauucaaacaagggugucaccgccgcuuguccucaugcaggggccaaaaguuuuuauaagaaucugaucuggcucgugaaaaaggaaaacagcuacccaaaauuaucuaaguccuauauaaaugacaagggaaaagagguacugguucuuuggggcauccaccaccccucaacgagcgcugaucaacagaguuuguaccagaacgccgacgcguacguguucgucggcacuucucgcuauuccaagaaauuuaagccugagauugcaauccgaccaaaagugcgugaucaggaagggagaaugaauuacuauuggacccugguggagcccggagacaagauuacauucgaagccacugguaaccuagucguuccuagguacgcuuuugccauggagcggaacgcaggcagcgggaucauaauuucggauaccccagugcaugacugcaauacaaccugucaaacgccggaaggagcuaucaacacuucucuccccuuccagaauauucacccuaucacaaucggcaaaugcccaaaguauguaaaguccaccaaacugcgccuugccacuggucugagaaacgugcccucaauucagaguaggggguuguuuggagcgauagccggcuucaucgagggcggguggacaggaauggucgacgguugguacggcuaucaucaccagaaugagcaagggagcggauacgcagcugaucucaaguccacccagaacgccauugacgaaaucacgaauaaagugaacucuguuauagagaagaugaauacccaguuuacagcugugggcaaagaguucaaccaccuggagaagcggauugaaaauuuaaacaagaaagucgaugacgguuuccuggauaucuggacuuacaaugccgagcuccuugugcuguuggagaacgaacgcacccuagacuaucaugauagcaauguaaagaaccuguacgagaaaguucgaucacagcucaagaacaaugcaaaagaaaucgggaacggcuguuuugaguucuaucacaagugcgacaauacauguauggaaagugugaagaacggaacuuacgauuauccuaaauacuccgaggaggccaagcugaauagagaagagauugacggcgucaaacuugaaagcaccaggaucuaucaaauucuggcuauauacucuacaguggcgucaaguuugguccucgugguuagccugggggcaaucuccuuuuggaugugcucuaacggaucguuacagugccggauuuguaucuga

SEQ ID NO: 135642 - RNA, 1701 nt, Artificial Sequence
  derived and/or modified CDS sequence (opt3) from hemagglutinin__InfluenzaA__AEO01518
augaaggccauccuggugguccuccuuuacaccuucgcuacagcaaacgccgacacucugugcauuggcuaucacgcgaauaacagcacggauaccguugacacaguguuggagaaaaauguaacugugacccauuccgucaacuuacuggaagauaagcacaaugggaaacuauguaagcucagaggaguggcuccccugcaucuugguaaaugcaacauagccggcuggauccuggggaauccugagugugaaucuuugucaacagcaaguagcugguccuacauuguugagaccucuucgucagacaacggaacuugcuauccaggcgauuuuaucgacuacgaagaacucagggagcagcugagcaguguguccucuuucgaacgguuugagauuuucccgaagacaagcuccuggcccaaucacgauucaaacaagggugucaccgccgcuuguccucaugcaggggccaaaaguuuuuauaagaaucugaucuggauagugaaaaagggaaacagcuacccaaaacucaauaagucuuauaucaacgacaagggcaaagaaguauuaguucuguggggcauucaccaccccuccacgucagcugaucaacagagccuuuaccagaaugccgacgcguacguguucgucgggacuucccgcuauucuaagaaauuuaagccugagaucgcaauucgaccaaaagugcgugaucaggagggaagaaugaacuacuauuggaccuugguggaacccggugacaagaucacauucgaggccacuggcaaccuggucguuccuagguacgcuuuugccauggaacggaaugcaggguccggaauaauuaucagcgauaccccagugcaugacugcaacacaaccugucaaacgccgaaaggcgcuauuaauacuucgcuacccuuccagaacauccacccuaucacaauuggugagugcccaaaguauguaaagucuaccaaacuccgccuggccacugggcuuagaaaugugcccuccauacagucaaggggacuguuuggcgcgaucgccggcuucauugaagggggauggacagguauggucgacggcugguacggguaucaucaccagaacgagcaaggaaguggcuacgcagcugauuugaaaagcacccagaaugccaucgacaaaauaacgaacaaggugaauaguguuauugagaaaaugaacacccaguuuacagcuguggguaaggaguucaaucaccucgagaagcggaucgaaaaccugaauaaaaaggucgaugacggguucuuagauaucuggacuuacaacgccgagcugcucgugcuucuggaaaaugagcgcaccuuggacuaucaugauucuaacguaaagaaccuauacgagaagguucgaagccagcugaaaaauaacgcaaaggaaauuggcaauggauguuuugaguucuaucacaagugcgacaacacauguauggaaucagugaaaaauggcacuuacgauuauccuaaguacagugaggaagccaaacucaacagagaggagaucgacggggucaagcuggaauccaccaggauuuaucaaauacuugcuaucuacagcacaguggcgucuucacuggucuuggugguuagucucggagcaauuagcuuuuggaugugcuccaaugguucucugcagugccggaucuguaucuga

SEQ ID NO: 135643 - RNA, 1701 nt, Artificial Sequence
  derived and/or modified CDS sequence (opt3) from hemagglutinin__InfluenzaA__AEO01519
augaaggccauccuggugguccuccuuuacaccuucgcuacagcaaacgccgacacucugugcauuggcuaucacgcgaauaacagcacggauaccguugacacaguguuggagaaaaauguaacugugacccauuccgucaacuuacuggaagauaagcacaaugggaaacuauguaagcucagaggaguggcuccccugcaucuugguaaaugcaacauagccggcuggauccuggggaauccugagugugaaucuuugucaacagcaaguagcugguccuacauuguugagaccucuucgucagacaacggaacuugcuauccaggcgauuuuaucgacuacgaagaacucagggagcagcugagcaguguguccucuuucgaacgguuugagauuuucccgaagacaagcuccuggcccaaucacgauucaaacaagggugucaccgccgcuuguccucaugcaggggccaaaaguuuuuauaagaaucugaucuggcucgugaaaaagggaaacagcuacccaaaauuaucuaaguccuauauaaaugacaagggcaaagaaguacugguucuuuggggcauccaccaccccucaacgagcgcugaucaacagaguuuguaccagaacgccgacgcguacguguucgucgggacuucucgcuauuccaagaaauuucgaccugagauugcaauccguccaaaggugagagagcaggaaggaaggaugaauuacuauuggacccugguggagcccggugauaaaauuacauucgaagccacuggcaaccuagucguuccucgguacgcuuuugccauggagcgcaacgcagggagcggaaucauaauuucggacaccccagugcaugauugcaauacaaccugucaaacgccgaagggcgcuaucaacacuucucuccccuuccagaauauucacccuaucacaaucgguaaaugcccaaaguauguaaaguccaccaaacugagacuugccacugggcugaggaacauucccucaauacagagucggggauuguuuggcgcgaucgccggcuucauugaagggggauggacagguaugguggacggcugguacggguaucaucaccagaaugagcaaggaagcggcuacgcagcugaccucaaguccacccagaacgccaucgaugagauaacgaauaaagucaacucugugauugaaaagaugaauacccaguuuacagcuguugguaaagaguucaaccaccuggaaaagcgcaucgagaauuuaaacaagaaaguggacgauggguuccuggacaucuggacuuacaaugccgaacuccuuguccuguuggagaacgagcgaacccuagauuaucaugacagcaaugugaagaaccuguacgaaaaaguaagaucacagcucaagaacaaugcaaaagagauuggcaacggauguuuugaguucuaucacaagugcgauaauacauguauggagaguguuaagaacggcacuuacgacuauccuaaauacuccgaagaggccaagcugaauagggaggaaaucgauggggugaaacuugagagcacccggauuuaucaaauacuggcuaucuacucuacagucgcgucaaguuuggugcucgucgugagccugggagcaauuuccuuuuggaugugcucuaacgguucguuacagugccguaucuguaucuga

SEQ ID NO: 135644 - RNA, 1701 nt, Artificial Sequence; identical to SEQ ID NO: 133622
  derived and/or modified CDS sequence (opt3) from hemagglutinin__InfluenzaA__AEO01520

SEQ ID NO: 135645 - RNA, 1701 nt, Artificial Sequence; identical to SEQ ID NO: 132344
  derived and/or modified CDS sequence (opt3) from hemagglutinin__InfluenzaA__AEO01521

SEQ ID NO: 135646 - RNA, 1701 nt, Artificial Sequence; identical to SEQ ID NO: 134136
  derived and/or modified CDS sequence (opt3) from hemagglutinin__InfluenzaA__AEO01522

SEQ ID NO: 135647 - RNA, 1701 nt, Artificial Sequence; identical to SEQ ID NO: 131881
  derived and/or modified CDS sequence (opt3) from hemagglutinin__InfluenzaA__AEO01523

SEQ ID NO: 135648 - RNA, 1701 nt, Artificial Sequence; identical to SEQ ID NO: 135475
  derived and/or modified CDS sequence (opt3) from hemagglutinin__InfluenzaA__AEO01524

SEQ ID NO: 135649 - RNA, 1701 nt, Artificial Sequence
  derived and/or modified CDS sequence (opt3) from hemagglutinin__InfluenzaA__AEO01525
augaaggccauccuggugguccuccuuuacaccuucgcuacagcaaacgccgacacucugugcauuggcuaucacgcgaauaacagcacggauaccguugacacaguguuggagaaaaauguaacugugacccauuccgucaacuuacuggaagauaagcacaaugggaaacuauguaagcucagaggaguggcuccccugcaucuugguaaaugcaacauagccggcuggauccuggggaauccugagugugaaucuuugucaacagcaaguagcugguccuacauuguugagaccucuucgucaggaaacggcacuugcuauccaggugacuuuaucgauuacgaagaacucagggagcagcugagcaguguguccucuuucgaacgguuugagauuuucccgaagacaagcuccuggcccaaucacgacucaaacaagggggucaccgccgcuuguccucaugcaggagccaaaaguuuuuauaagaaucugaucuggcucgugaaaaagggcaacagcuacccacgcuuaucuaaauccuauauaaaugauaagggcaaggaaguacugguucuuugggggauccaccaccccucaacgagcgcugaccaacagaguuuguaccagaacgccgaugcguacguguucgucggaacuucucgauauuccaaaaaguuuaaaccugagauugcaauccguccaaaggugagagaccaggaggguaggaugaauuacuauuggacccugguggaacccggcgauaaaauuacauucgaggccacugggaaccuagucguuccucgguacgcuuuugccauggaacgcaacgcaggaagcggcaucauaauuucggacaccccagugcaugauugcaauacaaccugucaaacgccgaagggugcuaucaacacuucucuccccuuccagaauauucacccuaucacaaucgggaaaugcccaaaguauguaaaguccaccaaacugagacuugccacuggacugaggaacgugcccucaauucagagucggggcuuguuuggcgcgauagccggguucaucgagggagguuggacaggcauggucgacgggugguacggauaucaucaccagaaugaacaaggcagcgguuacgcagcugaccucaaguccacccagaacgccauugaugagaucacgaauaaagugaacucuguuauagagaagaugaauacccaguuuacagcuguggggaaagaguucaaccaccuggagaagcgcauugaaaauuuaaacaagaaagucgacgauggcuuccuggacaucuggacuuacaaugccgagcuccuugugcuguuggaaaacgagcgaacccuagauuaucaugacagcaauguaaagaaccuguacgagaaaguuagaucacagcucaagaacaaugcaaaagaaaucggaaacggcuguuuugaguucuaucacaagugcgauaauacauguauggaaagugugaagaacgggacuuacgacuauccuaaauacuccgaggaagccaagcugaauagggaggagauugauggagucaaacuugaaagcacccggaucuaucaaauucuggcuauauacucuacaguggcgucaaguuugguccucgugguuagccugggugcaaucuccuuuuggaugugcucuaacggcucguuacagugccguauuuguaucuga

SEQ ID NO: 135650 - RNA, 1701 nt, Artificial Sequence; identical to SEQ ID NO: 131881
  derived and/or modified CDS sequence (opt3) from hemagglutinin__InfluenzaA__AEO01526

SEQ ID NO: 135651 - RNA, 1701 nt, Artificial Sequence; identical to SEQ ID NO: 134658
  derived and/or modified CDS sequence (opt3) from hemagglutinin__InfluenzaA__AEO01527

SEQ ID NO: 135652 - RNA, 1701 nt, Artificial Sequence
  derived and/or modified CDS sequence (opt3) from hemagglutinin__InfluenzaA__AEO01529
augaaggccauccuggugguccuccuuuacaccuucgcuacagcaaacgccgacacucugugcauuggcuaucacgcgaauaacagcacggauaccguugacacaguguuggagaaaaauguaacugugacccauuccgucaacauauuagaagauaagcacaaugggaaacuguguaagcuaagaggaguggcuccccuccaucuggguaaaugcaacaucgccggcuggauucuugggaauccugagugugaaucucugucaacagcaaguagcugguccuacaucguugagaccucuucgucagacaacggaacuugcuauccaggcgauuuuauugacuacgaagaguugagggagcagcucagcaguguguccucuuucgaacgguuugagaucuucccgaagacaagcuccuggcccaaucacgauucaaacaagggugucaccgccgcuuguccucaugcaggggccaaaaguuuuuauaagaaucugauauggcuggugaaaaagggaaacagcuacccaaaacucucuaaguccuauaucaaugacaagggcaaagaaguauuaguucuguggggcauucaccaccccucaacgagcgcugaucaacagagucuuuaccagaacgccgacgcguacguguucgucgggucuucccgcuauagcaagaaauuuaagccugagaucgcaauucgaccaaaagugcgugaucaggagggaagaaugaauuacuauuggacuuugguggaacccggugacaagaucaccuucgaggccacaggcaaccuggucguuccuagguacgcuuuugccauggaacggaacgcagggucgggaauaauuaucucugauacuccagugcaugacugcaauaccacaugucaaaccccgaaaggcgcuauuaacacgucccuacccuuccagaauauccacccuaucacuauugguaagugcccaaaguauguaaaaucaacaaagcuccgccuggccaccgggcuuagaaacgugcccaguauacagagcaggggacuguuuggcgcgaucgccggcuucauugaagggggauggacugguauggucgacggcugguacggguaucaucaccagaaugaacaaggauccggcuacgcagcugauuugaaaucuacacagaacgccaucgacgagauaaccaauaaggugaacagcguuauugagaaaaugaauacgcaguuuaccgcuguggguaaggaguucaaccaccucgagaagcggaucgaaaaucugaacaaaaaggucgaugacggguucuuagauaucuggacauacaaugccgagcugcucgugcuucuggaaaacgagcgcacuuuggacuaucaugauucaaauguuaaaaaccuauacgagaagguacgaagucagcugaaaaacaaugcaaaggaagugggcaacggauguuuugaguucuaucacaagugcgacaauaccuguauggaauccgucaaaaacggcacauacgauuauccuaaguacagcgaggaagccaaacucaauagagagaagauugacggggugaaacuggagucuacuaggaucuaucaaauucuugcuauauacucaaccgcggcaaguagccuggucuuggugguuucccucggagccaucucuuuuuggaugugcucgaacgguagccugcagugccggauuuguaucuga

SEQ ID NO: 135653 - RNA, 1701 nt, Artificial Sequence; identical to SEQ ID NO: 131881
  derived and/or modified CDS sequence (opt3) from hemagglutinin__InfluenzaA__AEO01530

SEQ ID NO: 135654 - RNA, 1701 nt, Artificial Sequence
  derived and/or modified CDS sequence (opt3) from hemagglutinin__InfluenzaA__AEO01531
augaaggccauccuggugguccuccuuuacaccuucgcuacagcaaacacugacacgcugugcauuggcuaucacgccaauaacagcaccgauacaguugacacuguguuggagaaaaauguaaccgugacacauuccgucaacuuacuggaagauaagcacaaugggaaacuauguaagcucagaggaguggcgccccugcaucuugguaaaugcaacauagcuggcuggauccuggggaauccugagugugaaucuuugucaaccgccaguagcugguccuacauuguugagacuucuucgucagacaacggaacaugcuauccaggcgauuuuaucgacuacgaagaacucagggagcagcugagcaguguguccucuuucgaacgguuugagauuuucccgaagaccagcuccuggcccaaucacgauucaaacaagggugucacggcagccuguccucaugcuggggcaaaaaguuuuuauaagaaucugaucuggcucgugaaaaagggaaacagcuacccaaaauuaucuaaguccuauauaaaugacaagggcaaagaaguacugguucuuuggggcauccaccaccccucaacuagcgccgaucaacagaguuuguaccagaacgcugacgccuacguguucgucgggaccucucgcuauuccaagaaauuuaagccugagauugcgauccgaccaaaagugcgugagcaggaaggaagaaugaauuacuauuggacacugguggagcccggugauaagauuacuuucgaagcaaccggcaaccuagucguuccuagguacgccuuugcuauggagcggaacgccgggagcggaaucauaauuucggacacaccagugcaugauugcaauaccacgugucaaacuccgaaaggcgcaaucaacacaucucuccccuuccagaauauucacccuaucaccaucgguaagugcccaaaguauguaaaauccacuaagcugcgccuugcuacagggcugagaaacgugcccucaauucagaguaggggauuguuuggcgccauagcgggcuucaucgaagggggauggaccgguauggucgacggcugguacggguaucaucaccagaaugagcaaggaagcggcuacgccgcagaccucaaauccacgcagaacgcuauugauaagaucaccaauaaagugaacucuguuauagagaagaugaauacacaguuuacugccguggguaaggaguucaaccaccuggagaaacggauugaaaauuuaaacaagaaagucgacgauggguuccuggacaucuggaccuacaaugcugagcuccuugugcuguuggaaaacgagcgcacacuagauuaucaugacagcaauguaaagaaccuguacgagaaaguucgaucacagcucaagaacaaugccaaggaaaucggcaacggauguuuugaguucuaucacaaaugcgauaauacuuguauggaaagugugaagaacggcaccuacgacuauccuaaauacuccgaggaagcaaagcugaauagagaggagauugauggggucaaacuugaaagcacaaggguguaucaaauccuggccauuuacucuaccgucgcuucaaguuuggugcucguugugagccugggagcgauauccuuuuggaugugcucuaacgguucguuacagugccggaucuguauuuga

SEQ ID NO: 135655 - RNA, 1701 nt, Artificial Sequence; identical to SEQ ID NO: 135486
  derived and/or modified CDS sequence (opt3) from hemagglutinin__InfluenzaA__AEO01532

SEQ ID NO: 135656 - RNA, 1701 nt, Artificial Sequence
  derived and/or modified CDS sequence (opt3) from hemagglutinin__InfluenzaA__AEO01533
augaaggccauccuggugguccuccuuuacaccuucgcuacagcaaacgccgacacucugugcauuggcuaucacgcgaauaacagcacggauaccguugacacaguguuggagaagaauguaacugugacccauuccgucgauuuacuggaagacaagcacaacgggaaacuauguaagcucagaggaguggcuccccugcaucuugguaaaugcaauauagccggcuggauccuggggaacccugagugugaaucuuugucaacagcaaguagcugguccuacauuguugagaccucuucgucagauaauggaacuugcuauccaggcgacuuuaucgauuacgaggagcucagggagcagcugagcaguguguccucuuucgaacgguuugagauuuucccgaagacaagcuccuggcccaaccacgacucaaauaagggugucaccgccgcuuguccucaugcaggggccaaaaguuuuuauaagaaccugaucuggcucgugaaaaagggaaauagcuacccaaaauuaucuaaguccuauauaaacgauaagggcaaagaaguacugguucuuuggggcauccaccaccccucaacgagcgcugaccaacagaguuuguaccagaaugccgaugcguacguguucgucgggacuucucgcuauuccaagaaauuuaagccugagauugcaauccgaccaaaagugcgugaccaggagggaagaaugaacuacuauuggacccugguggaacccggugauaagauuacauucgaggccacuggcaaucuagucguuccuagguacgcuuuugccauggaacggaacgcagggagcggaaucauaauuucggacaccccagugcaugacugcaacacaaccugucaaacgccgaaaggcgcuaucaauacuucucuccccuuccagaacauucacccuaucacaaucgguaagugcccaaaguauguaaaauccaccaagcugcgccuugccacugggcugagaaaugugcccucaauucagaguaggggauuguuuggcgcgauagccggcuucaucgaagggggauggacagguauggucgauggcugguacggguaucaucaccagaacgaacaaggaagcggcuacgcagcugaccucaaauccacccagaaugccauugaugagaucacgaacaagguaaauucuguuauagagaaaaugaacacccaguuuacagcuguggguaaggaguucaaucaccuggaaaagcggauugaaaacuuaaauaaaaaggucgacgauggguuccuggacaucuggacuuacaacgccgagcuccuugugcuguuggaaaaugagcgcacccuagauuaucaugacagcaacgugaaaaaucuguacgagaagguucgaucacagcucaaaaacaacgcaaaggaaaucggcaauggauguuuugaguucuaucacaagugcgauaacacauguauggaaagugugaaaaauggcacuuacgacuauccuaaguacuccgaggaagccaaacugaacagagaggagauugauggggucaaacuugaaagcaccaggaucuaucaaauucuggcuauauacucuacaguggcgucaaguuugguccucgugguuagccugggagcaaucuccuuuuggaugugcucuaaugguucguuacagugccggauuuguaucuga

SEQ ID NO: 135657 - RNA, 1701 nt, Artificial Sequence
  derived and/or modified CDS sequence (opt3) from hemagglutinin__InfluenzaA__AEO01534
augaaggccauccuggugguccuccuuuacaccuucgcuacagcaaacgccgacacucugugcauuggcuaucacgcgaauaacagcacggauaccguugacacaguguuggagaaaaauguaacugugacccauuccgucaacuuacuggaagauaagcacaaugggaaacuauguaagcucagaggaguggcuccccugcaucuugguaaaugcaacauagccggcuggauccuggggaauccugagugugaaucuuugucaacagcaaggaguuggagcuacauuguugagaccuccucuucggacaacggaacuugcuauccaggcgauuuuaucgacuacgaggagcuccgggagcagcugucaagcgugaguuccuucgaacgcuuugagauuuucccgaagacaucuagcuggcccaaucacgauuccaacaagggugucaccgccgcuuguccucaugcaggggccaaaucauuuuauaagaaucugaucuggcucgugaaaaagggaaacaguuacccaaaauuaagcaagucuuauauaaaugacaagggcaaagaaguacugguucuuuggggcauccaccaccccuccacgucagcugaucaacagagcuuguaccagaacgccgacgcguacguguucgucgggacuucccgauauucuaagaaauuuaagccugagauugcaauccguccaaaagugagagaucaggagggaaggaugaauuacuauuggacccugguggaacccggugacaagauuacauucgaggccacuggcaaccuagucguuccucgguacgcuuuugccauggaacgcaacgcaggguccggaaucauaauuagcgauaccccagugcaugacugcaauacaaccugucaaacgccgaaaggcgcuaucaacacuucgcuccccuuccagaauauucacccuaucacaaucgguaagugcccaaaguauguaaaaucuaccaagcugagacuugccacugggcugaggaacgugcccuccauucagucacggggauuguuuggcgcgauagccggcuucaucgaagggggauggacagguauggucgacggcugguacggguaucaucaccagaaugaacaaggaaguggcuacgcagcugaucucaaaagcacccagcacgccauugacgagaucacgaacaaggugaauaguguuauagagaaaaugaacacccaguuuacagcuguggguaaggaguucaaucaucuggaaaagcgcauugaaaacuuaaauaaaaaggucgaugacggguuccuggauaucuggacuuacaacgccgagcuccuugugcuguuggaaaaugagcgaacccuagacuaucacgauucuaacguaaagaaucuguacgagaagguuagaagccagcucaaaaacaacgcaaaggaaaucggcaauggauguuuugaguucuaucauaagugcgacaacacauguauggaaucagugaaaaauggcacuuacgauuauccuaaguacagugaggaagccaaacugaacagggaggagauugacggggucaaacuugaauccacccggaucuaucaaauucuggcuauauacagcacaguggcgucuucauugguccucgugguuagucugggagcaaucagcuuuuggaugugcuccaaugguucuuuacagugccguauuuguaucuga

SEQ ID NO: 135658 - RNA, 1701 nt, Artificial Sequence; identical to SEQ ID NO: 132366
  derived and/or modified CDS sequence (opt3) from hemagglutinin__InfluenzaA__AEO01535

SEQ ID NO: 135659 - RNA, 1701 nt, Artificial Sequence; identical to SEQ ID NO: 131881
  derived and/or modified CDS sequence (opt3) from hemagglutinin__InfluenzaA__AEO01536

SEQ ID NO: 135660 - RNA, 1701 nt, Artificial Sequence; identical to SEQ ID NO: 133622
  derived and/or modified CDS sequence (opt3) from hemagglutinin__InfluenzaA__AEO01537

SEQ ID NO: 135661 - RNA, 1701 nt, Artificial Sequence
  derived and/or modified CDS sequence (opt3) from hemagglutinin__InfluenzaA__AEO01538
augaaggccauccuggugguccuccuuuacaccuucgcuacagcaaacgccgacacucugugcauuggcuaucacgcgaauaacagcacggauaccguugacacaguguuggagaaaaauguaacugugacccauuccgucaacuuacuggaagauaagcacaaugggaaacuauguaagcucggagguguggcuccccugcaucuuggcaaaugcaacauagccggguggauccugggaaauccugagugugaaucuuugucaacagcaaguagcugguccuacauuguugagaccucuucgucagacaacggcacuugcuauccaggugauuuuaucgacuacgaagaacucagagagcagcugagcaguguguccucuuucgaaagguuugagauuuucccgaagacaagcuccuggcccaaucacgauucaaacaagggggucaccgccgcuuguccucaugcaggagccaaaaguuuuuauaagaaucugaucuggcucgugaaaaagggcaacagcuacccaaaauuaucuaaguccuauauaaaugacaagggcaaagaaguacugguucuuugggggauccaccaccccucaacgagcgcugaucaacagaguuuguaccagaacgccgacgcguacguguucgucggaacuucucgguauuccaagaaauuuaagccugagauugcaauccgcccaaaagugcgagaucaggagggucguaugaauuacuauuggacccugguggaacccggcgacaagauuacauucgaggccacugggaaccuagucguuccuagauacgcuuuugccauggaaaggaacgcaggaagcggcaucauaauuucggauaccccagugcaugacugcaauacaaccugucaaacgccgaaaggugcuaucaacacuucucuccccuuccagaauauucacccuaucacaaucgggaagugcccaaaguauguaaaauccaccaagcugcggcuugccacuggacugcgcaacgugcccucaauucagaguagaggcuuguuuggcgcgauagccggguucaucgagggagguuggacaggcauggucgacgggugguacggauaucaucaccagaaugaacaaggcagcgguuacgcagcugaucucaaauccacccagaacgccauugacgagaucacgaauaaggugaacucuguuauagagaaaaugaauacccaguuuacagcuguggggaaggaguucaaccaccuggagaagaggauugaaaauuuaaacaaaaaggucgaugacggcuuccuggauaucuggacuuacaaugccgagcuccuugugcuguuggaaaacgagcggacccuagacuaucaugauagcaauguaaagaaccuguacgagaagguucgcucacagcucaaaaacaaugcaaaggaaaucggaaacggcuguuuugaguucuaucacaagugcgacaauacauguauggaaagugugaaaaacgggacuuacgauuauccuaaguacuccgaggaagccaaacugaaucgagaggagauugacggagucaaacuugaaagcaccagaaucuaucaaauucuggcuauauacucuacaguggcgucaaguuugguccucgugguuagccugggugcaaucuccuuuuggaugugcucuaacggcucguuacagugcaggauuuguaucuga

SEQ ID NO: 135662 - RNA, 1701 nt, Artificial Sequence; identical to SEQ ID NO: 132344
  derived and/or modified CDS sequence (opt3) from hemagglutinin__InfluenzaA__AEO01539

SEQ ID NO: 135663 - RNA, 1701 nt, Artificial Sequence
  derived and/or modified CDS sequence (opt3) from hemagglutinin__InfluenzaA__AEO01540
augaaggccauccuggugguccuccuuuacaccuucgcuauugcaaacgccgacacacugugcauaggcuaucacgcgaauaacagcacugauacgguugacaccguguuggagaaaaauguaacagugacucauuccgucaacuuacuggaagauaagcacaaugagaaacuauguaagcucagagggguggcuccccugcaucuuggaaaaugcaacaucgccgguuggauucugggcaauccugaaugugagucuuugucaaccgcaaguagcugguccuacaucguugaaacaucuucgucagacaacgggaccugcuauccaggagauuuuauugacuacgaggagcucagggaacagcugagcaguguguccucuuucgagcgguuugaaaucuucccgaagacuagcuccuggcccaaucacgauucaaacaagggcgucacagccgcuuguccucaugccggugcaaaaaguuuuuauaagaaucugauauggcucgugaaaaaggggaacagcuacccaaaauuaucuaaguccuauaucaaugacaagggaaaagagguacugguucuuuggggcauucaccaccccucaaccagcgcugaucaacagaguuuguaccagaacgccgacgcguacguguucgucggcacgucucgcuauuccaagaaauuuaagccugagaucgcaauucgaccaaaagugcgugaucaggaagggagaaugaauuacuauuggacucugguggagcccggagacaagaucaccuucgaagccacagguaaccuagucguuccuagguacgcuuuugccauggagcggaacgcaggcagcgggauaauuaucucggauacuccagugcaugacugcaauaccacaugucaaaccccgaaaggagcuauuaacacgucucuccccuuccagaauauccacccuaucacuauuggcaagugcccaaaguauguaaaauccacaaagcugcgccuugccaccggucugagaaacgugcccucaauacagaguaggggguuguuuggagcgaucgccggcuucauugaaggcggguggacuggaauggucgacgguugguacggcuaucaucaccagaaugagcaagggagcggauacgcagcugaucucaaauccacacagcacgccaucgacgagauaaccaacaagguaaauucuguuauugaaaagaugaacacgcaguuuaccgcugugggcaaggaguucaaucaucuggaaaagcggaucgagaacuuaaauaaaaaggucgaugacgguuuccuggauaucuggacauacaacgccgaacuccuugugcuguuggagaaugagcgcacucuagacuaucacgauagcaacgugaaaaaucuguacgaaaagguucgaucacagcucaaaaacaacgcaaaggagauugggaauggcuguuuugaguucuaucauaagugcgacaacaccuguauggaaagugugaaaaauggaacauacgauuauccuaaguacuccgaagaggccaaacugaacagagaggaaaucaauggcgucaaacuugagagcacuaggauuuaucaaauacuggcuaucuacucuaccguggcgucaaguuugguccucgugguuagccugggggcaauuuccuuuuggaugugcucuaacggaucguuacagugccggaucuguaucuga

SEQ ID NO: 135664 - RNA, 1701 nt, Artificial Sequence; identical to SEQ ID NO: 132137
  derived and/or modified CDS sequence (opt3) from hemagglutinin__InfluenzaA__AEO01541

SEQ ID NO: 135665 - RNA, 1701 nt, Artificial Sequence; identical to SEQ ID NO: 131881
  derived and/or modified CDS sequence (opt3) from hemagglutinin__InfluenzaA__AEO01542

SEQ ID NO: 135666 - RNA, 1701 nt, Artificial Sequence; identical to SEQ ID NO: 131818
  derived and/or modified CDS sequence (opt3) from hemagglutinin__InfluenzaA__AEO01543

SEQ ID NO: 135667 - RNA, 1701 nt, Artificial Sequence; identical to SEQ ID NO: 131818
  derived and/or modified CDS sequence (opt3) from hemagglutinin__InfluenzaA__AEO01544

SEQ ID NO: 135668 - RNA, 1701 nt, Artificial Sequence
  derived and/or modified CDS sequence (opt3) from hemagglutinin__InfluenzaA__AEO01545
augaaggccauccuggugguccuccuuuacaccuucgcuacagcaaacgccgacacucugugcauuggcuaucacgcgaauaacagcacggauaccguugacacaguguuggagaaaaauguaacugugacccauuccgucaacuuacuggaagauaagcacucugggaaacuauguaagcucagaggaguggcuccccugcaucuugguaaaugcaauauagccggcuggauccuggggaacccugagugugaaucauugaguacagcaagcuccuggucuuacauuguugagaccucgucaagcgacaauggaacuugcuauccaggcgauuuuguggacuacgaggagcucagggagcagcugaguuccgucucuagcuucgaacgguuugagaucuucccgaagacauccucauggcccaaccacgauaguaauaagggugugaccgccgcuuguccucaugcaggggccaagagcuuuuauaaaaaccugauuuggcucguuaaaaagggaaauucuuacccaaaauuauccaagucauauaucaacgacaagggcaaagaaguacuggugcuuuggggcauacaccaccccagcacgagugcugaucaacagucuuuguaccagaaugccgacgcguacgucuucguggggacuucccgcuauagcaagaaauuuaagccugagaucgcaauucgaccaaaagugcgugaucaggagggaagaaugaacuacuauuggacccuggucgaacccggugacaagaucacauucgaggccacuggcaaucuaguugugccuagguacgcuuuugccauggaacggaacgcagggucgggaauuaucauaucugauaccccaguacaugacugcaacacaaccugucaaacgccgaaaggcgcuauuaauacuucccuccccuuccagaacauccacccuauuacaaucgguaagugcccaaaguaugugaaaucaaccaagcugcgccuugccacugggcugagaaauguccccaguauccagagcaggggauuguuuggcgcgauugccggcuucauagaagggggauggacagguaugguggacggcugguacggguaucaucaccagaacgaacaaggauccggcuacgcagcugaucucaaaucuacccagaaugccaucgacaagauuacgaacaaaguuaauagcgugaucgagaagaugaacacccaguuuacagcugucgguaaggaguucaaucaccuggaaaaacggauagagaacuuaaauaagaaaguggaugacggguuccuggauauuuggacuuacaacgccgaacuccuuguacuguuggagaaugaacgcacccuagacuaucaugauucaaacguuaagaaucuguacgagaaagugcgaagucagcucaagaacaacgcaaaggagaucggcaauggauguuuugaguucuaucacaaaugcgacaacacauguauggaauccgucaagaauggcacuuacgauuauccuaaauacagcgaagaggccaagcugaacagagaagagaucgacggggugaaacuugagucuaccaggauuuaucaaauccuggcuauuuacucaacagucgcgaguagcuuggugcucguugugucccugggagcaauaucuuuuuggaugugcucgaaugguagcuuacagugccggaucuguauuuga

SEQ ID NO: 135669 - RNA, 1701 nt, Artificial Sequence; identical to SEQ ID NO: 130704
  derived and/or modified CDS sequence (opt3) from hemagglutinin__InfluenzaA__AEO01546

SEQ ID NO: 135670 - RNA, 1701 nt, Artificial Sequence; identical to SEQ ID NO: 130704
  derived and/or modified CDS sequence (opt3) from hemagglutinin__InfluenzaA__AEO01547

SEQ ID NO: 135671 - RNA, 1701 nt, Artificial Sequence; identical to SEQ ID NO: 130897
  derived and/or modified CDS sequence (opt3) from hemagglutinin__InfluenzaA__AEO01548

SEQ ID NO: 135672 - RNA, 1701 nt, Artificial Sequence; identical to SEQ ID NO: 130808
  derived and/or modified CDS sequence (opt3) from hemagglutinin__InfluenzaA__AEO01549

SEQ ID NO: 135673 - RNA, 1701 nt, Artificial Sequence; identical to SEQ ID NO: 130717
  derived and/or modified CDS sequence (opt3) from hemagglutinin__InfluenzaA__AEO01550

SEQ ID NO: 135674 - RNA, 1701 nt, Artificial Sequence; identical to SEQ ID NO: 130717
  derived and/or modified CDS sequence (opt3) from hemagglutinin__InfluenzaA__AEO01551

SEQ ID NO: 135675 - RNA, 1701 nt, Artificial Sequence; identical to SEQ ID NO: 130717
  derived and/or modified CDS sequence (opt3) from hemagglutinin__InfluenzaA__AEO01552

SEQ ID NO: 135676 - RNA, 1701 nt, Artificial Sequence; identical to SEQ ID NO: 130717
  derived and/or modified CDS sequence (opt3) from hemagglutinin__InfluenzaA__AEO01553

SEQ ID NO: 135677 - RNA, 1701 nt, Artificial Sequence; identical to SEQ ID NO: 130717
  derived and/or modified CDS sequence (opt3) from hemagglutinin__InfluenzaA__AEO01554

SEQ ID NO: 135678 - RNA, 1701 nt, Artificial Sequence; identical to SEQ ID NO: 130897
  derived and/or modified CDS sequence (opt3) from hemagglutinin__InfluenzaA__AEO01555

SEQ ID NO: 135679 - RNA, 1701 nt, Artificial Sequence; identical to SEQ ID NO: 130717
  derived and/or modified CDS sequence (opt3) from hemagglutinin__InfluenzaA__AEO01557

SEQ ID NO: 135680 - RNA, 1701 nt, Artificial Sequence; identical to SEQ ID NO: 130717
  derived and/or modified CDS sequence (opt3) from hemagglutinin__InfluenzaA__AEO01558

SEQ ID NO: 135681 - RNA, 1701 nt, Artificial Sequence
  derived and/or modified CDS sequence (opt3) from hemagglutinin__InfluenzaA__AEO01559
augaaggccauccuggugguccuccuuuacaccuucgcuacagcaaacgccgacacucugugcauuggcuaucacgcgaauaacagcacggauaccguugacacaguguuggagaaaaauguaacugugacccauuccgucaacuuacuggaagauaagcacaaugggaaacuauguaagcucagaggaguggcuccccugcaucuugguaaaugcaacauagccggcuggauccuggggaauccugagugugaaucuuugucaacagcaaguagcugguccuacauuguugagaccucuucgucagacaacggaacuugcuauccaggcgauuuuaucgacuacgaggagcucagggagcagcugagcaguguguccucuuucgaacgguuugagauuuucccgaagacaagcuccuggcccaaucacgauucaaacaagggugucaccgccgcuuguccucaugcaggggccaaaaguuuuuauaagaaucugaucuggcucgugaaaaagggaaacagcuacccaaaauuaucuaaguccuauauaaaugacaagggcaaagaaguacugguucuuuggggcauccaccaccccucaacgagcgcugaucaacagaguuuguaccagaacgccgacgcguacguguucgucgggacuucucgcuauuccaagaaauuuaagccugagauugcaauccgaccaaaagugcgugaucaggagggaagaaugaauuacuauuggacccugguggaacccggugacaagauuacauucgaggccacuggcaaccuagucguuccuagguacgcuuuugccauggaacggaacgcagggagcggaaucauaauuucggauaccccagugcaagacugcaauacaaccugucagacgccgaaaggcgcuaucaacacuucucuccccuuccagaauauucauccuaucacaaucgguaagugcccaaaguauguaaaauccaccaagcugcgccuugccacugggcugagaaacgugcccucaauucagaguaggggauuguuuggcgcgauagccggcuucaucgaagggggauggacagguauggucgacggcugguacggguaucaccaucaaaaugaacagggaagcggcuacgcagcugaucucaaauccacccagaacgccauugacgagaucacgaauaaggugaacucuguuauagagaaaaugaauacccaguuuacagcuguggguaaggaguucaaccaccuggaaaagcggauugaaaauuuaaacaaaaaggucgaugacggguuccuggauaucuggacuuacaaugccgagcuccuugugcuguuggaaaacgagcgcacccuagacuaucacgauagcaauguaaagaaccuguacgagaagguucgaucacaacucaaaaacaaugcaaaggaaaucggcaacggauguuuugaguucuaucauaagugcgacaauacauguauggaaagugugaaaaacggcacuuacgauuauccuaaguacuccgaggaagccaaacugaauagagaggagauugacggggucaaacuugaaagcaccaggaucuaucagauucuggcuauauacucuacaguggcgucaaguuugguccucgugguuagccugggagcaaucuccuuuuggaugugcucuaacgguucguuacagugccggauuuguaucuga

SEQ ID NO: 135682 - RNA, 1701 nt, Artificial Sequence; identical to SEQ ID NO: 130717
  derived and/or modified CDS sequence (opt3) from hemagglutinin__InfluenzaA__AEO01560

SEQ ID NO: 135683 - RNA, 1701 nt, Artificial Sequence; identical to SEQ ID NO: 130717
  derived and/or modified CDS sequence (opt3) from hemagglutinin__InfluenzaA__AEO01561

SEQ ID NO: 135684 - RNA, 1701 nt, Artificial Sequence; identical to SEQ ID NO: 130717
  derived and/or modified CDS sequence (opt3) from hemagglutinin__InfluenzaA__AEO01562

SEQ ID NO: 135685 - RNA, 1701 nt, Artificial Sequence; identical to SEQ ID NO: 130717
  derived and/or modified CDS sequence (opt3) from hemagglutinin__InfluenzaA__AEO01563

SEQ ID NO: 135686 - RNA, 1701 nt, Artificial Sequence; identical to SEQ ID NO: 130717
  derived and/or modified CDS sequence (opt3) from hemagglutinin__InfluenzaA__AEO01564

SEQ ID NO: 135687 - RNA, 1701 nt, Artificial Sequence; identical to SEQ ID NO: 130717
  derived and/or modified CDS sequence (opt3) from hemagglutinin__InfluenzaA__AEO01565

SEQ ID NO: 135688 - RNA, 1701 nt, Artificial Sequence; identical to SEQ ID NO: 130704
  derived and/or modified CDS sequence (opt3) from hemagglutinin__InfluenzaA__AEO01566

SEQ ID NO: 135689 - RNA, 1701 nt, Artificial Sequence; identical to SEQ ID NO: 130959
  derived and/or modified CDS sequence (opt3) from hemagglutinin__InfluenzaA__AEO01567

SEQ ID NO: 135690 - RNA, 1701 nt, Artificial Sequence; identical to SEQ ID NO: 130899
  derived and/or modified CDS sequence (opt3) from hemagglutinin__InfluenzaA__AEO01568

SEQ ID NO: 135691 - RNA, 1701 nt, Artificial Sequence; identical to SEQ ID NO: 130899
  derived and/or modified CDS sequence (opt3) from hemagglutinin__InfluenzaA__AEO01569

SEQ ID NO: 135692 - RNA, 1701 nt, Artificial Sequence; identical to SEQ ID NO: 130959
  derived and/or modified CDS sequence (opt3) from hemagglutinin__InfluenzaA__AEO01570

SEQ ID NO: 135693 - RNA, 1701 nt, Artificial Sequence; identical to SEQ ID NO: 130899
  derived and/or modified CDS sequence (opt3) from hemagglutinin__InfluenzaA__AEO01571

SEQ ID NO: 135694 - RNA, 1701 nt, Artificial Sequence; identical to SEQ ID NO: 130959
  derived and/or modified CDS sequence (opt3) from hemagglutinin__InfluenzaA__AEO01572

SEQ ID NO: 135695 - RNA, 1701 nt, Artificial Sequence; identical to SEQ ID NO: 130704
  derived and/or modified CDS sequence (opt3) from hemagglutinin__InfluenzaA__AEO01573

SEQ ID NO: 135696 - RNA, 1701 nt, Artificial Sequence; identical to SEQ ID NO: 130717
  derived and/or modified CDS sequence (opt3) from hemagglutinin__InfluenzaA__AEO01574

SEQ ID NO: 135697 - RNA, 1701 nt, Artificial Sequence; identical to SEQ ID NO: 130704
  derived and/or modified CDS sequence (opt3) from hemagglutinin__InfluenzaA__AEO01575

SEQ ID NO: 135698 - RNA, 1701 nt, Artificial Sequence; identical to SEQ ID NO: 130704
  derived and/or modified CDS sequence (opt3) from hemagglutinin__InfluenzaA__AEO01576

SEQ ID NO: 135699 - RNA, 1701 nt, Artificial Sequence; identical to SEQ ID NO: 130704
  derived and/or modified CDS sequence (opt3) from hemagglutinin__InfluenzaA__AEO01577

SEQ ID NO: 135700 - RNA, 1701 nt, Artificial Sequence; identical to SEQ ID NO: 130959
  derived and/or modified CDS sequence (opt3) from hemagglutinin__InfluenzaA__AEO01578

SEQ ID NO: 135701 - RNA, 1701 nt, Artificial Sequence; identical to SEQ ID NO: 130959
  derived and/or modified CDS sequence (opt3) from hemagglutinin__InfluenzaA__AEO01579

SEQ ID NO: 135702 - RNA, 1701 nt, Artificial Sequence; identical to SEQ ID NO: 130704
  derived and/or modified CDS sequence (opt3) from hemagglutinin__InfluenzaA__AEO01581

SEQ ID NO: 135703 - RNA, 1701 nt, Artificial Sequence; identical to SEQ ID NO: 130704
  derived and/or modified CDS sequence (opt3) from hemagglutinin__InfluenzaA__AEO01582

SEQ ID NO: 135704 - RNA, 1701 nt, Artificial Sequence; identical to SEQ ID NO: 130704
  derived and/or modified CDS sequence (opt3) from hemagglutinin__InfluenzaA__AEO01583

SEQ ID NO: 135705 - RNA, 1701 nt, Artificial Sequence; identical to SEQ ID NO: 130704
  derived and/or modified CDS sequence (opt3) from hemagglutinin__InfluenzaA__AEO01584

SEQ ID NO: 135706 - RNA, 1701 nt, Artificial Sequence; identical to SEQ ID NO: 130704
  derived and/or modified CDS sequence (opt3) from hemagglutinin__InfluenzaA__AEO01585

SEQ ID NO: 135707 - RNA, 1701 nt, Artificial Sequence; identical to SEQ ID NO: 130704
  derived and/or modified CDS sequence (opt3) from hemagglutinin__InfluenzaA__AEO01586

SEQ ID NO: 135708 - RNA, 1701 nt, Artificial Sequence; identical to SEQ ID NO: 130704
  derived and/or modified CDS sequence (opt3) from hemagglutinin__InfluenzaA__AEO01587

SEQ ID NO: 135709 - RNA, 1701 nt, Artificial Sequence; identical to SEQ ID NO: 130704
  derived and/or modified CDS sequence (opt3) from hemagglutinin__InfluenzaA__AEO01588

SEQ ID NO: 135710 - RNA, 1701 nt, Artificial Sequence; identical to SEQ ID NO: 130717
  derived and/or modified CDS sequence (opt3) from hemagglutinin__InfluenzaA__AEO01589

SEQ ID NO: 135711 - RNA, 1701 nt, Artificial Sequence; identical to SEQ ID NO: 130717
  derived and/or modified CDS sequence (opt3) from hemagglutinin__InfluenzaA__AEO01590

SEQ ID NO: 135712 - RNA, 1701 nt, Artificial Sequence; identical to SEQ ID NO: 130717
  derived and/or modified CDS sequence (opt3) from hemagglutinin__InfluenzaA__AEO01591

SEQ ID NO: 135713 - RNA, 1701 nt, Artificial Sequence; identical to SEQ ID NO: 130704
  derived and/or modified CDS sequence (opt3) from hemagglutinin__InfluenzaA__AEO01592

SEQ ID NO: 135714 - RNA, 1701 nt, Artificial Sequence; identical to SEQ ID NO: 130717
  derived and/or modified CDS sequence (opt3) from hemagglutinin__InfluenzaA__AEO01593

SEQ ID NO: 135715 - RNA, 1701 nt, Artificial Sequence; identical to SEQ ID NO: 130704
  derived and/or modified CDS sequence (opt3) from hemagglutinin__InfluenzaA__AEO01594

SEQ ID NO: 135716 - RNA, 1701 nt, Artificial Sequence; identical to SEQ ID NO: 130704
  derived and/or modified CDS sequence (opt3) from hemagglutinin__InfluenzaA__AEO01595

SEQ ID NO: 135717 - RNA, 1701 nt, Artificial Sequence; identical to SEQ ID NO: 130897
  derived and/or modified CDS sequence (opt3) from hemagglutinin__InfluenzaA__AEO01596

SEQ ID NO: 135718 - RNA, 1701 nt, Artificial Sequence; identical to SEQ ID NO: 130717
  derived and/or modified CDS sequence (opt3) from hemagglutinin__InfluenzaA__AEO01597

SEQ ID NO: 135719 - RNA, 1701 nt, Artificial Sequence
  derived and/or modified CDS sequence (opt3) from hemagglutinin__InfluenzaA__AEO01598
augaaggccauccuggugguccuccuuuacaccuucgcuacagcaaacgccgacacucugugcauuggcuaucacgcgaauaacagcacggauaccguugacacaguguuggagaaaaauguaacugugacccauuccgucaacuuacuggaagauaagcacaaugggaaacuauguaagcucagaggaguggcuccccugcaucuugguaaaugcaacauagccggcuggauccuggggaauccugagugugaaucuuugucaacagcaaguagcugguccuacauuguugagaccucuucgucagacaacggaacuugcuauccaggcgauuuuaucgacuacgaggagcucagggagcagcugagcaguguguccucuuucgaacgguuugagauguucccgaagacaagcuccuggcccaaucacgauucaaacaauggugucaccgccgcuuguccucaugcaggggccaagaguuuuuauaaaaaccugauuuggcucgugaagaaaggaaauagcuacccaaaguuaucuaaauccuauaucaacgacaagggcaaggaaguacugguucuuuggggcauacaccaccccucaacgagcgcugaucaacagaguuuguaccagaaugccgacgcguacguguucgucgggucuucccgcuauagcaaaaaguuuaaaccugagaucgcaauucgaccaaaggugcgugaucaggagggaagaaugaacuacuauuggacucugguggaacccggugacaaaaucaccuucgaggccacaggcaaccuagucguuccuagguacgcuuuugccauggaacggaaugcagggucgggaauuaucauaucugauacuccagugcaugacugcaacaccacaugucaaaccccgaagggcgcuauuaauacgucccuccccuuccagaacauccacccuauuacuaucgguaaaugcccaaaguauguaaagucaacaaaacugcgccuugccaccgggcugagaaaugugcccaguauccagagcaggggauuguuuggcgcgauugccggcuucauagaagggggauggacugguauggucgacggcugguacggguaucaucaccagaacgaacaaggauccggcuacgcagcugaucucaagucuacacagaaugccaucgacgagauuaccaacaaagugaauagcguuaucgagaagaugaacacgcaguuuaccgcuguggguaaagaguucaaucaccuggaaaagcggauagaaaacuuaaauaagaaagucgaugacggguuccuggauauuuggacauacaacgccgagcuccuugugcuguuggaaaaugagcgcacucuagacuaucaugauucaaacguaaagaaccuguacgagaaaguucgaagucagcucaagaauaacgcaaaagaaaucggcaauggauguuuugaguucuaucacaagugcgacaacaccuguauggaauccgugaagaauggcacauacgauuauccuaaauacagcgaggaagccaagcugaacagagaggagaucgacggggucaaacuugaaucuacuaggauuuaucaaauccuggcuauuuacucaaccguggcgaguagcuugguccucgugguuucccugggagcaauaucuuuuuggaugugcucgaaugguagcuuacagugccggaucuguauuuga

SEQ ID NO: 135720 - RNA, 1701 nt, Artificial Sequence; identical to SEQ ID NO: 130717
  derived and/or modified CDS sequence (opt3) from hemagglutinin__InfluenzaA__AEO01599

SEQ ID NO: 135721 - RNA, 1701 nt, Artificial Sequence; identical to SEQ ID NO: 130717
  derived and/or modified CDS sequence (opt3) from hemagglutinin__InfluenzaA__AEO01600

SEQ ID NO: 135722 - RNA, 1701 nt, Artificial Sequence; identical to SEQ ID NO: 130717
  derived and/or modified CDS sequence (opt3) from hemagglutinin__InfluenzaA__AEO01601

SEQ ID NO: 135723 - RNA, 1701 nt, Artificial Sequence; identical to SEQ ID NO: 130717
  derived and/or modified CDS sequence (opt3) from hemagglutinin__InfluenzaA__AEO01602

SEQ ID NO: 135724 - RNA, 1701 nt, Artificial Sequence; identical to SEQ ID NO: 130717
  derived and/or modified CDS sequence (opt3) from hemagglutinin__InfluenzaA__AEO01603

SEQ ID NO: 135725 - RNA, 1701 nt, Artificial Sequence; identical to SEQ ID NO: 130717
  derived and/or modified CDS sequence (opt3) from hemagglutinin__InfluenzaA__AEO01604

SEQ ID NO: 135726 - RNA, 1701 nt, Artificial Sequence; identical to SEQ ID NO: 130717
  derived and/or modified CDS sequence (opt3) from hemagglutinin__InfluenzaA__AEO01605

SEQ ID NO: 135727 - RNA, 1701 nt, Artificial Sequence
  derived and/or modified CDS sequence (opt3) from hemagglutinin__InfluenzaA__AEO01606
augaaggccauccuggugguccuccuuuacaccuucgcuacagcaaacgccgacacucugugcauuggcuaucacgcgaauaacagcacggauaccguugacacaguguuggagaaaaauguaacugugacccauuccgucaacuuacuggaagauaagcacaaugggaaacuauguaagcucagaggaguggcuccccugcaucuugguaaaugcaacauagccggcuggauccuggggaauccugagugugaaucuuugucaacagcaaguagcugguccuacauuguugagaccucuucgucagacaacggaacuugcuauccaggcgauuuuaucgacuacgaggagcucagggagcagcugagcaguguguccucuuucgaacgguuugagauuuucccgaagacaagcuccuggcccaaucacgauucaaacaagggugucaccgccgcuuguccucaugcaggggccaaaaguuuuuauaagaaucugaucuggcucgugaaaaagggaaacagcuacccaaaauuaucuaaguccuauauaaaugacaagggcaaagaaguacugguucuuuggggcauccaccaccccucaacgagcgcugaucaacagaguuuguaccagaacgccgacgcguacguguucgucgggacuucucgcuauuccaagaaauuuaagccugagauugcaauccgaccaaaagugcgugaucaggagggaagaaugaauuacuauuggacccugguggaacccggugacaagauuacauucgaggccacuggcaaccuagucguuccuagguacgcuuuugccauggaacggaacgcagggagcggaaucauaauuucggauaccccagugcaugacugcaauacaaccugucaaacgccgaaaggcgcuaucaacacuucucuccccuuccagaauauucacccuaucacaaucgguaagugcccaaaguauguaaaauccaccaagcugcgccuugccacugggcugagaaacgugcccucaauucagaguaggggauuguuuggcgcgauagccggcuucaucgaagggggauggacagguauggucgacggcugguacggguaucaucaccagaaugaacaaggaagcggcuacgcagcugaucucaaauccacccagaacgccauugacgagaucacgaauaaggugaacucuguuauagagaaaaugaauacccaguuuacagcuguggguaaggaguucaaccaccuggaaaagcggauugaaaauuuaaacaaaaaggucgaugacggguuccuggauaucuggacuuacaaugccgagcuccuugugcuguuggaaaacgagcgcacccuagacuaucaugauagcaauguuaaaaaccuguacgagaagguaaaaucacagcucaagaacaaugcaaaggaaaucggcaacggauguuuugaguucuaucacaaaugcgacaauacauguauggaaagugugaagaacggcacuuacgauuauccuaaauacuccgaggaagccaagcugaaucgagaggagauugacggggucaaacuugaaagcaccagaaucuaucaaauucuggcuauauacucuacaguggcgucaaguuugguccucgugguuagccugggagcaaucuccuuuuggaugugcucuaacgguucguuacagugcaggauuuguaucuga

SEQ ID NO: 135728 - RNA, 1701 nt, Artificial Sequence; identical to SEQ ID NO: 130959
  derived and/or modified CDS sequence (opt3) from hemagglutinin__InfluenzaA__AEO01607

SEQ ID NO: 135729 - RNA, 1701 nt, Artificial Sequence; identical to SEQ ID NO: 133622
  derived and/or modified CDS sequence (opt3) from hemagglutinin__InfluenzaA__AEO01608

SEQ ID NO: 135730 - RNA, 1701 nt, Artificial Sequence; identical to SEQ ID NO: 135482
  derived and/or modified CDS sequence (opt3) from hemagglutinin__InfluenzaA__AEO01609

SEQ ID NO: 135731 - RNA, 1701 nt, Artificial Sequence
  derived and/or modified CDS sequence (opt3) from hemagglutinin__InfluenzaA__AEO01610
augaaggccauccuggugguccuccuuuacaccuucgcuacaacuaacgcagacacgcugugcauuggcuaucacgccaauaacagcaccgauacaguugacacuguguuggagaagaauguaaccgugacacauuccgucaacuuacuggaagauaagcacaaugggaaacuauguaagcucagaggaguggcgccccugcaucuugguaaaugcaacauagcuggcuggauccuggggaauccugagugugaaucuuugucaaccgccaguagcugguccuacauuguugagacuucuucgucagacaacggaacaugcuauccaggcgauuuuaucgacuacgaggagcucagggagcagcugagcaguguguccucuuucgaacgguuugagauuuucccgaagaccagcuccuggcccaaucacgauucaaacaagggugucacggcagccuguccucaugcuggggcaaaaaguuuuuauaagaaucugaucuggcucgugaaaaagggaaacagcuacccaaaauuaucuaaguccuauauaaaugacaagggcaaagaaguacugguucuuuggggcauccaccaccccucaacuagcgccgaucaacagaguuuguaccagaacgcugacgccuacguguucgucgggaccucucgcuauuccaagaaauuuaagccugagauugcgauccgaccaaaagugcgugaucaggagggaagaaugaauuacuauuggacacugguggaacccggugacaagauuacuuucgaggcaaccggcaaccuagucguuccuagguacgccuuugcuauggaacggaacgccgggagcggaaucauaauuucggauacaccagugcaugacugcaauaccacgugucaaacuccgaaaggcgcaaucaacacaucucuccccuuccagaauauucacccuaucaccaucgguaagugcccaaaguauguaaaauccacuaagcugcgccuugcuacagggcugagaaacgugcccucaauucagaguaggggauuguuuggcgccauagcgggcuucaucgaagggggauggaccgguauggucgacggcugguacggguaucaucaccagaaugaacaaggaagcggcuacgccgcagaucucaaauccacgcagcacgcuauugacgagaucaccaacaagguaaauucuguuauagagaaaaugaacacacaguuuacugccguggguaaggaguucaaucaucuggaaaagcggauugaaaacuuaaauaaaaaggucgaugacggguuccuggauaucuggaccuacaacgcugagcuccuugugcuguuggaaaaugagcgcacacuagacuaucacgauagcaacgugaaaaaucuguacgagaagguucgaucacagcucaaaaacaacgccaaggaaaucggcaauggauguuuugaguucuaucauaagugcgacaacacuuguauggaaagugugaaaaauggcaccuacgauuauccuaaguacuccgaggaagcaaaacugaacagagaggagauugacggggucaaacuugaaagcacaaggaucuaucaaauucuggccauauacucuaccguggcuucaaguuugguccucgugguuagccugggagcgaucuccuuuuggaugugcucuaaugguucguuacagugccggguguguauuuga

SEQ ID NO: 135732 - RNA, 1701 nt, Artificial Sequence
  derived and/or modified CDS sequence (opt3) from hemagglutinin__InfluenzaA__AEO01611
augaaggccauccuggugguccuccuuuacaccuucgcuacagcaaacgccgacacucugugcauuggcuaucacgcgaauaacagcacggauaccguugacacaguguuggagaaaaauguaacugugacccauuccgucaacuuacuggaagauaagcacaaugggaaacuauguaagcucagaggaguggcuccccugcaucuugguaaaugcaacauagccggcuggauccuggggaauccugagugugaaucuuugucaacagcaaguagcugguccuacauuguugagaccucuucgucagacaacggaacuugcuauccaggcgauuuuaucgacuacgaagaacucagggagcagcugagcaguguguccucuuucgaacgguuugagauuuucccgaagacaagcuccuggcccaaucacgauucaaacaagggugucaccgccgcuuguccucaugcaggggccaaaaguuuuuauaagaaucugaucuggcucgugaaaaagggaaacagcuacccaaaauuaucuaaguccuauauaaaugacaagggccgcgaaguacugguucuuuggggcauccaccaccccucaacgagcgcugaucaacagaguuuguaccagaacgccgacgcguacguguucgucgggacuucucgauauuccaaaaaguuuaaaccugagauugcaauccguccaaaggugagagaucaggagggaaggaugaauuacuauuggacccugguggaacccggugacaaaauuacauucgaggccacuggcaaccuagucguuccucgguacgcuuuugccauggaacgcaacgcagggagcggaaucauaauuucggauaccccagugcaugacugcaauacaaccugucaaacgccgaagggcgcuaucaacacuucucuccccuuccagaauauucacccuaucacaaucggugagugcccaaaauauguaaaguccaccaagcugagacuugccacugggcugaggaacgugcccucaauucagagucggggauuguuuggcgcgauagccggcuucaucgaagggggauggacagguauggucgacggcugguacggguaucaucaccagaaugagcaaggaagcggcuacgcagcugaucucaaauccacccagaacgccauugacaagaucacgaauaaagugaacucuguuauagagaagaugaauacccaguuuacagcuguggguaaagaguucaaccaccuggagaagcgcauugaaaauuuaaacaagaaagucgaugacggguuccuggauaucuggacuuacaaugccgagcuccuugugcuguuggaaaacgagcgaacccuagacuaucaugauagcaauguaaagaaccuguacgagaaaguuagaucacagcucaagaacaaugcaaaagaaaucggcaacggauguuuugaguucuaucacaagugcgacaauacauguauggaaagugugaagaacggcacuuacgauuauccuaaauacuccgaggaagccaagcugaauagggaggagauugacggggucaaacuugaaagcacccggaucuaucaaauucuggcuauauacucuacagcggcaucaaguuuggugcucgucgugagccugggagccaucuccuuuuggaugugcucuaacgguucguuacagugccguauuuguaucuga

SEQ ID NO: 135733 - RNA, 1701 nt, Artificial Sequence
  derived and/or modified CDS sequence (opt3) from hemagglutinin__InfluenzaA__AEO01612
augaaggccauccuggugguccuccuuuacaccuucgcuacagcaaacgccgacacucugugcauuggcuaucacgcgaauaacagcacggauaccguugacacaguguuggagaagaauguaacugugacccauuccgucaacuuacuggaagauaagcacaaugggaaacuauguaagcucagaggaguggcuccccugcaucuugguaaaugcaacauagccggcuggauccuggggaauccugagugugaaucuuugucaacagcaaguagcugguccuacauuguugagaccucuucgucagacaacggaacuugcuauccaggcgauuuuaucgacuacgaggagcucagggagcagcugagcaguguguccucuuucgaacgguuugagauuuucccgaagacaagcuccuggcccaaucacgauucaaacaagggugccaccgcugcauguccucaugccggggcuaaaaguuuuuauaagaaucugaucuggcucgucaaaaagggaaacagcuacccaaaauuaucuaaguccuauauaaaugacaagggcaaagaagugcugguacuuuggggcauccaccaccccucaacgagcgccgaucaacagaguuuguaccagaacgcggacgcauacguuuucguggggacuucucgcuauuccaagaaauuuaagccugagauugccauccgaccaaaaguccgugaucaggagggaagaaugaauuacuauuggacccugguggaacccggugacaagauuacauucgaggcuacuggcaaccuaguggucccuagguacgccuuugcaauggaacggaacgcugggagcggaaucauaauuucggauaccccaguucaugacugcaauacaaccugucaaacgccgaaaggcgccaucaacacuucucuccccuuccagaauauucacccuaucacaaucgguaagugcccaaaguaugugaaauccaccaagcugcgccuugcgacugggcugagaaacguacccucaauucagaguaggggauuguuuggcgccauagcaggcuucaucgaagggggauggacagguaugguggacggcugguacggguaucaucaccagaaugaacaaggaagcggcuacgcugccgaucucaaauccacccagaacgcuauugacgagaucacgaauaaggucaacucugugauagagaaaaugaauacccaguuuacagccguugguaaggaguucaaccaccuggaaaagcggauugaaaauuuaaacaaaaagguggaugacggguuccuggauaucuggacuuacaaugcagagcuccuuguccuguuggaaaacgagcgcacccuagacuaucaugauagcaaugugaaaaaccuguacgagaagguacgaucacagcucaaaaacaaugccaaggaaaucggcaacggauguuuugaguucuaucacaagugcgacaauacauguauggaaaguguuaaaaacggcacuuacgauuauccuaaguacuccgaggaagcuaaacugaauagagaggagauugacggggugaaacuugaaagcaccaggaucuaucaaauucuggcgauauacucuacagucgcaucaaguuuggugcucgucgugagccugggagccaucuccuuuuggaugugcucuaacgguucguuacagugccggauuuguaucuga

SEQ ID NO: 135734 - RNA, 1701 nt, Artificial Sequence; identical to SEQ ID NO: 133314
  derived and/or modified CDS sequence (opt3) from hemagglutinin__InfluenzaA__AEO01613

SEQ ID NO: 135735 - RNA, 1701 nt, Artificial Sequence
  derived and/or modified CDS sequence (opt3) from hemagglutinin__InfluenzaA__AEO01614
augaaggccauccuggugguccuccuuuacaccuucgcuacagcaaacgccgacacucugugcauuggcuaucacgcgaauaacagcacggauaccguugacacaguguuggagaaaaauguaacugugacccauuccgucaacuuacuggaagauaagcacaaugggaaacuauguaagcucaaaggaguggcuccccugcaucuugguaagugcaacauagccggcuggauccuggggaauccugagugugaaucuuugucaacagcaaguagcugguccuacauuguugagaccucuucgucagacaacggaacuugcuauccaggcgauuuuaucgacuacgaggagcucagagagcagcugagcaguguguccucuuucgaaagguuugagauuuucccgaagacaagcuccuggcccaaucacgauucaaacaaaggugucaccgccgcuuguccucaugcaggggccaagaguuuuuauaaaaaucugaucuggcucgugaagaaaggaaacagcuacccaaaguuaucuaaguccuauauaaaugacaaaggcaaggaaguacugguucuuuggggcauccaccaccccucaacgagcgcugaucaacagaguuuguaccagaacgccgacgcguacguguucgucgggacuucucgguauuccaaaaaguuuaaaccugagauugcaauccgcccaaaggugcgagaucaggagggacguaugaauuacuauuggacccugguggaacccggugacaaaauuacauucgaggccacuggcaaccuagucguuccuagauacgcuuuugccauggaaaggaacgcagggagcggaaucauaauuucggauaccccagugcaugacugcaauacaaccugucaaacgccgaagggcgcuaucaacacuucucuccccuuccagaauauucacccuaucacaaucgguaagugcccaaaauauguaaaguccaccaaacugcggcuugccacugggcugcgcaacauucccucaauacagaguagaggauuguuuggcgcgaucgccggcuucauugaagggggauggacagguaugguggacggcugguacggguaucaucaccagaaugaacaaggaagcggcuacgcagcugaucucaaguccacccagaacgccaucgacgagauaacgaauaaagucaacucugugauugagaagaugaauacccaguuuacagcuguugguaaggaauuuaaccaccuggagaaaaggaucgaaaauuuaaacaagaaaguggaugacggguuccuggauaucuggacuuacaaugccgagcuccuuguccuguuggaaaacgagcggacccuagacuaucaugauagcaaugugaagaaccuguacgagaaaguacgcucacagcucaagaacaaugcaaaggaaauuggcaacggauguuucgaguucuaucacaaaugcgacaauacauguauggaaaguguuaagaacggcacuuacgauuauccuaaauacuccgaggaagccaagcugaaucgagaggagaucgacggggugaaacuugaaagcaccagaauuuaucaaauacuggcuaucuacucuacagucgcgucaaguuuggugcucgucgugagccugggagcaauuuccuuuuggaugugcucuaacgguucguuacagugcaggaucuguaucuga

SEQ ID NO: 135736 - RNA, 1701 nt, Artificial Sequence
  derived and/or modified CDS sequence (opt3) from hemagglutinin__InfluenzaA__AEO01615
augaaggccauccuggugguccuccuuuacaccuucgcuacagcaaacgccgacacucugugcauuggcuaucacgcgaauaacagcacggauaccguugacacaguguuggagaaaaauguaacugugacccauuccgucaacuuacuggaagauaagcacaaugggaaacuauguaagcucagaggaguggcuccccugcaucuugguaaaugcaacauagccggcuggauccuggggaauccugagugugaaucuuugucaacagcaaguagcugguccuacauuguugagaccucuucgucagacaacggaacuugcuauccaggcgauuuuaucgacuacgaagaacucagggagcagcugagcaguguguccucuuucgaacgguuugagauuuucccgaagacaagcuccuggcccaaucacgauucaaacaagggugucaccgccgcuuguccucaugcaggggccaaaaguuuuuauaagaaucugaucuggcucgugaaaaagggaaacagcuacccaaaauuaucuaaguauuacauaaaugacaagggcaaagaaguacugguucuuuggggcauccaccaccccuccacgucagcugaucaacagagcuuguaccagaacgccgacgcguauguguucgucgggaccagucgcuacucuaagaaauuuaagccugagauugcaauccgaccaaaagugcgugagcaggaaggaagaaugaauuauuacuggacucugguggagcccggugauaagauuacauucgaagccacuggcaaccuagucguuccuagguaugcuuuugccauggagcggaacgcaggguccggaaucauaauuagcgacaccccagugcaugauugcaauacaaccugucaaacgccgaaaggcgcuaucaacacuucgcuccccuuccagaauauucacccuaucacaaucgguaagugcccaaaguacguaaaaucuaccaagcugcgccuugccacugggcugagaaacgugcccuccauucagucaaggggauuguuuggcgcgauagccggcuucaucgaagggggauggacagguauggucgacggcugguauggguaccaucaccagaaugagcaaggaaguggcuacgcagcugaccucaaaagcacccagaacgccauugauaagaucacgaauaaagugaacuccguuauagagaagaugaauacccaguuuacagcuguggguaaggaguucaaccaccuggagaaacggauugaaaauuuaaacaagaaagucgacgauggguuccuggacaucuggacuuauaaugccgagcuccuugugcuguuggaaaacgagcgcacccuagauuaccaugacucuaauguaaagaaccuguaugagaaaguucgaagccagcucaagaacaaugcaaaggaaaucggcaacggauguuuugaguucuaccacaaaugcgauaauacauguauggaaucagugaagaacggcacuuaugacuacccuaaauauagugaggaagccaagcugaauagagaggagauugauggggucaaacuugaauccaccaggaucuaccaaauucuggcuauauacagcacaguggcgucuucauugguccucgugguuagucugggagcaaucagcuuuuggaugugcuccaacgguucuuuacagugccggauuuguaucuga

SEQ ID NO: 135737 - RNA, 1701 nt, Artificial Sequence; identical to SEQ ID NO: 131070
  derived and/or modified CDS sequence (opt3) from hemagglutinin__InfluenzaA__AEO01616

SEQ ID NO: 135738 - RNA, 1701 nt, Artificial Sequence; identical to SEQ ID NO: 131881
  derived and/or modified CDS sequence (opt3) from hemagglutinin__InfluenzaA__AEO01617

SEQ ID NO: 135739 - RNA, 1701 nt, Artificial Sequence; identical to SEQ ID NO: 132314
  derived and/or modified CDS sequence (opt3) from hemagglutinin__InfluenzaA__AEO01619

SEQ ID NO: 135740 - RNA, 1701 nt, Artificial Sequence; identical to SEQ ID NO: 135426
  derived and/or modified CDS sequence (opt3) from hemagglutinin__InfluenzaA__AEO01620

SEQ ID NO: 135741 - RNA, 1701 nt, Artificial Sequence; identical to SEQ ID NO: 135573
  derived and/or modified CDS sequence (opt3) from hemagglutinin__InfluenzaA__AEO01621

SEQ ID NO: 135742 - RNA, 1701 nt, Artificial Sequence
  derived and/or modified CDS sequence (opt3) from hemagglutinin__InfluenzaA__AEO01625
augaagaccaucauugcccugagcuacauacucugccuuguguccgcucagaaacugcccggcaacgacaauucuacagcaacuuuguguuuagggcaccaugccgucccuaacggaacgaucguuaagaccauuacaaaugaucaaaucgaggugacuaacgcgaccgaacugguacagucaaguagcacaggugagauuugcgacuccccacaccaggugcuagauggcgaaaauuguacccucaucgacgcucugcuuggggauccgcagugcgacggauuccaaaacaaaaagugggaucuguuugucgagagaucuaaagccuauucgaauuguuaccccuaugacgugccugauuacgcaucauugaggagccucguugccaguuccggcacucuggaguucaacaaugaaucuuuuaacuggacaggugugacccagaaugggacgagcuccgcuugcauacggcgcucaaacaauaguuucuuuagccgacugaacuggcucacucauucuaaguucaaguauccagcauuaaaugucaccaugcccaacaacgaggaauuugacaaacuguacaucuggggagugcaccauccuggcacagauaaugaccagauuuuccuuuaugcccaggcuuccggccguaucacuguaucaaccaagagaagccaacagacaguuauuccaaacaucgggaguaggccccgggugcgcaauauaccuucuagaauuuccaucuacuggaccauugucaaaccaggagauaucuugcugaucaacagcacggguaaucuaauugccccgaggggcuacuuuaagauacggucggggaaaucuuccaucaugcgcucagacgcgcccauuggaaaguguaacagugagugcaucacuccuaauggcagcauaccaaacgacaagcccuuccagaaugugaaccgaauuacauauggugcauguccuagauacgugaaacagaauacccucaagcuggccacugggaugaggaacgucccagaaaaacaaacacggggaaucuuuggcgcuaucgccggcuucauugagaaugggugggagggaaugguugaugguugguauggcuuucgucaccagaacuccgaagggaucggacaggcagcugaccuuaagucuacccaagccgcgauugaucagauaaauggcaaacugaaccgcuugaucgguaagacgaacgagaaauuccaccagauugaaaaggaguucagcgaaguggaggggagaauccaggaccucgagaaguacguagaagauaccaaaaucgaccuguggucauauaaugccgaguuacugguggcacucgaaaaccaacauacaauugaucuuacugacagugagaugaauaagcuguuugaaaagaccaagaaacaguugagggagaacgcugaggauaugggcaauggaugcuucaagauauaccacaagugugacaacgccugcaucggcuccauucggaaugggacauaugaucaugaagucuaccgagacgaggcucuaaacaaucgcuuucagaucaaaggaguggaacugaaaagcgguuacaaagacuggauucucuggaucucuuucgccauaucaugcuuucugcuuuguguugcacuguugggcuucaucaugugggccugccagaaggggaacauuagauguaauaucugcauuuga

SEQ ID NO: 135743 - RNA, 1701 nt, Artificial Sequence
  derived and/or modified CDS sequence (opt3) from hemagglutinin__InfluenzaA__AEO01636
augaaaagcaucauugcccuguccuacauacucugccuugugucugcucagaaacugcccggcaacgacaauucaaccgcaacauuguguuuagggcaccaugccgucccuaacggaacuaucguuaagacgauuaccaaugaucaaaucgaggugacaaacgcgacugaacugguacagaguagcuccaccggugagauuugcgacucuccacaccaggugcuagauggcgaaaauuguacacucaucgacgcucugcuuggggauccgcagugcgacggauuccaaaacaaaaagugggaucuguuugucgagagaucgaaagccuauucaaauuguuaccccuaugacgugccugauuacgccagcuugaggagucucguugcauccucuggcacccuggaauuuaacaaugagagcuucaacuggacuggugugacacagaaugggaccuccucagcuugcauacggcgcaguaacaauagcuucuuuucucgacugaacuggcucacgcauuccaaguucaaguauccagcauuaaaugucacuaugcccaacaacgaggaauuugacaaacuguacaucuggggagugcaccauccuggcaccgauaaugaccagauuuuccuuuaugcccaggcuucaggccguaucacaguaagcacuaagagaagucaacagaccguuauuccaaacaucgggucuaggccccgggugcgcaauauaccuuccagaauuagcaucuacuggacaauugucaaaccaggagauaucuugcugaucaacucgaccgguaaucuaauugccccgaggggcuacuuuaagauacggucugggaaauccucaaucaugcgcagugacgcgcccauuggaaaguguaacagcgagugcaucacgccuaauggcuccauaccaaacgacaagcccuuccagaaugugaaccgaauuacuuauggugcauguccuagauacgugaaacagaauacacucaagcuggccaccgggaugaggaacgucccagaaaaacaaacucggggaaucuuuggcgcuaucgccggcuucauugagaaugggugggagggaaugguugaugguugguauggcuuucgucaccagaacucugaagggaucggacaggcagcugaccuuaagagcacacaagccgcgauugaucagauaaauggcaaacugaaccgcuugaucgguaagaccaacgagaaauuccaccagauugaaaaggaguucucagaaguggaggggagaauccaggaccucgagaaguacguagaagauacgaaaaucgaccuguggaguuauaaugccgaguuacugguggcacucgaaaaccaacauaccauugaucuuacagacuccgagaugaauaagcuguuugaaaagacuaagaaacaguugagggagaacgcugaggauaugggcaauggaugcuucaagauauaccacaagugugacaacgccugcaucggcagcauucggaaugggaccuaugaucaugacgucuaccgagacgaagcucuaaacaaucgcuuucagaucaaaggaguggagcugaagucugguuacaaagauuggauucucuggaucucauucgccauaaguugcuuucugcuuuguguugcacuguugggcuucaucaugugggccugccagaaggggaacauuagauguaauaucugcauuuga

SEQ ID NO: 135744 - RNA, 1701 nt, Artificial Sequence
  derived and/or modified CDS sequence (opt3) from hemagglutinin__InfluenzaA__AEO01642
augaagaccaucauugcccugagcuacauacucugccuuguguccgcucagaaacugcccggcaacgacaauucuacagcaacuuuguguuuagggcaccaugccgucccuaacggaacgaucguuaagaccauuacaaaugaucaaaucgaggugacuaacgcgaccgaacugguacagucaaguagcacaggugagauuugcaauuccccacaccagauccuagacggcgaaaacuguacccucauagaugcucugcuuggggacccgcagugcgauggauuccaaaauaaaaagugggaccuguuuguggagagaucuaaagccuauucgaacuguuaccccuaugaugucccugacuacgcaucauugaggagccucguggccaguuccggcacucuggaguucaauaacgaaucuuuuaauuggacagguguuacccagaacgggacgagcuccgcuugcauccggcgcucaaauaacaguuucuuuagccgacugaauuggcucacucauuuaaaguucaaguauccagcacugaacgugaccaugcccaacaaugaggaauuugauaaacuuuacauuuggggaguccaccauccuggcacagacaacgaucagaucuucuuguaugcccaggcuucuggccguauuacuguguccaccaagagaucacaacagacaguaaucccaaauauagggagcaggccccggguucgcaacauuccuaguagaaucucuauuuacuggaccaucgugaaaccaggagacauccugcuaauuaauuccacggguaaccucauagccccgaggggcuacuuuaagauccggagcgggaaaucgucuauuaugcgcuccgaugcgcccaucggaaaguguaauucaaagugcauaacuccuaacggcaguauuccaaaugacaaacccuuccagaacgucaaucgagugacauauggugcauguccuagauacgugaagcagaacacccugaaacuugccacugggaugaggaaugucccagagaagcaaacacggggaaucuuuggcgcuaucgccggcuucauugaaaacgggugggagggaaugguugacgguugguauggcuuucgucaccagaauagcgaggggaucggacaggcagcugaucugaaauccacccaagccgcgauugaccagauaaacggcaaguugaaccgccucaucgguaaaacgaaugaaaaguuccaccagauugagaaggaguucucugaaguggaagggagaauccaggaucuggagaaauacguagaggacaccaagaucgauuuauggagcuauaacgccgaacugcucguggcacuugagaaucaacauacaauugaccugacugauucagaaaugaacaaauuguuugagaagaccaaaaagcagcuaagggaaaaugcugaggacaugggcaacggaugcuucaagauauaccacaaaugugauaaugccugcaucggcaguauucggaacgggacauaugaccaugaugucuaccgagacgaggcucugaauaaccgcuuucagaucaagggaguggaacucaaauccgguuacaaggacuggauucuguggaucagcuucgccauaucuugcuuucuucuguguguugcauugcucggcuucaucaugugggccugccagaaagggaauauuagauguaacaucugcauuuga

SEQ ID NO: 135745 - RNA, 1698 nt, Artificial Sequence
  derived and/or modified CDS sequence (opt3) from hemagglutinin__InfluenzaA__AEO01663
augaaggugaaacugcucguccuucugugcaccuucgccgcuacauacgcagacacuaucuguauuggcuaucacgccaacaauagcacggauaccguugacacaguguuggagaagaacguaacugugacccauuccgucaauuuacuggaaaacucucacaaugggaaacuaugccuccugaagggaauagcgccccuucagcuggguaacuguucaguggcuggcuggaucuuggggaauccugagugcgaacuccugauuaguaaagagagcugguccuacaucguugaaaagccaaacccggagaauggaacauguuaucccggccauuuugccgauuacgaggaacugagagagcaacucucuucggugagcucauucgaaagguuugagauuuucccuaaggagaguuccuggccaaaccacaccgucacuggugugucugcaagcugcucccauaauggggaaucaaguuuuuaucggaacuuacuguggcuuacaggcaaaaauggauuguaccccaaccugagcaagucuuaugccaauaacaaagagaaggaaguucuaguacucuggggcgugcaccacccuccaaacaucggggaccagaaagcucuguaccauaccgagaaugcauacgucuccguggugucaagccacuauagucgcaaguucacgcccgaaauagccaagcgaccuaaaguccgugaucaggagggaagaaucaacuacuauuggacucuucuggagccaggugacaccauuaucuuugaagcuaauggcaacuugagggccccgcgguacgcguucgcacucucucgcggguuuggauccggcauuaucaauagcaacgcccccauggauaagugugacgcuaaaugccagacaccucaaggugccauaaauucgucucugccauuccagaacguucaucccgugccuauuggggaguguccaaaguauguaagauccgcaaaauuaaggauggugacuggacugcggaauauccccucaauucagagucgcggccucuuuggcgcuaucgccggguucaucgaaggagguuggaccggcauggucgaugggugguacggauaucaccaccagaacgagcaaggcagcgguuacgcggccgaccagaaguccacacagaaugcaauuaacgggauaaccaauaaagugaacucuguuaucgaaaagaugaauacgcaguuuacugcugugggcaaggaguucaacaaacuugagcgaagaauggaaaaccugaauaagaaagucgaugacggauucauugauaucuggacauacaacgccgaguugcuagugcugcucgaaaaugagaggacccuggacuuucaugacagcaacguaaagaaucuuuaugaaaaaguuaagucacaacugaagaacaaugcuaaagagauaggcaacgggugcuucgaguuuuaccacaaguguaaugaugaaugcauggagagugugaaaaacggaacuuaugacuacccgaaguauuccgaagagagcaaauugaaucgggagaagauugaugguguccgucucgaaucuaugggcguguaccagauccuggccaucuauucaacagucgcaaguagcuuagugcugcuaguuucccucggggccauuucuuucuggaugugcucgaacggaagccugcagugucgcaucugcauuuga

SEQ ID NO: 135746 - RNA, 1698 nt, Artificial Sequence
  derived and/or modified CDS sequence (opt3) from hemagglutinin__InfluenzaA__AEO01674
augaaggugaaacugcucguccuucugugcaccuucacagccacuuacgcugacacgaucuguauuggcuaucacgcaaacaauagcaccgauacaguugacacuguguuggagaagaacguaaccgugacacauuccgucaauuuacuggaaaacucucacaaugggaaacuaugccuccugaagggaauagcgccccuucagcuggguaacuguucaguggccggcuggaucuuggggaauccugagugcgaacuccugauuaguaaagagagcugguccuacaucguugaaaagccaaacccggagaauggaaccuguuaucccggccauuuugcugauuacgaggaacugagagagcaacucucuucggugagcucauucgaaagguuugagauuuucccuaaggagaguuccuggccaaaccacacugucacaggugugucugccagcugcucccauaauggggaaucaaguuuuuaucggaacuuacuguggcuuaccggcaaaaauggauuguaccccaaccugagcaagucuuaugcaaauaacaaagagaaggaagugcuaguucucuggggcgugcaccacccuccaaacaucggggaccagaaagcccuguaccauacggagaaugcuuacgucuccguggugucaagccacuauagucgcaaguucacucccgaaauagcaaagcgaccuaaaguccgugaucaggagggaagaaucaacuacuauuggacccuucuggagccaggugacacaauuaucuuugaagccaaugagaacuugaaggcuccgagguacgccuucgcgcucucucggggcuuuggguccggaauuaucaauagcaaagcacccauggauaagugugacgccaaaugccagacuccucaaggcgcuauaaacucgucucugccauuccagaauguucaucccgugaccauuggugaauguccuaaguauguacgcuccgccaaauuaagaauggugacagggcugaggaacaucccaucaauucagagucggggacucuuuggcgcaaucgcuggcuucaucgaagggggauggaccgguauggucgauggcugguacggguaucaccaccagaaugaacaaggaagcggcuacgccgcggaccagaaguccacgcagaacgccauuaaugguauaacuaacaagguaaauucuguuaucgagaaaaugaacacacaguuuaccgcaguggggaaggaguucaauaaacuugaacgccgaauggagaaccugaacaagaaagucgaugacggcuucauugauaucuggacuuacaaugcugaauugcuagugcugcucgagaacgaaagaacacuggacuuucaugacagcaauguaaagaaccuuuaugagaagguuaaaucacaacugaagaauaacgccaaagagauaggaaauggcugcuucgaauuuuaccacaaguguaacgaugagugcauggaaagugugaaaaaugggaccuaugacuaccccaaguauuccgaggagagcaaguugaacagggagaaaauugauggaguccggcucgagucuauggguguguaccagauccuggcuaucuauucaacggucgccaguagcuuagugcugcuaguuucccucggcgcaauuucuuucuggaugugcucgaaugggagccugcagugucguaucugcauuuga

SEQ ID NO: 135747 - RNA, 1701 nt, Artificial Sequence; identical to SEQ ID NO: 135742
  derived and/or modified CDS sequence (opt3) from hemagglutinin__InfluenzaA__AEO01691

SEQ ID NO: 135748 - RNA, 1698 nt, Artificial Sequence
  derived and/or modified CDS sequence (opt3) from hemagglutinin__InfluenzaA__AEO01699
augaaggugaaacugcucguccuucugugcaccuucacagccacuuacgcugacacgaucuguauuggcuaucacgcaaacaauagcaccgauacaguugacacuguguuggagaagaacguaaccgugacacauuccgucaauuuacuggaaaacucucacaaugggaaacuaugccuccugaagggaauagcgccccuucagcuggguaacuguucaguggccggcuggaucuuggggaauccugagugcgaacuccugauuaguaaagagagcugguccuacaucguugaaaagccaaacccggagaauggaaccuguuaucccggccauuuugcugauuacgaggaacugagagagcaacucucuucggugagcucauucgaaagguuugagauuuucccuaaggagaguuccuggccaaaccacacugucacaggugugucugccagcugcucccauaauggggaaucaaguuuuuaucggaacuuacuguggcuuaccggcaaaaauggauuguaccccaaccugagcaagucuuaugcaaauaacaaagagaaggaaguucuaguacucuggggcgugcaccacccuccaaacaucggggaccagaaagcccuguaccauacggagaaugcuuacgucuccguggugucaagccacuauagucgcaaguucacucccgaaauagcaaagcgaccuaaaguccgugaucaggagggaagaaucaacuacuauuggacccuucuggagccaagggacacaauuaucuuugaagccaaugguaacuugauugcuccgcgguacgccuucgcgcucucucgcggcuuuggguccggaaucauaaauagcaacgcacccauggauaagugugacgccaaaugccagacuccucaaggcgcuauuaauucgucucugccauuccagaacguucaucccgugaccaucggugaguguccuaaguauguaagauccgccaaauuaaggauggugacagggcugcggaauauuccaucaauccccagucgcggacucuuuggcgcaaucgcuggcuucauugaagggggauggaccgguauggucgauggcugguacggguaucaccaccagaacgagcagggaagcggcuacgccgcggaccaaaaguccacgcagaaugccauaaacgguaucacuaauaaagugaacucuguuauugaaaagaugaauacacaguuuaccgcaguggggaaggaguucaacaaacuugagcgaagaauggaaaaccugaauaagaaagucgaugacggcuucaucgauauauggacuuacaacgcugaguugcuagugcugcucgaaaaugagaggacacuggacuuucaugacagcaacguaaagaaucuuuaugaaaaaguuaagucacagcugaagaacaaugccaaagagauuggaaacggcugcuucgaguuuuaccacaaguguaaugaugaaugcauggagagugugaaaaacgggaccuaugacuacccgaaguauuccgaagagagcaaauugaaucgggagaagaucgauggagucaagcucgaaucuaugggugcuuaccaaauccuggccauuuauucaacgggcgcaaguagcuuagugcugcuagucucccucggggccaucucuuucuggaugugcucgaacggaagccugcagcgucgcauuuguauauga

SEQ ID NO: 135749 - RNA, 1698 nt, Artificial Sequence
  derived and/or modified CDS sequence (opt3) from hemagglutinin__InfluenzaA__AEO01709
augaaggugaaacugcucguccuucugugcaccuucacagccacuuacgcugacacgaucuguauuggcuaucacgcaaacaauagcaccgauacaguugacacuguguuggagaagaacguaaccgugacacauuccgucaauuuacuggaaaacucucacaaugggaaacuaugccuccugaagggaauagcgccccuucagcuggguaacuguucaguggccggcuggaucuuggggaauccugagugcgaacuccugauuaguaaagagagcugguccuacaucguugaaaagccaaacccggagaauggaaccuguuaucccggccauuuugcugauuacgaggaacugagagagcaacucucuucggugagcucauucgaaagguuugagauuuucccuaaggagaguuccuggccaaaccacacugucacaggugugucugccagcugcucccauaauggggaaucaaguuuuuaucggaacuuacuguggcuuaccggcaaaaauggauuguaccccaaccugagcaagucuuaugcaaauaacaaagagaaggaaguucuaguacucuggggcgugcaccacccuccaaacaucggggaccagaaagcccuguaccauacggagaaugcuuacgucuccguggugucaagccacuauagucgcaaguucacucccgaaauagcaaagcgaccuaaacuucgugaucaggacggaagaaucaacuacuauuggacccuguuggagccaggugauacaacuauuuuugaggccaauggcaaccucaucgcuccgagguacgccuucgcgcugucucggggguuuggauccggcauuaucaauagcaacgcacccauggacaagugugaugccaaaugccagaccccucaaggugcuauaaauucgucuuuaccauuccagaacguccaucccguuacaauuggggaauguccuaaguaugugcgcuccgccaaacugagaaugguaaccggacucaggaauaucccaucaauucagagucggggccuuuuuggcgcaaucgcuggguucaucgagggagguuggacgggcaugguggacgggugguacggauaucaccaccagaacgaacaaggcagcgguuacgccgcggaucagaaguccacucagaaugccauuaacgggauaacaaauaaagucaacucugugaucgagaagaugaauacccaguuuacugcaguuggcaaggaguucaacaaacuggaacgccgaauggagaacuugaauaagaaaguggacgauggauucauugacaucuggacauacaacgcugaacuacugguccuccuggagaaugaaagaacccuugacuuucaugauagcaacgugaagaaucuguaugagaaaguaaagucacaauugaagaacaaugccaaagaaauaggcaacgggugcuucgagcucuaccugaaguguaauggagagugcauggaaaguguuaaaaacgguacguaugacuaccccaaguauuccgaggaaagcaaauuaaauagggagaagauugauggcgugaagcuggagucuaugggggucuaccagauccuagcuaucuauucaaccguggccaguagccucguccugcuuguguccuugggagcaauuucuuuuuggaugugcucgaacggcagccugcagugucggaucugcauuuga

SEQ ID NO: 135750 - RNA, 1701 nt, Artificial Sequence; identical to SEQ ID NO: 131881
  derived and/or modified CDS sequence (opt3) from hemagglutinin__InfluenzaA__AEO37530

SEQ ID NO: 135751 - RNA, 1701 nt, Artificial Sequence
  derived and/or modified CDS sequence (opt3) from hemagglutinin__InfluenzaA__AEO72176
augaaggccauccuggugguccuccuuuacaccuucgcuacagcaaacgccgacacucugugcauuggcuaucacgcgaauaacagcacggauaccguugacacaguguuggagaaaaauguaacugugacccauuccgucaacuuacuggaagauaagcacaaugggaaacuauguaagcucagaggaguggcuccccugcaucuugguaaaugcaacauagccggcuggauccuggggaauccugagugugaaucuuugucaacagcaaguagcugguccuacauuguugagaccucuucgucagacaacggaacuugcuauccaggcgauuuuaucgacuacgaggagcucagggagcagcugagcaguguguccucuuucgaacgguuugagauuuucccgaagacaagcuccuggcccaaucacgauucaaacaagggugucaccgccgcuuguccucaugcaggggccaaaaguuuuuauaagaaucugaucuggcucgugaaaaagggaaacagcuacccaaaauuaucuaaguccuauauaaaugacaagggcaaagaaguacugguucuuuggggcauccaccaccccucaacgacugcugaucaacagagcuuguaccagaacgccgacaccuacguguucgucgggacaagucgcuauucuaagaaauuuaagccugagauugcgauccgaccaaaagugcgugaucaggagggaagaaugaauuacuauuggacucugguggaacccggugacaagauuaccuucgaggcaacaggcaaccuagucguuccuagguacgccuuugcuauggaacggaacgccggguccggaaucauaauuagcgauaccccagugcaugacugcaauacgacuugucaaacaccgaaaggcgcaaucaacaccucgcuccccuuccagaauauucacccuaucacuaucgguaagugcccaaaguauguaaaaucuacaaagcugcgccuugcuaccgggcugagaaacgugcccuccauucagucaaggggauuguuuggcgccauagcgggcuucaucgaagggggauggacggguauggucgacggcugguacggguaucaucaccagaaugaacaaggaaguggcuacgccgcagaucucaaaagcacccagaacgcuauugacaagaucacaaauaaagugaacuccguuauagagaagaugaauacucaguuuaccgccguggguaaggaguucaaccaccuggaaaaacggauugagaauuuaaacaagaaagucgaugacggguuccuggauaucuggacauacaaugcugaacuccuugugcuguuggagaacgaacgcacucuagacuaucaugauucuaauguaaagaaccuguacgagaaaguucgaaaccagcucaagaauaacgccaaggagaucggcaauggauguuuugaguucuaucacaaaugcgacaacaccuguauggaaagcgugaagaauggcacauacgauuauccuaaauacucagaagaggcaaagcugaacagagaagagauugacggggucaaacuugagaguaccaggaucuaucaaauucuggccauauacuccacuguggcuagcucuuugguccucgcggugucacugggagcaaucaguuuuuggaugugcagcaaugguuccuuacagugccggauuuguaucuga

SEQ ID NO: 135752 - RNA, 1704 nt, Artificial Sequence
  derived and/or modified CDS sequence (opt3) from hemagglutinin__InfluenzaA__AEO88980
auggagaagaucgugcugcuccuugccauugucagccugguuaaauccgaccagauaugcaucggcuaccacgcuaacaauucuaccgaacaaguggauacaauuauggagaagaacguaacugugacgcaugcacaggacaucuuggaaaagacccacaaugggaaguuaugugaucuggacggagucaaaccccuaauucucagagauugcucaguggccgguuggcugcuuggcaacccuaugugugacgaguucaucaauguuccagaauggaguuauauaguggagaaggcgaacccggcuaaugaucugugcuaccccgggaacuuuaaugacuaugaggaauugaagcaucuccugagcaggaucaaccacuucgagaaaauucagaucauuccuaaguccucuuggucggaucaugaagccucaagcggagucaguuccgcauguccauaccagggcacacccagcuuuuuccggaaugugguauggcugaucaaaaagaacaauacuuauccuaccauaaaacgcagcuacaacaauacaaaccaagaggaccucuuaauucugugggguauccaccacuccaacgaugccgcugagcagaccaaacuuuaucagaauccaacuacauacauuucaguugggaccaguacguugaaccagcgacuggugcccaagaucgcaacucguagcaaagucaauggacaaucuggcagaauggacuuuuucuggaccauccuaaagccuaacgaugccauuaauuuugaauccaacggcaauuucauagcuccagaguacgccuauaaaaucgugaagaaaggggacucagcgauuaugaagucugaaguggaguacggaaacugcaauacaaaaugucagacuccgaucggugcaauaaacaguucuaugcccuuucauaauauucacccucucaccaucggcgaaugcccaaaguaugucaaguccaacaaacugguucuugccacagggcugaggaauagccccuugcgggagcgcagaaggaagcggggacucuucggcgcuaucgccgguuuuauugaagggggauggcagggcaugguggacggcugguacggguaucaucacucgaacgaacagggaucugguuacgcagcugauaaagaguccacccaaaaggccaucgacggcguaacgaauaaagugaacucaauuauagauaagaugaacacucaguucgaagcggucgggcgcgaguuuaauaaccuggaacgaagaaucgagaauuuaaacaagaaaauggaggacggauuccuggauguguggacauauaaugccgaacuccuuguucugauggagaacgaaaggaccuuggacuuccacgauaguaaugugaagaaccuauacgacaaaguccggcugcagcuccgugauaaugcaaaggagcugggcaacgguuguuuugaguucuaccauaaaugcgacaaugaguguauggagagcgugcgcaacgggacuuaugauuacccucaauauuccgaagaggcuagacuuaagagggaagagauuucuggcguaaagcuggagagcaucggaacauaccagaucuugucaauuuauaguaccguugccuccagccucgcucuggccauaaugguggcaggcuuaucucuguggaugugcucaaaugggagucuacagugccggaucuguauuuga

SEQ ID NO: 135753 - RNA, 1704 nt, Artificial Sequence
  derived and/or modified CDS sequence (opt3) from hemagglutinin__InfluenzaA__AEO89021
auggagaagaucgugcugcuccuugccauugucagccugguuaaauccgaccagauaugcaucggcuaccacgcuaacaauucuaccgaacaaguggauacaauuauggagaagaacguaacugugacgcaugcacaggacaucuuggagaaaacccacaaugggaaguuaugugaucuggacggagucaaaccccuaauucucagagauugcucaguggccgguuggcugcuuggcaacccuaugugugacgaguucaucaauguuccagaauggaguuauauaguggagaaggcgaacccggcuaaugaucugugcuaccccgggaacuuuaaugacuaugaggaauugaagcaucuccugagcaggaucaaccacuucgagaaaauuccuaucauuccaaaguccucuuggucggaucaugaagccucaagcggagucaguuccgcaugucccuaccagggcacaccuagcuuuuuccggaaugugguauggcugaucaaaaagaacaauacuuauccaaccauaaaacgcagcuacaacaauacaaaccaggaggaccucuuaauucugugggguauccaccacuccaacaaugccgcugagcaaaccaagcuauaucagaaccccacuacauacauuucaguugggaccaguacguugaaucugcgacuugugccuaagaucgcaacucguagcaaagucaacggacagucuggcagaauggauuucuucuggaccauccucaagccaaaugacgccauuaacuuugaauccaauggcaacuucauagcuccggaguacgccuauaaaaucgugaagaaaggggauucagcgauuaugaagucugaaguggaguacggaaauugcaacacaaaaugucagacucccaucggugcaauaaauaguucuaugccuuuucauaacauucacccacugaccaucggcgaaugccccaaguaugucaaguccaauaaacuuguucuggccacaggguugaggaacagcccucuccgggagcgcagaaggaagcggggacuguucggcgcuaucgccgguuuuauugaagggggauggcaaggcaugguggacggcugguacggguaucaucacucgaaugaacagggaucugguuacgcagcugacaaagaguccacccagaaggccaucgauggcguaacgaacaaagugaacucaauuauagacaagaugaauacucaguucgaagcggucgggcgcgaguuuaacaauuuagaacgaagaaucgagaaccugaauaagaaaauggaggauggauuccucgacguguggacauauaacgccgaacuucugguuuugauggagaaugaaaggacccuagauuuccacgacaguaacgugaagaaucuguacgauaaaguccggcuccaacugcgugacaacgcaaaggagcuuggcaaugguuguuuugaauuuuaccauaaaugcgauaacgaguguauggagagcgugcgcaaugggacuuaugacuacccacaguauuccgaagaggcuagacugaagagggaagagauuucuggcguaaaguuggagagcaucggaacauaccagauccucucaauuuauaguaccguugccuccagccuggcuuuagccauaaugguggcaggccugucucuauggaugugcucaaacgggagucuccaaugccggaucuguauuuga

SEQ ID NO: 135754 - RNA, 1704 nt, Artificial Sequence
  derived and/or modified CDS sequence (opt3) from hemagglutinin__InfluenzaA__AEO89030
auggagaagaucgugcugcuccuugccauugucagccugguuaaauccgaccagauaugcaucggcuaccacgcuaacaauucuaccgaacaaguggauacaauuauggagaagaacguaacugugacgcaugcacaggacaucuuggaaaagacccacaaugggaaguuaugugaucuggacggagucaaaccccuaauucucagagauugcucaguggccgguuggcugcuuggcaacccuaugugugacgaguucaucaauguuccagaauggaguuauauaguggagaaggcgaacccggcuaaugaucugugcuaccccgggaacuuuaaugacuaugaggaauugaagcaucuccugagcaggaucaaccacuucgagaaaauucagaucauuccuaaguccucuuggucggaucaugaagccucaagcggagucaguuccguguguccauaccagggcacacccagcuuuuuccggaauguaguuuggcugaucaaaaagaacaauacuuauccuaccauaaaacgcagcuacaacaauacaaaccaagaggaccucuuaauucugugggguauccaccacuccaacgaugcagccgagcagaccaaacuuuaucagaauccaacuacauacauuucaguggggaccaguacguugaaccagcgacugguccccaagaucgcuacucguagcaaagugaauggacaaucuggcagaauggacuuuuucuggaccgugcuaaagccuaacgaugcaaucaauuuugaauccaacggcaauuucauugccccagaguacgcuuauaaaauagucaagaaaggggacucagccaucaugaagucugaaguugaguacggaaacugcaauacaaaaugucagacuccgauuggugcgaucaacaguucuaugcccuuucauaauauacacccucucaccauuggcgaaugcccaaaguaugugaaguccaacaaacugguacuugcaacagggcugaggaauagccccuugcgggagcgcagaaggaagcggggacucuucggcgccaucgcugguuuuaucgaagggggauggcagggcaugguggacggcugguacggguaucaucacucgaacgaacagggaucugguuacgccgcagauaaagaguccacccaaaaggcuauugacggcgucacgaauaaagugaacucaaucauugauaagaugaacacucaguucgaagccguugggcgcgaguuuaauaaccuggaacgaagaauagagaauuuaaacaagaaaauggaggacggauuccuggauguguggacauauaaugcggaacuccuuguccugauggagaacgaaaggaccuuggacuuccacgauaguaaugugaagaaccuauacgacaaaguacggcugcagcuccgugauaaugccaaggagcugggcaacgguuguuuugaguucuaccauaaaugcgacaaugaguguauggagagcguucgcaacgggacuuaugauuacccucaauauuccgaagaggcaagacuuaagagggaagagaucucuggcgugaagcuggagagcauuggaacauaccagaucuugucaaucuauaguaccgucgcuuccagccucgcccuggcuauuaugguggccggcuuaucucuguggaugugcucaaaugggagucuacagugccggauauguaucuga

SEQ ID NO: 135755 - RNA, 1704 nt, Artificial Sequence
  derived and/or modified CDS sequence (opt3) from hemagglutinin__InfluenzaA__AEO89048
auggagaagaucguguuccugcucgccauugucagccuuguuaaauccgaccagauaugcaucggcuaccacgcuaacaauucuaccgaacaaguggauacaauuauggagaagaacguaacugugacgcaugcacaggacauccuggagaaaacccacaaugggaaguugugugauuuagacggagucaaaccccugauucuaagagauugcucaguggccgguuggcuccugggcaacccuaugugugacgaguuuaucaauguuccagaauggaguuauauaguggagaaggcgaacccggcuaaugaucuuugcuaccccgggaacuucaaugacuaugaggaacugaagcauuugcucagcaggaucaaccacuuugagaaaauucagaucauuccuaaguccucuuggucggaucaugaagccucaagcggagucaguuccgcauguccauaccagggcacacccucuuucuuucggaaugugaucuggcugauuaaaaagaacaauacuuauccuaccauaaaacgcagcuacaacaauacaaaccaagaggaccugcucaucuuaugggguauucaccacuccaacgaugccgcugagcagaccaagcuguaucagaauccaacuacauacaucucaguagggaccaguacgcuuaaccagcgauugguucccaagaucgcaacucguagcaaagugaauggacaaucuggcagaauggacuucuuuuggaccauucugaagccuaacgaugccauaaauuucgaauccaacggcaauuuuaucgcuccagaguacgccuauaaaauugucaagaaaggggacucagcgauccuaaagagcgaaguggaguacggaaacugcaauacaaaaugucagacuccgauaggugcaauuaacaguucuaugcccuuccauaauauccacccucucaccaucggcgaaugcccaaaguaugugaaguccaacaaacugguccuugccacagggcugaggaauagccccuugcgggagcgcagaaggaagcggggacucuuuggcgcuauugccgguuucaucgaagggggauggcagggcaugguugacggcugguacggguaucaucacucgaacgaacagggaucugguuacgcagcugauaaagaguccacccaaaaggccauugacggcgugacgaauaaaguaaacucaauaaucgauaagaugaacacucaguuugaagcgguggggcgcgaguucaauaaccuggaacgaagaauugagaauuuaaacaagaaaauggaggacggauuccuggaugucuggacauauaaugccgaacuccuugugcugauggagaacgaaaggaccuuggacuuucacgauaguaauguuaagaaccuauacgacaaagugcggcugcagcuccgugauaaugcaaaggagcugggcaacgguuguuucgaauuuuaccauaaaugcgacaaugaguguauggagagcguccgcaacgggacuuaugauuacccucaauauuccgaagaggcuagacuuaagagggaagagaucucuggcgugaagcuggagagcaucggaacauaccagauuuugucaauauauaguaccguagccuccagccucgcucuggccaucaugguugcaggcuuaucucuguggaugugcucaaaugggagucuacagugccggauuuguaucuga

SEQ ID NO: 135756 - RNA, 1704 nt, Artificial Sequence
  derived and/or modified CDS sequence (opt3) from hemagglutinin__InfluenzaA__AEO89065
auggagaagaucgugcugcuccuugccauugucagccugguuaaauccgaccagauaugcaucggcuaccacgcuaacaauucuaccgaacaaguggauacaauuauggagaagaacguaacugugacgcaugcacaggacaucuuggagaaaacccacaaugggaaguuaugugaucuggacggagucaaaccccuaauucucagagauugcucaguggccgguuggcugcuuggcaacccuaugugugacgaguucaucaauguuccagaauggaguuauauaguggagaaggcgaacccggcuaaugaucugugcuaccccgggaacuuuaaugacuaugaggaauugaagcaucuccugagcaggaucaaccacuucgagaaaauucagaucauuccuaaguccucuuggucggaucaugaagccucaagcggagucaguuccguguguccauaccagggcacacccucuuucuuccggaauguaguuuggcugaucaaaaagaacaauacuuauccuaccauaaaacgcagcuacaacaauacaaaccaagaggaccucuuaauucugugggguauccaccacuccaacgaugcagccgagcagaccaagcuauaucagaauccaacuacauacauuucaguggggaccaguacguugaaccugcgacuuguccccaagaucgcuacucguagcaaagugaauggacagucuggcagaauggacuuuuucuggaccauccucaagccuuccgaugcaauuaacuuugaaucaaauggcaacuucauagccccagaguacgcuuauaaaaucgugaagaaaggggacagcgccauuaugaagagugaagucgaguacggaaauugcaacacaaaaugucaaacuccgaucggugcgauaaauucuuccaugcccuuucauaacauucacccucugaccaucggcgaaugcccaaaguauguuaagagcaauaaacuugugcuggcaacaggguugaggaacucgccccuccgggagcgcagaaggaagcggggacuguucggcgccaucgcugguuuuauugaagggggauggcagggcaugguagacggcugguacggguaucaucacucuaaugaacagggauccgguuacgccgcagauaaagagucaacccagaaggcuaucgacggcgugacgaacaaagucaauaguauuauagauaagaugaacacucaauucgaagccguggggcgcgaguuuaacaauuuagaacgaagaaucgagaaccugaauaagaaaauggaggacggauuccucgauguuuggacauauaacgcggaacuucugguguugauggagaaugaaaggacccuagacuuccacgauagcaacgucaagaaucuguacgacaaagugcggcuccagcugcgugauaacgccaaggagcuuggcaaugguuguuuugaauuuuaccauaaaugcgacaacgaguguauggaguccguacgcaaugggacuuaugauuacccucaguauucugaagaggcaagacugaagagggaagagauuagcggcguuaaguuggagucaaucggaacauaccaaauccucaguauuuauuccaccguggcuagcucucuggccuuagcuauaauggucgccggccugucacuauggaugugcaguaacgggagccuccagugccggaucuguauuuga

SEQ ID NO: 135757 - RNA, 1704 nt, Artificial Sequence
  derived and/or modified CDS sequence (opt3) from hemagglutinin__InfluenzaA__AEO89082
auggagaagaucgugcugcuccuugccauugucagccugguuaaauccgaccagauaugcaucggcuaccacgcuaacaauucuaccgaacaaguggauacaauuauggagaagaacguaacugugacgcaugcacaggacaucuuggagaaaacccacaaugggaaguuaugugaucuggacggagucaaaccccuaauucucagagauugcucaguggccgguuggcugcuuggcaacccuaugugugacgaguucaucaauguuccagaauggaguuauauaguggagaaggcgaacccggcuaaugaucugugcuaccccgggaacuuuaaugacuaugaggaauugaagcaucuccugagcaggaucaaccacuucgagaaaauucagaucauuccuaaguccucuuggucggaucaugacacaucaagcggagucaguuccgccuguccauaccagggcacucccagcuuuuuccggaaugugguauggcugaucaaaaagaacaauaccuauccuacaauaaaacgcucuuacaacaauaccaacaaggaagaucucuuaauucugugggguauccaccacuccaacgacgcagccgagcaaacuaaacuuuaucagaauccaacaaccuacauuucaguugggacgaguacuuugaaccagcgacuggugcccaagaucgcuacccguagcaaggucaauggacagucuggcagaauggacuuuuucuggacaauccuaaaaccuaacgaugcaauuaauuuugaguccaacggcaauuucauagccccagaauacgcuuauaagaucgugaaaaagggggacucagccauuaugaaaagcgagguggaauacggaaacugcaauacuaagugucaaaccccgaucggugcgauaaacaguucuaugcccuuucauaauauucacccucucacaaucggcgagugcccaaaguaugucaaauccaacaagcugguucuugcaaccgggcugaggaauagccccuugcgggaacgcagaaggaaacggggacucuucggcgccaucgcugguuuuauugaagggggauggcagggcaugguggauggcugguacggguaucaucacucgaacgagcagggaucugguuacgccgcagacaaggaauccacgcagaaagcuaucgauggcguaacuaauaaggugaacucaauuauagacaagaugaacacacaauucgaggccgucgggcgcgaauuuaauaaccuggagcgaagaaucgaaaauuuaaacaaaaagauggaggauggauuccuggacguguggaccuauaaugcggagcuccuuguucugauggaaaacgagaggacuuuggauuuccacgacaguaaugugaaaaaccuauacgauaagguccggcugcagcuccgugacaaugccaaagaacugggcaacgguuguuuugaguucuaccauaagugcgauaaugaauguauggagagcgugcgcaacgggacauaugacuacccucaguauuccgaggaagcaagacuuaagagggaggaaauuucuggcguaaaacuggagagcaucggaaccuaccaaaucuugucaauuuauaguacgguugcuuccagccucgcccuggcuauaaugguggccggcuuaucucuguggaugugcucaaaugggagucuacagugccggaucuguauuuga

SEQ ID NO: 135758 - RNA, 1704 nt, Artificial Sequence
  derived and/or modified CDS sequence (opt3) from hemagglutinin__InfluenzaA__AEO89091
auggagaagaccguguuccugcucgccaucgucagccuuguuaaauccgaccagauuugcauaggcuaccacgcuaacaauucuacagaacaaguggauacuaucauggagaagaacguaacggugacccaugcacagaauauucuggagaaaacacacaacgggaaguugugugacaucgauggagucaaacccuuaauucugaaggacugcucaguggccgguuggcuacucggcaauccuaugugugaugaauuuaucaacguuccagaauggaguuauauaguggagaaggcgaauccggcuaacgaccugugcuaccccgggaauuucaacgauuaugaggaacuuaaacaucuguugagcagaaucaaucacuuugagaagauucagaucauuccuaaauccucuuggucggaccaugaagccucaagcggagucaguuccacuuguccauaccagggcacccccucuuucuuuaggaacgugguauggcucaucaagaaaaauaacacauauccuaccauaaagcggagcuacaauaacacuaaccaagaggaucugcugauucucugggguauccaccacuccaaugacgaggcagaacaggccaaguuauaucagaacccaacaaccuacauuucaguugggacgaguacucugaaucagcgccuugugcccaaaaucgcuacccgaagcaaggucaacggacaaucuggccguauggauuucuuuuggacaaucuugaaaccuaaugacgcaauuaacuucgaguccaauggcaacuuuauagccccagaauacgcuuauaagaucgugaaaaagggggauucagccauuaugaaaagcgagguggaauacggaaauugcaacacuaagugucagaccccgaucggugcgauaaauaguucuaugcccuuccauaacauucacccucugacaaucggcgagugcccaaaguaugucaaauccaauaagcuaguucucgcaaccgggcugagaaacagcccccuuagggagcggcgcagaaaaaggggacuguuuggcgccaucgcugguuucauugaagggggauggcagggcaugguggacggcugguacggguaucaucacucgaaugagcagggaucugguuacgccgcagacaaggaauccacgcaaaaagcuaucgauggcguaacuaacaaggugaacucaauuauagacaagaugaauacacaguuugaggccgucgggcgggaguucaacaauuuggaacgccgaaucgagaaccucaauaaaaagauggaagauggauuccuggacguguggaccuauaacgcggaguuacugguucucauggaaaaugagagaacucuugauuuucacgacaguaacgugaaaaaucuguacgauaaggucagguugcagcuacgggacaacgccaaagaacugggcaaugguuguuucgaguuuuaccauaagugcgaugacgaguguauggaaagcgugcguaacgggacauaugauuacccucaauauuccgaggaagcacgccucaagagagaggagauuucuggcguaaaacuggaaagcaucggaaccuaccagauccuuucaauuuauaguacgguugcuuccagccuggccuuggcuauaaugauggccggccucucucuguggaugugcucaaaugggaguuuacagugcaggaucuguauuuga

SEQ ID NO: 135759 - RNA, 1704 nt, Artificial Sequence
  derived and/or modified CDS sequence (opt3) from hemagglutinin__InfluenzaA__AEO89100
auggagaagaucgugcccuuccuggccauuauaagccucgucaaauccgaccagaucugcauuggcuaccacgcuaacaauucuaccgaacaaguugauacaaucauggagaagaacgugacuguaacgcaugcacaggacauucuugagaaaacccacaaugggaagcugugugauuuggacggagugaaaccuuuaauccugagagauugcucagucgccgguuggcuacucggcaacccaaugugugacgaguuuauaaaugugccggaauggaguuauaucguugagaaggcgaaccccgcuaaugaucugugcuacccugggaacuucaaugacuaugaggaacuuaagcaucuguugagcaggauuaaccacuuugagaaaauccagauuaucccaaagaacuccuggucugaucaugaagccucgucaggagugagcagugcaugucccuaccagggcacaccuuccuucuuucggaaugucguguggcucauuaaaaagaauaacacuuauccaaccauaaaacgcucuuacaauaacacaaaccaagaggaccugcugauccucugggguauucaccacagcaaugaugccgcugagcagaccaaguuauaucagaaccccacuacauacaucuccguagggaccucaacgcugaaucagcgacuuguuccuaagaucgcaacucguaguaaagugaacggacaaagcggcagaauggacuucuuuuggaccauuuugaagccaaaugaugccauaaacuucgaaucuaauggcaacuuuaucgcuccggaguacgccuauaaaauugucaagaaaggggacuccgcgaucaugaagucagaaguggaguacggaaauugcaacacaaaaugucagacucccauaggugcaauuaauagcaguaugccuuuccauaacauccacccacugaccaucggcgaaugccccaaguaugugaagucuaauaagcuaguccucgccacagggcugaggaacuccccucuucgggagcgcagaaggaaacggggacuguuuggcgcuauugccgguuucaucgaagggggauggcagggcaugguugacggcugguacggguuucaucacagcaaugaacagggaucggguuaugcagcugauaaagagucuacccaaaaggccauugacggcgugacgaacaaaguaaacuccauaaucgauaagaugaauacucaguucgaagcgguggggcgcgaguucaacaauuuggaacgaagaauugagaaccucaauaagaaaauggaggacggauuucuggaugucuggacauacaacgccgaauuacuggugcucauggagaaugaaaggacccuugacuuccacgauucaaacguuaagaaucuguaugacaaagugcgguugcagcuacgugauaacgcaaaggagcugggcaaugguuguuuugaguucuaccauaaaugcgacgaugaauguauggagagugucaagaacgggacuuacgacuauccacaauacagcgaagaggcucgccucaagagagaagagaucuccggcgugaaacuggagucuaucggaacauaucagauucuuagcauauacucaaccguagccaguucccuggcuuuggccaucaugguugcaggccucagccuguggaugugcucuaaugggucauuacagugcaggauuuguaucuga

SEQ ID NO: 135760 - RNA, 1704 nt, Artificial Sequence
  derived and/or modified CDS sequence (opt3) from hemagglutinin__InfluenzaA__AEO89109
auggagaagaucgugcugcuccuugccauugucagccugguuaaauccgaccagauaugcaucggcuaccacgcuaacaauucuaccgaacaaguggauacaauuauggagaagaacguaacugugacgcaugcacaggacaucuuggaaaagacccacaaugggaaguuaugugaucuggacggagucaaaccccuaauucucagagauugcucaguggccgguuggcugcuuggcaacccuaugugugacgaguucaucaauguuccagaauggaguuauauaguggagaaggcgaacccggcuaaugaucugugcuaccccgggaacuuuaaugacuaugaggaauugaagcaucuccugagcaggaucaaccacuucgagaaaauucagaucauuccuaaguccucuuggucggaucaugaagccucaagcggagucaguuccgcauguccauaccagggcacacccagcuuuuuccggaaugugguauggcugaucaaaaagaacaauacuuauccuaccauaaaacgcucuuacaacaauacaaaccaagagaaccucuuaauucugugggguauccaccacuccaaugacgccgcugagcagauuaaacuuuaucagaacccaaccacuuacaucucaguugggacaaguaccuugaaucagcgacuggugacgaagaucgcaacucgucccaaagucaacggacaaagcggcagaauggacuuuuucuggaccauucuaaagccuaaugaugccauaaacuuugaaucuaauggcaacuucaucgcuccagaguacgccuauaaaauugugaaggaaggggauuccgcgaucaugaaaucagagguggaauacggaaauugcaacacaaagugucagacuccgauaggugcaauuaauagcaguaugcccuuucauaacauccacccucucaccaucggcgagugcccaaaauaugucaagucuaauaagcugguucuugccacagggcugaggaacucccccuugcgggagcgcagaaggaaacggggacucuucggcgcuauugccgguuuuaucgaagggggauggcagggcaugguggacggcugguacggguaucaucacagcaaugagcagggaucggguuacgcagcugacaaggaaucuacccaaaaagccauugauggcguaacgaacaaggugaacuccauaaucgacaaaaugaauacucaguucgaggcggucgggcgcgaauuuaacaaucuggagcgaagaauugagaacuuaaauaagaagauggaagauggauuccuggacguguggacauauaacgccgagcuccuuguucugauggaaaaugagaggaccuuggauuuccacgacucaaacgugaaaaaucuauacgauaagguccggcugcagcuccgugacaacgcaaaagaacugggcaaugguuguuuugaguucuaccauaagugcgauaacgaguguauggaaagugugcgcaaugggacuuaugacuacccucaauauagcgaggaagcuagacuuaaaagggaggagaucuccggcguaaagcuggaaucuaucggaacauaccagauuuugagcauauauucaaccguugccaguucccucgcucuggccaucaugguggcaggcuuaagccuguggaugugcucuaacgggucacuacagugccggauuuguaucuga

SEQ ID NO: 135761 - RNA, 1704 nt, Artificial Sequence
  derived and/or modified CDS sequence (opt3) from hemagglutinin__InfluenzaA__AEO89127
auggagaagaucgugcugcuccuugccauuauaagccuggucaaauccgaccagaucugcauuggcuaccacgcuaacaauucuaccgaacaaguugauacaaucauggagaagaacgugacuguaacgcaugcacaggacauuuuggaaaagacccacaaugggaaguuaugugaucuggacggagugaaaccccuaauccucagagauugcucagucgccgguuggcugcuuggcaacccuaugugugacgaguucauaaaugugccagaauggaguuauaucguugagaaggcgaacccggcuaaugaucugugcuaccccgggaacuuuaaugacuaugaggaauugaagcaucuccugagcaggauuaaccacuucgagaaaauccagauuaucccuaaguccucuuggucggaucaugaagccucaagcggagugaguuccgcauguccauaccagggcacacccagcuuuuuccggaaugucguguggcugauuaaaaagaacaauacuuauccuaccauaaaacgcucuuacaacaauacaaaccaagagaaccucuuaauccugugggguauucaccacuccaaugacgccgcugagcagaucaaacuuuaucagaacccaaccacuuacaucucaguagggacaaguaccuugaaucagcgacugguucccaagauugcaacgcguagcaaagugaacggacaaucuggcagaauggacuuuuucuggacuauacuaaagccuaaugaugccaucaacuuugaauccaauggcaacuucauugcuccagaguacgccuauaaaaucgucaaggaaggggauucagcgauaaugaaaagcgagguggaauacggaaauugcaacaccaagugucagacaccgauuggugcaaucaauaguucuaugcccuuucauaacauccacccucucacuauuggcgagugcccaaaauaugugaaguccaauaagcugguccuugccaccgggcugaggaacagccccuugcgggagcgcagaaggcggcgcggacucuucggcgcuaucgccgguuuuauugaagggggauggcagggcaugguugacggcugguacggguaucaucacucgaaugagcagggaucugguuacgcagcugacaaagaauccacacaaaaggccauagauggcgugaccaacaaaguaaacucaaucauugacaagaugaauacgcaguucgaggcgguggggcgagaauuuaacaaucuggagagaaggaucgagaacuuaaauaaaaagauggaagauggauuccuggacgucuggacuuauaacgccgagcuccuugugcugauggaaaaugagcggacauuggauuuccacgacaguaacguuaagaaucuauacgauaaagugcgucugcagcuccgcgacaacgcaaaggaacugggcaaugguuguuuugaguucuaccauaaaugcgauaacgaguguauggaaagcgucagaaaugggaccuaugacuacccucaauauuccgaggaagcuaggcuuaagcgggaggagaucucuggcauuaaacuggaaagcaugggaacuuaccagauauugucaaucuauaguacaguggccuccagccucgcucuggccauuaugguagcaggcuuaucucuguggaugugcucaaacgggagucuacagugccgaaucuguauuuga

SEQ ID NO: 135762 - RNA, 1704 nt, Artificial Sequence
  derived and/or modified CDS sequence (opt3) from hemagglutinin__InfluenzaA__AEO89145
auggagaagaucgugcugcuccuugccauugucagccugguuaaauccgaccagauaugcaucggcuaccacgcuaacaauucuaccgaacaaguggauacaauuauggagaagaacguaacugugacgcaugcacaggacaucuuggaaaagacccacaaugggaaguuaugugaucuggacggagucaaaccccuaauucucggugauugcucaguggccggcuggcugcuugggaacccuaugugugacaaguucaucaauguuccagaguggaguuauauaguggaaaaggcgaacccggcuaaugaucugugcuaccccggaaacuuuaaugacuaugaggaguugaaacaucuccugagcagaaucaaccacuucgaaaagauucagaucauuccuaaauccucuuggucggaucaugaggccucaagcggcgucaguuccgcauguccauaccaggguacacccagcuuuuucaggaaugugguauggcugacuaagaaaaacaauaccuauccuacaaucaagcggucuuacaacaauaccaaccaagaagaccucuuaauacugugggggauucaccacuccaacaaugccgcugagcaggagaaacuuuaucagaacccaacuacauacaucucaguuggaaccaguacguugaaucagcgccuggugcccaaaauugcaacucgaagcaaggucaacggccaaucuggccguauggacuuuuucuggaccauccuaaaaccuaaugaugccaucaacuuugaauccaaugggaacuucauugcuccagaguacgccuauaagauagugaaaaagggagauucagcgaucaugaaaagcgguguggaauacggcaauugcaacacaaagugucagacuccgauuggggcaaucaauaguucuaugcccuuucauaacauacacccucucaccauuggagagugcccaaaguaugucaaauccaauaagcugguucuugccacaggccugagaaacagccccuugagggaacggcgcagaaaaaggggucucuucggggcuaucgccggauuuaucgagggcggcuggcaggggaugguggacggaugguacgguuaucaucacucgaaugagcagggcucuggguacgcagcugacaaggaauccacccaaaaagccauugauggaguaacgaacaaggugaacucaaucauugacaagaugaauacucaguucgaggcggucggccgggaauuuaacaaucuggagcgccgaauagaaaacuuaaauaaaaagauggaggaugguuuccuggacguguggacauauaacgccgagcuccuuguucugauggaaaaugagagaaccuuggauuuccacgacaguaacgugaaaaaucuauacgauaaggucaggcugcagcuccgggacaacgcaaaagaacuggggaauggcuguuuugaguucuaccauaagugcgauaacgaauguauggagagcgugcguaauggaacuuaugacuacccucaauauuccgaggaagcucgccuuaagagagaggaaaucucuggcguaaaacuggagagcauugggacauaccagaucuugucaaucuauaguaccgccgcuuccagccucgcccuggcaauuaugguugccggauuaucucuguggaugugcucaaacgguagucuacagugcaggauauguaucuga

SEQ ID NO: 135763 - RNA, 1707 nt, Artificial Sequence
  derived and/or modified CDS sequence (opt3) from hemagglutinin__InfluenzaA__AEO89163
auggagaagaucgugcuucucuucgccauugucagccuuguuaaauccgaccacauaugcaucggcuaccaugcuaacaauucuaccgaacagguggauacaauuauggagaagaacguaacugugacgcacgcacaagacauccuggaaaagacccauaaugggaaguugugugauuuaaacggagucaaaccccugauucuaaaggacugcucaguggccgguuggcuccugggcaauccuaugugugaugaguuuaucgacguuccagaauggaguuauauaguggagaaggcgaacccggcuaaugaucuuugcuaccccgggaacuucaaugacuaugaggaacugaaacacuugcucagcagaaucaaccauuuugagaagauucagaucauuccuaaagauuccuggccagaccacgaagccucucugggagucucgucagcaugucccuaccagggcaauagcaguuucuuuaggaacgugguauggcugaucaagaaagguaaugccuauccuacaauaaagaaguccuacaacaauacuaacaaagaggaucucuuaauucugugggggauccaccauccaaacgacgaggcugaacagacccggcuuuaucaaaaucccacaaccuacauuucuaucggaacuagcacauugaaccagcgccugguuccucgaaucgcaacccguuccaaggugaauggccagucaggcagaauugauuucuuuuggacgauacuaaaaccaaacgacgccaucaauuucgagaguaacgggaauuuuauugcuccggaauacgccuauaagaucgucaaaaagggagacagcacuauaaugaaaucugagguggaauacgguaacugcaauaccaggugucagacacccaugggcgcgauuaacuccucaaugccuuuccacaauauccauccacucacuaucggggagugccccaaguaugugaaaagcaacaaacugguccuugcaaccggacugcggaauaguccucaacgcgagagaaggcggcgcaagcgaggcuuguuuggugccauugcuggguucaucgaaggaggcuggcagggcaugguugaugggugguacggauaucaccacucuaacgagcaggguuccggcuacgccgcagacaaagaaagcacacagaaggcuauugauggggugaccaauaaaguaaacucgauaaucgacaagaugaacacgcaauuugaggccgugggaagagaguucaauaaccucgaaaggcggauugagaaucugaacaagaaaauggaagauggcuucuuagacgucuggacuuauaaugcggagcugcucgugcuuauggaaaacgagcguacacuggauuuucaugacucuaauguuaagaacuuguacgauaaagugcgccuacagcugagagacaaugccaaggaacucgguaacggguguuucgaguuuuaccacaaaugcgauaaugaguguauggaauccgucaggaacggcaccuaugacuacccacaguauucagaggaagcacggcugaagcgagaggagaucaguggagugaagcuggaaagcaucggcacuuaccaaauucuguccauauauucuacaguagcuagcucauugguucucgccaucaugguggcugggcugaguuuauggaugugcuccaauggaagccugcagugccgcauuuguaucuga

SEQ ID NO: 135764 - RNA, 1704 nt, Artificial Sequence
  derived and/or modified CDS sequence (opt3) from hemagglutinin__InfluenzaA__AEO89172
auggagaagaucgugcugcuccuugccauugucagccugguuagauccgaccagauaugcaucggcuaccacgcuaacaauucuaccgaacaaguggauacaauuauggagaaaaacguaacugugacgcaugcacagaauaucuuggaaaagacccacaacgggaaauuaugugaccuggauggagucaagccccuaauucucagggacugcucaguggccgguuggcugcuuggcaauccuaugugugaugaguucaucaacguuccagaauggaguuauauaguggagaaagcgaauccggcuaacgaccugugcuaccccgggaauuuuaacgauuaugaggaauugaagcaucuccugagccggaucaaucacuucgagaagauucagaucauuccuaaauccucuuggucggaccaugaagccucaagcggagucaguuccgcauguccauaccagggcacacccagcuuuuuccgcaacgugguauggcugaucaagaaaaauaacacuuauccuaccauaaagcgaucuuacaauaacacaaaccaagaggaucucuuaguucugugggguauucaccacuccaaugacgccaccgagcagaucaaacuuuaucagaacccaacuacauacgugucagucgggaccaguacguugaaucagcgucuggugcccaagauugcuacuagaagcaaggugaacggacaaucuggcaggauggacuuuuucuggaccauccuaaaauccaaugaugcaaucaacuuugaaucaaauggcaacuucauugccccugaguacgcuuauaagauagucaaaaagggggauagcgccaucaugaaaagugaaguugaguacggaaauugcucuacaaagugucagacuccaauuggugcgaucaacuccagcaugccguuucauaauauacacccccucaccauuggcgaaugcccuaaauaugugaagucgaacaagcugguacuugcaacagggcugcgcaauucuccauugcgggagagaaggcggaaacgcggacucuucggcgccaucgcugguuuuaucgaagggggauggcagggcaugguggacggcugguacggguaucaucacuccaacgaacagggaucagguuacgccgcagacaaggagaguacccaaaaagcuauugauggcgucacgaauaaggugaacagcaucauugacaaaaugaacacucaguucgaagccguugggcgagaguuuaauaaccuggaaagaaggauagagaauuuaaacaagaagauggaggauggauuccuggacguguggacauauaaugcggaacuccuuguccugauggagaacgaacggaccuuggauuuccacgacuccaaugugaaaaaccuauacgauaagguacgucugcagcuccgcgacaaugccaaagagcugggcaacgguuguuuugaguucuaccauaagugcgauaaugaguguauggagucuguuagaaacgggacuuaugacuacccccaauauagcgaagaggcaaggcuuaaacgggaagagaucucaggcgugaagcuggagaguauuggaacauaccagaucuuguccaucuauagcaccgucgcuucuucacucgcccuggcuauuaugguggccggcuuaagucuguggaugugcagcaaugggucccuacagugccgaauauguaucuga

SEQ ID NO: 135765 - RNA, 1704 nt, Artificial Sequence
  derived and/or modified CDS sequence (opt3) from hemagglutinin__InfluenzaA__AEO89181
auggagaagaucgugcuccuguucgccaccauuagccuugucaaauccgaccacauaugcaucggcuaccaugcuaacaauucuacagaacagguugauacuauuauggagaagaacgugacgguaacccacgcacaagacauccuggaaaagacacauaaugggaaguugugugauuuaaacggagugaaaccccugauucuaaaggacugcucagucgccgguuggcuccugggcaauccuaugugugaugaguuuaucaacgugccagaauggaguuauauaguugagaaggcgaauccggcuaacgaccuuugcuaccccgggaauuucaacgauuaugaggaacugaaacacuugcucagcagaaucaaucauuuugagaagauucagaucauuccuaaaaacuccuggucugaccacgaagccucgcugggagugucagcagccuguccauaccagggcaagagcaguuucuuuaggaaugucguguggcugaucaaaaaggauaacgcuuaucccacuauaaagaaagguuacaauaacaccaaccaggaggaccucuuaguacugugggggauucaccauccuaaugaugaggcagaacaaacacggcuuuaucagaacccaaccacuuacaucuccauuggaacaucuaccuugaaucagcgccugguucccaagaucgccacgcgaagcaaaaucaacggccaguccggccguauugacuucuuuuggacuauacuaaagccuaaugaugcuauccacuucgagucaaacgggaauuuuauugccccagaauacgcguauaaaaucgugaagaaaggagacaguaccauaaugaaaagcgaggucgaauacgguaacugcaauacaagaugucaaacuccgauuggcgcaaucaacucuuccaugcccuuccauaauauccacccucucaccauuggggagugcccaaaguaugugaaaucaaacaagcuggugcuugccacaggacugaggaauagcccccagcgggagcgcagaaggaaacggggcuuguuuggugcuaucgccggguucauugaaggaggcuggcagggcauggucgacgggugguacggauaucaccauaguaacgagcaggguucuggcuacgcagcugauaaggaauccacccaaaaagccauagacgggguuacgaauaaggugaacagcaucauugauaagaugaacacucaguuugaggcgguaggacgcgaguucaauaaccucgaacgaagaaucgagaaucugaacaaaaagauggaagacggcuucuuagauguguggacauauaaugccgagcugcucguccuuauggaaaacgagaggacccuggacuuucacgauucgaaugugcggaacuuguacgacaaaguucgucuacagcugaaggauaaugcaaaagaacucgguaacggguguuucgaguuuuaccauaagugcgacaaugaguguauggaaucugugcgcaacggcacuuaugauuacccucaauauuccgaggaagcuagacugaagagggaggagaucucaggagucaaacuugaaaguauuggcauauaccagauccugagcauuuauuccacaguggccucuagcuugguacucgcuaucaugauggccgggcugucauuauggaugugcaguaauggaucccugcagugccggauuuguaucuga

SEQ ID NO: 135766 - RNA, 1704 nt, Artificial Sequence
  derived and/or modified CDS sequence (opt3) from hemagglutinin__InfluenzaA__AEO89192
auggagaagaucgugcugcuccuugccauugucagccugguuaaauccgaccagauaugcaucggcuaccacgcuaacaauucuaccgaacaaguggauacaauuauggagaagaacguaacugugacgcaugcacaggacaucuuggaaaagacccacaaugggaaguuaugugaucuggacggagucaaaccccuaauucucagagauugcucaguggccgguuggcugcuuggcaacccuaugugugacgaguucaucaauguuccagaauggaguuauauaguggagaaggcgaacccggcuaaugaucugugcuaccccgggaacuuuaaugacuaugaggaauugaagcaucuccugagcaggaucaaccacuucgagaaaauucagaucauuccuaaguccucuuggucggaucaugaagccucaagcggagucaguuccgcauguccauaccagggcacacccagcuuuuuccggaaugugguauggcugaucaaaaagaacaauacuuauccuaccauaaaacgcucuuacaacaauacaaaccaagagaaccucuuaauucugugggguauccaccacuccaaugacgccgcugagcagauuaaacuuuaucagaacccaaccacuuacguuucaaucgggacaaguaccuugaaucagcgacuggugcccaagaucgcaacgcguagcaaagucaacggacaaucuggcagaauggacuuuuucuggacuauucuaaagccuaaugaugccauaaacuuugaauccaauggcaacuucaucgcuccagaguacgccuauaaaauugugaaggaaggggauucagcgaucaugaaaagcgagguggaauacggaaauugcaacaccaagugucagacaccgauaggugcaauuaauaguucuaugcccuuucauaacauccacccucucacuaucggcgagugcccaaaauaugucaaguccaauaagcugguucuugccaccgggcugaggaacagccccuugcgggagcgcagaaggaaacggggacucuucggcgcuauugccgguuuuaucgaagggggauggcagggcaugguggacggcugguacggguauccucauucgaaugagcagggaucugguuacgcagcugacaaggaauccacacaaaaagccauugauggcguaaccaacaaggugaacucaauaaucgacaaaaugaauacgcaguucgaggcggucgggcgcgaauuuaacaaucuggagcgaagaauugagaacuuaaauaagaagauggaagauggauuccuggacguguggacuuauaacgccgagcuccuuguucugauggaaaaugagaggacauuggauuuccacgacaguaacgugaaaaaucuauacgauaagguccggcugcagcuccgugacaacgcaaaagaacugggcaaugguuguuuugaguucuaccacaagugcgauaacgaguguauggaaagcgugcgcaaugggaccuaugacuacccacaauauuccgaggaagcuagacuuaaaagggaggagaucaacggcguaaagcuggaaucuaucggaacuuaccagauuuugagcauauauucaacaguugccaguucccucgcucuggccaucaugguggcaggcuuaagccuguggaugugcucuaaugggucacuacagugccggauuuguaucuga

SEQ ID NO: 135767 - RNA, 1704 nt, Artificial Sequence
  derived and/or modified CDS sequence (opt3) from hemagglutinin__InfluenzaA__AEO89203
auggagaagaucgugcugcuccuugccauugucagccugguuaaauccgaccagauaugcaucggcuaccacgcuaacaauucuaccgaacaaguggauacaauuauggagaagaacguaacugugacgcaugcacaggacaucuuggaaaagacccacaaugggaaguuaugugaucuggacggagucaaaccccuaauucucagagauugcucaguggccgguuggcugcuuggcaacccuaugugugacgaguucaucaauguuccagaauggaguuauauaguggagaaggcgaacccggcuaaugaucugugcuaccccgggaacuuuaaugacuaugaggaauugaagcaucuccugagcaggaucaaccacuucgagaaaauucagaucauuccuaaguccucuuggucggaucaugaagccucaagcggagucaguuccgcauguccauaccagggcacacccagcuuuuuccggaaugugguauggcugaucaaaaagaacaauacuuauccuaccauaaaacgcucuuacaacaauacaaaccaagagaaccucuuaauucugugggguauccaccacuccaaugacgccgcugagcagauuaaacuuuaucagaacccaaccacuuacguuucaaucgggacaaguaccuugaaucagcgacuggugcccaagaucgcaacgcguagcaaagucaacggacaaucuggcagaauggacuuuuucuggacuauucuaaagccuaaugaugccauaaacuuugaauccaauggcaacuucaucgcuccagaguacgccuauaaaauugugaaggaaggggauucagcgaucaugaaaagcgagguggaauacggaaauugcaacaccaagugucagacaccgauaggugcaauuaauaguucuaugcccuuucauaacauccacccucucacuaucggcgagugcccaaaauaugucaaguccaauaagcugguucuugccaccgggcugaggaacagccccuugcgggagcgcagaaggaaacggggacucuucggcgcuauugccgguuuuaucgaagggggauggcagggcaugguggacggcugguacggguaucaucacucgaaugagcagggaucugguuacgcagcugacaaggaauccacacaaaaagccauugauggcguaaccaacaaggugaacucaauaaucgacaaaaugaauacgcaguucgaggcggucgggcgcgaauuuaacaaucuggagcgaagaauugagaacuuaaauaagaagauggaagauggauuccuggacguguggacuuauaacgccgagcuccuuguucugauggaaaaugagaggacauuggauuuccacgacaguaacgugaaaaaucuauacgauaagguccggcugcagcuccgugacaacgcaaaagaacugggcaaugguuguuuugaguucuaccauaagugcgauaacgaguguauggaaagcgugcgcaaugggaccuaugacuacccucaauauuccgaggaagcuagacuuaaaagggaggagaucaacggcguaaagcuggaaucuaucggaacuuaccagauuuugagcauauauucaacaguugccaguucccucgcucuggccaucaugguggcaggcuuaagccuguggaugugcucuaaugggucacuacagugccggauuuguaucuga

SEQ ID NO: 135768 - RNA, 1704 nt, Artificial Sequence; identical to SEQ ID NO: 135767
  derived and/or modified CDS sequence (opt3) from hemagglutinin__InfluenzaA__AEO89213

SEQ ID NO: 135769 - RNA, 1704 nt, Artificial Sequence; identical to SEQ ID NO: 135767
  derived and/or modified CDS sequence (opt3) from hemagglutinin__InfluenzaA__AEO89224

SEQ ID NO: 135770 - RNA, 1704 nt, Artificial Sequence
  derived and/or modified CDS sequence (opt3) from hemagglutinin__InfluenzaA__AEO89235
auggagaagaucgugcugcuccuugccauggucagccugguuagauccgaccagauuugcauaggcuaccacgcuaacaauucuaccgaacaaguggauacaaucauggagaaaaacguaacugugacgcaugcacaggacauuuuggaaaagacccacaaugggaaauuaugugaucuggacggagucaagccccuaauccucagggauugcucaguggccgguuggcugcuuggcaacccuaugugugacgaguucauuaauguuccagaauggaguuauaucguggagaaagcgaacccggcuaaugaucugugcuaccccgggaacuugaaugacuaugaggaacucaagcaucugcugagccggauaaaccacuuugagaagauccagauuaucccuaaauccucuuggucggaucaugaagccucacucggagucagcagugcauguccauaccagggcacacccuccuucuuucgcaaugugauuugguuaaucaagaaaaacaauacuuauccuaccauaaagcgaucuuacaacaauacaaaccaagaggaccugcuuauuuugugggguauccaccacagcaacgaugaggccgaacagauuaaacuguaucagaauccaaccacuuacaucuccguagggacaucaacccuaaaccagcgucucguucccaagaucgcuacgagaaguaaggugaauggacaaagcggcaggauggacuucuuuuggacuauucugaaaccugaugacgcaauaaacuucgagucuaauggcaacuuuaucgccccagaauacgcuuauaagauugucaaaaagggggacuccgccaucaugaaaucagagguggaauacggaaauugcaacaccaagugucagacaccgauaggugcgauuaauagcaguaugcccuuccauaacauccacccucuuacuaucggcgagugcccaaaauaugugaagucuaauaagcuggucuuggcaaccgggcuccggaacagcccccugcgcgagaaaagaaggaagcggggauuauuuggcgccauugcugguuucaucgaagggggauggcagggcaugguugauggcugguacggguaucaucacuccaaugagcagggaucggguuacgccgcagacaaagaaucuacacaaaaggcuauugauggcgugaccaacaaaguaaauuccauaaucgacaagaugaacacgcaguuugaggccguggggcgcgaguucaacaaucuggaacgaagaauugagaaccucaauaagaaaauggaagauggauuucuugacgucuggacuuauaacgcggagcuguuggugcuaauggaaaaugagaggacacuggauuuccacgacucaaacguuaagaaucucuacgauaaagugcggcugcagcuucgugacaacgccaaggaacugggcaaugguuguuucgaguuuuaccauaaaugcgauaacgaguguauggaaaguguccgcaaugggaccuaugacuacccucaauauagcgaggaagcaagauugaagagggaggagaucuccggcgugaagcucgaaucuaucggaacuuaccagauucugagcauauauucaacaguagcuaguuccuuagcccuggcuaucaugguugccggccuaagccucuggaugugcucuaacgggucacugcagugccggauuuguaucuga

SEQ ID NO: 135771 - RNA, 1704 nt, Artificial Sequence
  derived and/or modified CDS sequence (opt3) from hemagglutinin__InfluenzaA__AEO89246
auggagaagaucgugccccugcucgccauggucagccuuguuaaauccgaccagauuugcauaggcuaccacgcuaacaauucuaccgaacaaguggauacaaucauggagaagaacguaacugugacgcaugcacaggacauucuggaaaagacccacaaugggaaauugugugauuuagacggagucaaaccucugauccuaagagauugcucaguggccgguuggcuccugggcaacccaaugugugacgaguucauuaauguuccggaauggaguuauaucguggagaaggcgaaccccgcuaaugaucuuugcuacccugggaaccugaaugacuaugaggaauugaagcaucuccugagcaggauaaaccacuuugagaaaauccagauuaucccaaaguccucuuggucggaucaugaagccucacugggagucagcagugcaugucccuaccagggcacaccuuccuucuuucggaaugugguauggcucauuaaaaagaacaauacuuauccaaccaucaaacgcucuuacaacaauacaaaccaagaggacuuacugauacuuugggguauucaccacagcaacgaugaggccgaacagaucaaguuguaucagaaucccaccacuuacauuuccguugggacaucaacccugaaccagcgucuagugccuaagaucgcuacgcgaaguaaagucaauggacaaagcggcagaauggacuucuuuuggacuauccucaagccagaugacgcaauuaacuucgagucuaauggcaacuuuauagccccggaauacgcuuauaaaaucgugaagaaaggggacuccgccauuaugaagucagagguggaauacggaaauugcaacaccaaaugucagacacccaucggugcgauaaauagcaguaugccuuuccauaacauucacccacugacuaucggcgagugccccaaguaugucaagucuaauaaacuuguucuggcaaccggguugaggaacuccccucuccgggagcgcagaaggaagcggggacuguuuggcgccaucgcugguuucauugaagggggauggcagggcaugguggauggcugguacggguaucaucacagcaaugagcagggaucggguuacgccgcagacaaagaaucuacacaaaaggcuaucgauggcguaaccaacaaagucaauuccauuauagacaagaugaacacgcaguuugaggccguggggcgcgaguucucaaacuuagaacgaagaaucgagaaucugaacaagaaaauggaagauggauuucucgacguguggacuuauaaugcggagcuucugguuuugauggaaaacgagaggacacuagauuuccacgacaguaaugugaagaaccuguacgauaaaguccggcuccagcugcgugacaaugccaaggaacuuggcaacgguuguuucgaguuuuaccauaaaugcgauaaugaguguauggaaagcgugcgcaacgggaccuaugacuacccacaauauuccgaggaagcaagacugaagagggaggagauuucuggcguaaaguuggaaagcaucggaacuuaccagauccucucaauuuauaguacaguugcuuccagccuggccuuagcuauaaugguggccggccugucucuauggaugugcucaaaugggagucuccagugccggaucuguauuuga

SEQ ID NO: 135772 - RNA, 1704 nt, Artificial Sequence
  derived and/or modified CDS sequence (opt3) from hemagglutinin__InfluenzaA__AEO89257
auggagaagaucgugcugcuccuugccauugucagccugguuagauccgaccagauaugcaucggcuaccacgcuaacaauucuaccgaacaaguggauacaauuauggagaaaaacguaacugugacgcaugcacaggacaucuuggaaaagacccacaaugggaaauuaugugaucuggacggagucaagccccuaauucucagggauugcucaguggccgguuggcugcuuggcaacccuaugugugacgaguucaucaauguuccagaauggaguuauauaguggagaaagcgaacccggcuaaugaucugugcuaccccgggaacuuuaaugacuaugaggaauugaagcaucuccugagccggaucaaccacuucgagaagauucagaucauuccuaaauccucuuggucggaucaugaagccucaagcggagucaguuccgcauguccauaccagggcacacccagcuuuuuccgcaaugugguauggcugaucaagaaaaacaauacuuauccuaccauaaagcgaucuuacaacaauacaaaccaagaggaccucuuaguucugugggguauucaccacuccaacgaugccgcugagcagaucaaacuuuaucagaauccaaccacuuacgugucagucgggacaaguaccuugaaccagcgucuggugcccaagauugcaacgagaagcaaggugaauggacaaucuggcaggauggacuuuuucuggacuauccuaaaauccaacgaugccaucaauuuugaaucaaacggcaauuucauugcuccugaguacgccuauaagauagucaaaaagggggacagcgcgaucaugaaaagugaaguugaguacggaaacugcucuaccaagugucagacaccaauuggugcaaucaauuccagcaugccguuucauaacauacacccccucacuauuggcgaaugcccuaaauaugugaagucgaauaagcugguacuugccaccgggcugcggaacucuccauugcgcgagagaaggcggaaacgcggacucuucggcgcuaucgccgguuuuaucgaagggggauggcagggcaugguggacggcugguacggguaucaucacuccaaugaacagggaucagguuacgcagcugauaaggagaguacacaaaaagccauugacggcgucaccaacaaggugaauagcaucauugauaaaaugaacacgcaguucgaagcgguugggcgagaguuuaacaaucuggaaagaaggauagagaacuuaaauaagaagauggaggacggauuccuggauguguggacuuauaacgccgaacuccuuguccugauggagaaugaacggacauuggacuuccacgauuccaacgugaaaaaucuauacgacaagguacgucugcagcuccgcgauaacgcaaaagagcugggcaaugguuguuuugaguucuaccauaagugcgacaacgaguguauggagucuguuagaaaugggaccuaugauuacccccaauauagcgaagaggcuaggcuuaaacgggaagagaucucaggcgugaagcuggagaguauuggaacuuaccagaucuuguccaucuauagcacagucgccucuucacucgugcuggcuauuauggucgccggcuuaagucuguggaugugcagcaacgggucccuacagugccgaauauguaucuga

SEQ ID NO: 135773 - RNA, 1704 nt, Artificial Sequence; identical to SEQ ID NO: 135772
  derived and/or modified CDS sequence (opt3) from hemagglutinin__InfluenzaA__AEO89268

SEQ ID NO: 135774 - RNA, 1704 nt, Artificial Sequence
  derived and/or modified CDS sequence (opt3) from hemagglutinin__InfluenzaA__AEO89279
auggagaagaucgugcugcuccuugccauugucagccugguuaaauccgaccagauaugcaucggcuaccacgcuaacaauucuaccgaacaaguggauacaauuauggagaagaacguaacugugacgcaugcacaggacaucuuggaaaagacccacaaugggaaguuaugugaucuggacggagucaaaccccuaauucucggugauugcucaguggccggcuggcugcuugggaacccuaugugugacaaguucaucaauguuccagaguggaguuauauaguggaaaaggcgaacccggcuaaugaucugugcuaccccggaaacuuuaaugacuaugaggaguugaaacaucuccugagcagaaucaaccacuucgaaaagauucagaucauuccuaaauccucuuggucggaucaugaggccucaagcggcgucaguuccgcauguccauaccaggguacacccucuuucuucaggaaugugguauggcugaucaagaaaaacaauacuuauccuaccauaaagcggagcuacaacaauacaaaccaagaagaccucuuaauucugugggggauccaccacuccaacaaugccgcugagcaggagaaacuuuaucagaacccaaccacuuacauuucaguuggaacaaguaccuugaaucagcgccuggugcccaaaaucgcaacgcgaagcaaggucaacggccaaucuggccguauggacuuuuucuggacuauccuaaaaccuaaugaugccauuaacuuugaauccaaugggaacuucauagcuccagaguacgccuauaagaucgugaaaaagggagauucagcgauuaugaaaagcggugugaaguacggcaauugcaacaccaagugucagacaccgaucggggcaauaaauaguucuaugcccuuucauaacauucacccucucacuaucggagaaugcccaaaauaugucaaguccaauaaacugguucuugccaccggccugagaaacagccccuugagggagcggcgcagaaagaggggucucuucggggcuaucgccggauuuauugaaggcggcuggcaggggaugguggacggaugguacgguuaucaucacucgaaugagcagggcucuggguacgcagcugacaaagaguccacacaaaaggccaucgauggaguaaccaacaaggugaacucaauuauagacaaaaugaauacgcaguucgaagcggucggccgggaguuuaacaaucuggaacgccgaaucgagaacuuaaauaagaaaauggaagaugguuuccuggacguguggacuuauaacgccgagcuccuuguucugauggagaaugaaagaacauuggauuuccacgacaguaacgugaagaaucuauacgauaaagucaggcugcagcuccgggacaacgcaaaggagcuggggaauggcuguuuugaauuuuaccauaagugcgauaacgaguguauggaaagcgugcguaauggaaccuaugacuacccucaauauuccgaggaggcucgccuuaaaagagaagagauuucuggcguaaagcuggaaagcaucgggacuuaccagaucuugucaauuuauaguacagccgcuuccagccucgcccuggcaauaaugguugccggauuaucucuguggaugugcucaaacgguagucuacagugcaggaucuguauuuga

SEQ ID NO: 135775 - RNA, 1704 nt, Artificial Sequence
  derived and/or modified CDS sequence (opt3) from hemagglutinin__InfluenzaA__AEO89289
auggagaagaucgugcugcuccuugccauugucagccuggcuaaauccgaccagauaugcaucggcuaccacgcaaacaauucuaccgaacaaguugauacaauuauggagaagaacgugacuguaacgcaugcccaggacaucuuggaaaagacccacaaugggaaguuaugugaucuggacggagugaaaccccuaauucucggugauugcucagucgcgggcuggcugcuugggaacccuaugugugacaaguucaucaaugugccagaguggaguuauauaguugaaaaggugaacccggcuaaugaucugugcuaccccggaaacuuuaaugacuaugaggaguugaaacaucuccugagcagaaucaaccacuucgaaaagauuaaaaucauuccuaaguccucuuggucggaucaugaggccucaagcggcgucaguuccgcauguccauaccaggguacacccagcuuuuucaggaaugugguauggcugaucaaaaagaacaauacuuauccuaccauaaagcggucuuacaacaauacaaaccaggaagaccucuuaauucugugggggauccaccacuccaacaauguugccgagcaagagaaacuuuaucagaacccaaccacuuacauuucagugggaacaaguaccuugaaucagcgccugguccccaagaucgcuacgcgaagcaaagugaacggccagucuggccguauggacuuuuucuggacuauccuaaagccuaaugauaccauuaacuuugaauccaaugggaacuucauagcaccagaguacgccuauaaaaucgugaagaaaggagauucagcuauuaugaaaagcggugucgaauacggcaauugcaacacaaagugucaaacuccgaucggggccauaaauaguucuaugcccuuucauaacauucacccucucaccaucggagagugcccaaaauauguuaaguccaauaaacuggugcuugcgacaggccugagaaacagccccuugagggaacggcgcagaaagaggggucucuucggggcaaucgccggauuuauugagggcggcuggcaggggaugguagacggaugguacgguuaucaucacucgaaugagcagggcucuggguacgcugccgacaaagaauccacccagaaggcaaucgauggagugacgaacaaggucaacucaauuauagacaaaaugaauacucaauucgaggcugugggccgggaauuuaacaaucuggagcgccgaaucgaaaacuuaaauaagaaaauggaggaugguuuccuggacguuuggacauauaacgccgagcuccuugugcugauggaaaaugagagaaccuuggauuuccacgacaguaacgucaagaaucuauacgauaaagugaggcugcagcuccgggacaacgcgaaggaacuggggaauggcuguuuugaguucuaccauaagugcgauaacgaauguauggagagcguacguaauggaacuuaugacuacccucgcuauuccgaggaagccagacuuaaaagggaggaaauuucuggcguuaagcuggagagcaucgggacauaccagaucuugucaauuuauaguaccgcagcuuccagccucgcccuggcuauaaugguggccggauuaucucuguggaugugcucaaacgguagucuacaaugccggaucuguauuuga

SEQ ID NO: 135776 - RNA, 1704 nt, Artificial Sequence
  derived and/or modified CDS sequence (opt3) from hemagglutinin__InfluenzaA__AEO89300
auggagaagaucgugcugcuccuugccauugucagccugguuaaauccgaccagauaugcaucggcuaccacgcuaacaauucuaccgaacaaguggauacaauuauggagaagaacguaacugugacgcaugcacaggacaucuuggaaaagacccacaaugggaaguuaugugaucuggacggagucaaaccccuaauucucagagauugcucaguggccgguuggcugcuuggcaacccuaugugugacgaguucaucaauguuccagaauggaguuauauaguggagaaggcgaacccggcuaaugaucugugcuaccccgggaacuuuaaugacuaugaggaauugaagcaucuccugagcaggaucaaccacuucgagaaaauucagaucauuccuaaguccucuuggucggaucaugaagccucaagcggagucaguuccgcauguccauaccagggcacacccagcuuuuuccggaaugugguauggcugaucaaaaagaacaauacuuauccuaccauaaaacgcagcuacaacaauacaaaccaagagaaccucuuaauucugugggguauccaccacuccaaugacgccgcugagcagauuaaacuuuaucagcauccaaccacuuacaucucaguugggacaaguaccuugaaccagcgacuggugcccaagaucgcaacgcguagcaaagucaauggacaaucuggcagaauggacuuuuucuggacuauucuaaagccuaacgaugccauaaauuuugaauccaacggcaauuucaucgcuccagaguacgccuauaaaauugugaaggaaggggauucagcgaucaugaaaagcgagguggaauacggaaacugcaauaccaagugucagacaccgauaggugcaauuaacaguucuaugcccuuucacaauauccauccucucacuaucggcgagugcccaaaauaugucaaguccaacaagcugguucuugccaccgggcugaggaauagccccuugcgggagcgcagaaggaaacggggacucuucggcgcuauugccgguuuuaucgaagggggauggcagggcaugguggacggcugguacggguaucaccacucgaacgagcagggaucugguuacgcagcugacaaggaauccacacaaaaagccauugauggcguaaccaauaaggugaacucaauaaucgacaaaaugaacacgcaguucgaggcggucgggcgcgaauuuaauaaccuggagcgaagaauugagaauuuaaacaagaagauggaagauggauuccuggacguguggacuuauaaugccgagcuccuuguucugauggaaaacgagaggacauuggauuuccaugacaguaaugugaaaaaccuauacgauaagguccggcugcagcuccgugacaaugcaaaagaacugggcaacgguuguuuugaguucuaccacaagugcgauaaugaguguauggaaagcgugcgcaacgggaccuaugacuacccucaauauuccgaggaagcuagacuuaaaagggaggagaucaauggcguaaagcuggaaucuaugggaacuuaccagaucuugagcauuuauucaacaguugccaguucccucgcucuggccauaaugguggcaggcuuaucuuuuuggaugugcucuaacgggucacugcagugccggaucuguauuuga

SEQ ID NO: 135777 - RNA, 1704 nt, Artificial Sequence
  derived and/or modified CDS sequence (opt3) from hemagglutinin__InfluenzaA__AEO89311
auggagaagaucgugcuccuguucgccauugucagccuuguuaaauccgaccacauaugcaucggcuaccaugcuaacaauucuaccgaacagguggauacaauuauggagaagaacguaacugugacgcacgcacaagacauccuggaaaagacccauaaugggaaguugugugauuuaaacggagucaaaccccugauucuaaaggacugcucaguggccgguuggcuccugggcaauccuaugugugaugaguuuaucaacguuccagaauggaguuauauaguggagaaggcgaauccggcuaacgaccuuugcuaccccgggaauuucaacgauuaugaggaacugaaacacuugcucagcagaaucaaucauuuugagaagauucagaucauuccuaaagacuccuggucugaucacgaagccucgcugggagucucagcagccuguccauaccagggcaacagcaguuucuuuaggaaugugguauggcugaucaagaaagacaacgcuuaucccacaauaaagaaguccuacaauaacacuaaccaggaggaucucuuaauucugugggguauccaccauccuaaugacgaggcagaacaaacccggcuuuaucagaacccaacaaccuacauuucuaucgggacuagcacauugaaucagcgccugguucccaaaaucgccacccgauccaaggugaacggacagucaggccguauugauuucuuuuggacgauacuaaaaccuaaugacgcuauccacuucgagaguaacggcaauuuuauugccccagaauacgcguauaagaucgucaaaaagggggacagcacuauaaugaaaucugagguggaauacggaaacugcaauaccagaugucaaacaccgaugggugcaauuaacuccucaaugcccuuccauaauauccacccucucacuaucggcgagugcccaaaguaugugaaaagcaccaaacugguccuugccacagggcugaggaacaguccccagcgggagcgcagaaggaagcggggauuguuuggcgcuauugccgguuucaucgaagggggauggcagggcaugguugauggcugguacggguaucaccauucuaaugagcagggauccgguuacgcagcugacaaagaaagcacccaaaaggccauugauggcgugacgaacaaaguaaauucgauaaucgacaagaugaacacucaguuugaggcgguggggcgcgaguucaacaagcucgaacgaagaauugagaaucugaacaaaaagauggaagauggauucuuagacgucuggacauauaaugccgagcugcucgugcuuauggaaaacgagaggacccuggauuuucacgacucuaauguuaaaaacuuguacgauaaggugcggcuacagcugcgugacaaugcaaaagaacucggcaacgguuguuucgaguuuuaccauaagugcaauaacgaguguauggaauccguccgcaaugggacuuaugauuacccucaauauucagaggaagcuagacugaagagggaggagaucaguggcgugaaacuugaaagcaucggaauuuaccagauacuguccaucuauucuacaguagccagcucauugguucucgcuauuaugauggccggccugaguuuauggaugugcuccaacgggagccugcagugccggaucuguauuuga

SEQ ID NO: 135778 - RNA, 1701 nt, Artificial Sequence; identical to SEQ ID NO: 129976
  derived and/or modified CDS sequence (opt3) from hemagglutinin__InfluenzaA__AEO99215

SEQ ID NO: 135779 - RNA, 1698 nt, Artificial Sequence
  derived and/or modified CDS sequence (opt3) from hemagglutinin__InfluenzaA__AEQ38187
augaaggugaaacugcucguccuucugugcaccuucacagccacuuacgcugacacgaucuguauuggcuaucacgcaaacaauagcaccgauacaguugacacuguguuggagaagaacguaaccgugacacauuccgucaauuuacuggaaaacucucacaaugggaaacuaugccuccugaagggaauagcgccccuucagcuggguaacuguucaguggccggcuggaucuuggggaauccugagugcgaacuccugauuaguaaagagagcugguccuacaucguugaaaagccaaacccggagaauggaaccuguuaucccggccauuuugcugauuacgaggaacugagagagcaacucucuucggugagcucauucgaaagguuugagauuuucccuaaggagaguuccuggccaaaccacacugucacaggugccucugcaagcugcucccauaauggggaaaacucauuuuaucggaauuuacuguggcuuaccggaaagaacggcuuguaccccaaucugaguaagagcuaugccaacaacaaagagaaggaagugcuaguacucuggggcguucaccacccuccaaauaucgcugaccagaaaacgcuguaccauacugagaacgcauacgugucugucguguccucacacuauagccgcaaguucacccccgaaauagccaagcgaccuaaagugcgugaucaggaggggagaaucaauuacuauuggacacuucuggagccaggagacacuauuaucuuugaagcuaacgguaauuugauugccccgagguacgcguucgcacucagucggggcuuugggucuggaaucauaaacuccaaugcccccauggauaagugugacgcuaaaugccagaccccucaaggcgccauuaacagcucgcugccauuccagaauguccaucccguuacaaucggugaguguccuaaguaugugcgcucugcaaaauuaagaaugguaaccgggcugaggaacauuccauccauccagucacggggacucuuuggcgcuaucgccggcuucauugaagggggauggacggguaugguggauggcugguacggguaucaccaccagaaugagcaaggaaguggcuacgcggccgaccagaaaagcacucagaacgcaauaaaugguaucacaaacaaagucaauuccgugauugaaaagaugaacacccaguuuacugcuguugggaaggaguucaacaaacuugagcgccgaauggaaaaucugaacaagaaaguggaugacggcuucaucgauauauggacauacaaugccgaguugcuaguccugcucgaaaacgagagaacccuggacuuucaugacucuaaugugaagaaccuuuaugaaaaaguaaagagccaacugaagaauaacgcuaaagagauuggaaauggcugcuucgaguuuuaccacaaguguaacgaugaaugcauggagucaguuaaaaaugggacguaugacuaccccaaguauagugaagaguccaaauugaacagggagaagaucgauggagugaagcucgaaagcaugggugucuaccagauccuggccauuuauucuaccguggcaucaaguuuaguccugcuagugagccucggcgccaucuccuucuggaugugcucuaaugggucgcugcagugucggauuugcauauga

SEQ ID NO: 135780 - RNA, 1698 nt, Artificial Sequence; identical to SEQ ID NO: 135779
  derived and/or modified CDS sequence (opt3) from hemagglutinin__InfluenzaA__AEQ38188

SEQ ID NO: 135781 - RNA, 1698 nt, Artificial Sequence
  derived and/or modified CDS sequence (opt3) from hemagglutinin__InfluenzaA__AEQ38189
augaaggugaaacugcucguccuucugugcaccuucacagccacuuacgcugacacgaucuguauuggcuaucacgcaaacaauagcaccgauacaguugacacuguguuggagaagaacguaaccgugacacauuccgucaauuuacuggaaaacucucacaaugggaaacuaugccuccugaagggaauagcgccccuucagcuggguaacuguucaguggccggcuggaucuuggggaauccugagugcgaacuccugauuaguaaagagagcugguccuacaucguugaaaagccaaacccggagaauggaaccuguuaucccggccauuuugcugauuacgaggaacugagagagcaacucucuucggugagcucauucgaaagguuugagauuuucccuaaggagaguuccuggccaaaccacacugucacaggugugucugccagcugcucccauaauggggaaaacucauuuuaucggaauuuacuguggcuuaccggaaagaacggcuuguaccccaaucugaguaagagcuaugcaaacaacaaagagaaggaaguucuaguacucuggggcgugcaccacccuccaaauaucgccaaccagaaaacgcuguaccauacugagaaugcuuacgucucugugguguccucacacuauagccgcaaguucacccccgaaauagcaaagcgaccuaaaguccgugaccaggaggggagaaucaacuacuauuggacacuucuggagccaggagauacuauuaucuuugaagccaaugguaacuugauugcuccgagguacgccuucgcgcucagucggggcuuugggucuggaaucauaaauuccaacgcacccauggacaagugugaugccaaaugccagaccccucaaggcgcuauuaauagcucgcugccauuccagaacguucaucccgugacaaucggugaguguccuaaguauguacgcucugccaaauuaagaauggugaccgggcugaggaauauuccauccauccagucacggggacucuuuggcgcaaucgcuggcuucauugaagggggauggacggguauggucgacggcugguacggguaucaccaccagaacgagcaaggaaguggcuacgccgcggaucagaaaagcacucagaaugccauaaacgguaucacaaauaaagugaacuccguuauugaaaagaugaacacccaguuuacugcaguggggaaggaguucaauaaacuugagcgccgaauggaaaaccugaauaagaaagucgacgauggcuucaucgacauauggacauacaacgcugaguugcuagugcugcucgaaaaugagagaacccuggauuuucaugacucuaacguaaagaaucuuuaugaaaaaguuaagagccaacugaagaacaaugccaaagagauuggaaacggcugcuucgaguuuuaccacaaguguaaugacgaaugcauggagucagugaaaaacgggacguaugauuaccccaaguauagugaagaguccaaauugaauagggagaagaucgacggagucaagcucgaaagcauggguguguaccagauccuggcuauuuauucuaccgucgccucaaguuuagugcugcuaguuagccucggcgcaaucuccuucuggaugugcucuaacgggucgcugcagugucggauuugcauauga

SEQ ID NO: 135782 - RNA, 1698 nt, Artificial Sequence
  derived and/or modified CDS sequence (opt3) from hemagglutinin__InfluenzaA__AEQ38190
augaaggugaaacugcucguccuucugugcaccuucacagccacuuacgcugacacgaucuguauuggcuaucacgcaaacaauagcaccgauacaguugacacuguguuggagaagaacguaaccgugacacauuccgucaauuuacuggaaaacucucacaaugggaaacuaugccuccugaagggaauagcgccccuucagcuggguaacuguucaguggccggcuggaucuuggggaauccugagugcgaacuccugauuaguaaagagagcugguccuacaucguugaaaagccaaacccggagaauggaaccuguuaucccggccauuuugcugauuacgaggaacugagagagcaacucucuucggugagcucauucgaaagguuugagauuuucccuaaggagaguuccuggccaaaccacacugucacaggugugucugccagcugcucccauaauggggaaaacucauuuuaucggaauuuacuguggcuuaccggcaaaaacggauuguaccccaaucugaguaagccuuaugcaaacaacaaagagaaggaaguucuaguacucuggggcgugcaccacccacccaauaucgccguccagaaaacgcuguaccauacugagaacgcuuacgugagcguggucucuucccacuauucacgcaaguucaccccugaaauagcaaagcgaccaaaaguucgugaccaggaggggagaaucaauuacuauuggacacuucuggagccgggagauacuauuaucuuugaagccaacgguaauuugauugcucccagguacgccuucgcgcucagccggggcuuugggaguggaaucauaaacucuaaugcaccuauggacaagugugaugccaaaugccagaccccacaaggcgcuauuaacuccagccugcccuuccagaaugugcauccuguaacaaucggugaguguccaaaguaugugcgcucggccaaauuaagaauggucaccgggcugaggaacauucccucuauccagucccggggacucuuuggcgcaaucgcuggcuucauugaagggggauggacggguaugguggacggcugguacggguaucaccaccagaaugagcaaggaucaggcuacgccgcggaucagaagaguacucagaacgccauaaaugguaucacaaacaaaguuaauagcgugauugaaaagaugaacacccaguuuacugcagucgggaaggaguucaacaaacuugagcgccgaauggaaaaucugaacaagaaaguggacgauggcuucaucgacauauggacauacaaugcugaguugcuaguacugcucgaaaacgagagaacccuggauuuucaugacuccaauguuaagaaccuuuaugaaaaagugaagucucaacugaagaauaacgccaaagagauuggaaauggcugcuucgaguuuuaccacaaguguaacgacgaaugcauggagagcgucaaaaaugggacguaugauuacccgaaguauucagaagagaguaaauugaacagggagaagaucgacggagugaagcucgaauccaugggugucuaccagauccuggcuauuuauagcaccguggccucuucauuaguucugcuagugagucucggcgcaaucagcuucuggaugugcuccaaugggucucugcagugucggauuugcauauga

SEQ ID NO: 135783 - RNA, 1698 nt, Artificial Sequence; identical to SEQ ID NO: 131674
  derived and/or modified CDS sequence (opt3) from hemagglutinin__InfluenzaA__AEQ38191

SEQ ID NO: 135784 - RNA, 1698 nt, Artificial Sequence
  derived and/or modified CDS sequence (opt3) from hemagglutinin__InfluenzaA__AEQ38192
augaaggugaaacugcucguccuucugugcaccuucacagccacuuacgcugacacgaucuguauuggcuaucacgcaaacaauagcaccgauacaguugacacuguguuggagaagaacguaaccgugacacauuccgucaauuuacuggaaaacucucacaaugggaaacuaugccuccugaagggaauagcgccccuucagcuggguaacuguucaguggccggcuggaucuuggggaauccugagugcgaacuccugauuaguaaagagagcugguccuacaucguugaaaagccaaacccggagaauggaaccuguuaucccggccauuuugcugauuacgaggaacugagagagcaacucucuucggugagcucauucgaaagguuugagauuuucccuaaggagaguuccuggccaaaccacacugucacaggugugucugccagcugcucccauaauggggaaucaaguuuuuaucggaacuuacuguggcuuaccggaaagaauggcuuguaccccaaccugagcaagucuuaugcaaauaacaaagagaaggaagugcuaguucucuggggcgugcaccacccuccauccaucucagaccagaaaacgcuguaccauacugagaacgccuacgucagcguggugaguucucacuauucccgcaaguucacccccgaaauaacaaagcgaccuaaaguccgugaucaggaggggagaaucaauuacuauuggacucuucuggagccaggagacaccauuaucuuugaagcuaacgguaauuugauugcaccgagguacgccuucgcucucagccggggcuuugggucgggaaucauaaacucuaauacacccauggauaagugugacaccaaaugccagacgccucaaggcgccauuaacuccucacugccauuccagaauguucaucccgugacuaucggugaguguccuaaguauguacgcagugcgaaauuaagaauggugacagggcugaggaacauuccaagcauccagucccggggacucuuuggcgcaaucgccggcuucauugaagggggauggaccgguauggucgauggcugguacggguaucaccaccagaaugagcaaggaucuggcuacgcugccgaccagaaaagcacucagaacgcaauaaaugguaucacaaacaaaguaaauucaguuauugaaaagaugaacacccaguuuacggcuguggggaaggaguucaauaaacuugagcgccgaauggaaaaccugaacaagaaagucgaugacggcuucaucgauauauggaccuacaaugccgaguugcuagugcugcucgaaaacgagagaacacuggacuuucaugacaguaauguaaagaaccuuuaugaaaaaguuaagucccaacugaagaauaacgcgaaagagauuggaaauggcugcuucgaguuuuaccacaaguguaacgaugaaugcauggagagcgugaaaaaugggacuuaugacuaccccaaguauucugaagagucaaaauugaacagggagaagaucgauggagucaagcucgaaaguauggguguguaccagauccuggccauuuauagcaccgucgcauccucuuuagugcugcuaguuucgcucggcgcuaucagcuucuggaugugcuccaaugggucacugcagugucggauuugcauauga

SEQ ID NO: 135785 - RNA, 1698 nt, Artificial Sequence
  derived and/or modified CDS sequence (opt3) from hemagglutinin__InfluenzaA__AEQ38193
augaaggugaaacugcucauccuucugugcaccuucacagccacuuacgcugacacgauuuguauaggcuaucacgcaaacaauagcaccgauacagucgacacuguuuuggagaagaacgugaccguaacacauuccgugaauuuacuggaaaacucucacaaugggaaacuaugccuccugaagggaaucgcgccccuucagcuggguaacuguucagucgccggcuggauuuuggggaauccugagugcgaacuccugaucaguaaagagagcugguccuacauuguggaaaagccaaacccggagaauggaaccuguuaucccggccauuuugcugauuacgaggaacugagagagcaacucucuucgguuagcucauucgaaagguuugagaucuucccuaaggagaguuccuggccaaaccacacugugacaggugucucugccagcugcucccauaauggggaaucaaguuuuuaucggaacuuacuguggcuuaccggcaaaaauggauuguaccccaaccugagcaagucuuaugcaaauaacaaagagaaggaagugcuaguacucuggggcguucaccacccuccaaacauaguggaccagaaaacgcuguaccgcacugagaaugccuacgucuccguggugucaagccauuauagucgaaaguucacccccgaaaucgcuaagcguccuaaagucagagaucaggaggggaggauuaacuacuauuggacacuucuggagccaggagacacuaucauuuuugaagcaaaugguaacuugaucgccccgcgguacgcuuucgcccucucucgcggcuuuggguccggaauaauuaauagcaacgcgcccauggauaagugugacgcaaaaugccagaccccucaaggcgccaucaauucgucucugccauuccagaacguucaccccgugacaauuggugaguguccuaaguauguaagauccgcuaaauuaaggauggugaccgggcugcggaauaucccaucaauccagagucgcggacucuuuggcgccauugcaggcuucauagaagggggauggacggguauggucgauggcugguacggguaucaucaccagaacgagcaaggaagcggcuacgcugccgaccagaaguccacucagaaugcgaucaacgguauuacaaauaaagugaacucuguuaucgaaaagaugaauacccaguuuacugccguggggaaggaguucaacaaacuugagcgaagaauggaaaaccugaauaagaaagucgaugacggcuucauagauauuuggacauacaacgcagaguugcuagugcugcucgaaaaugagaggacccuggacuuucacgacagcaacguaaagaaucuuuaugaaaaaguuaagucacaacugaagaacaaugcuaaagagaucggaaacggcugcuucgaguuuuaccauaaguguaaugaugaaugcauggagagugugaaaaacgggacguaugacuaccccaaguauuccgaagagagcaaauugaaucgggagaagaucgauggagucaagcucgaaucuauggguguguaccagauucuggccaucuauucaaccgucgcuaguagcuuagugcugcuaguuucccucggcgccauuucuuucuggaugugcucgaacgggagccugcagugucguauaugcaucuga

SEQ ID NO: 135786 - RNA, 1698 nt, Artificial Sequence
  derived and/or modified CDS sequence (opt3) from hemagglutinin__InfluenzaA__AEQ38194
augaaggugaaacugcucguccuucugugcaccuucacagccacuuacgcugacacgaucuguauuggcuaucacgcaaacaauagcaccgauacaguugacacuguguuggagaagaacguaaccgugacacauuccgucaauuuacuggaaaacucucacaaugggaaacuaugccuccugaagggaauagcgccccuucagcuggguaacuguucaguggccggcuggaucuuggggaauccugagugcgaacuccugauuaguaaagagagcugguccuacaucguugaaaagccaaacccggagaauggaaccuguuaucccggccauuuugcugauuacgaggaacugagagagcaacucucuucggugagcucauucgaaagguuugagauuuucccuaaggagaguuccuggccaaaccacacugucacaggugugucugccagcugcucccauaauggggaaucaaguuuuuaucggaacuuacuguggcuuaccggcaaaaauggauuguaccccaaccugagcaagucuuaugcaaauaacaaagagaaggaaguucuaguacucuggggcgugcaccacccuccauccaucucagaccagaaaacgcuguaccauacugagaacgccuacgucagcguggugaguucucacuauucccgcaaguucacccccgaaauagcuaagcgaccuaaaguccgugaucaggaggggagaaucaauuacuauuggacacuucuggagccaggagacacuauuaucuuugaagcaagcgguaacuugauugccccgagguacgcuuucgcccucucgcggggcuuugggucuggaaucauaaauuccaacgcgcccauggauaagugugacgcaaaaugccagaccccucaaggcgccauuaauucaagucugccauuccagaacguucaucccgugacaaucggugaguguccuaaguauguacgcagcgcuaaauuaagaauggugaccgggcugaggaauauuccauccauccagucucggggacucuuuggcgccaucgcaggcuucauugaagggggauggacggguauggucgauggcugguacggguaucaccaccgcaacgagcagggaagcggcuacgcugccgaccaaaagucaacucagaaugcgauaaacgguaucacaaauaaagugaacaguguuauugaaaagaugaauacccaguuuacugccguggggaaggaguucaacaaacuugagcgaagaauggaaaaucugaacaagagggucgaugacggcuucaucgauauauggacauacaacgcagaguugcuagugcugcucgaaaaugagcggacccuggacuuucaugacuccaacguuaaaaaucuuuaugaaaagguaaaaagccagcugaagaacaaugcuaaggagauuggaaacggcugcuucgaguuuuaccacaaauguaaugaugaaugcauggagucugugaagaacgggacguaugacuaccccaaauauucagaagagaguaaguugaaucgugagaaaaucgauggagucaagcucgaaagcauggguguguaccaaauccuggccauuuauuccaccgucgcuucuucguuagugcugcuaguuagccucggcgccaucuccuucuggaugugcucaaacgggagucugcagugucgcauuugcauauga

SEQ ID NO: 135787 - RNA, 1698 nt, Artificial Sequence
  derived and/or modified CDS sequence (opt3) from hemagglutinin__InfluenzaA__AEQ38195
augaaggugaaacugcucguccuucugugcaccuucacagccacuuacgcugacacgaucuguauuggcuaucacgcaaacaauagcaccgauacaguugacacuguguuggagaagaacguaaccgugacacauuccgucaauuuacuggaaaacucucacaaugggaaacuaugccuccugaagggaauagcgccccuucagcuggguaacuguucaguggccggcuggaucuuggggaauccugagugcgaacuccugauuaguaaagagagcugguccuacaucguugaaaagccaaacccggagaauggaaccuguuaucccggccauuuugcugauuacgaggaacugagagagcaacucucuucggugagcucauucgaaagguuugagauuuucccuaaggagaguuccuggccaaaccacacugucacaggugccucugcaagcugcucccauaauggggaaaacucauuuuaucggaauuuacuguggcuuaccggaaagaacggcuuguaccccaaucugaguaagagcuaugccaacaacaaagagaaggaagugcuaguacucuggggcguucaccacccuccaaauaucgcuaaccagaaaacgcuguaccauacugagaaugcauacgugucugucguguccucacacuauagccgcaaguucacccccgaaauagccaagcgaccuaaagugcgugaccaggaggggagaaucaacuacuauuggacacuucuggagccaggagauacuauuaucuuugaagcuaaugguaacuugauugccccgagguacgcguucgcacucagucggggcuuugggucuggaaucauaaauuccaacgcccccauggacaagugugaugcuaaaugccagaccccucaaggcgccauuaauagcucgcugccauuccagaacguccaucccguuacaaucggugaguguccuaaguaugugcgcucugcaaaauuaagaaugguaaccgggcugaggaauauuccauccauccagucacggggacucuuuggcgcuaucgccggcuucauugaagggggauggacggguaugguggacggcugguacggguaucaccaccagaacgagcaaggaaguggcuacgcggccgaucagaaaagcacucagaaugcaauaaacgguaucacaaauaaagucaacuccgugauugaaaagaugaacacccaguuuacugcuauggggaaggaguucaauaaacuugagcgccgaauggaaaaccugaauaagaaaguugacgauggcuucaucgacauauggacauacaacgccgaguugcuagugcugcucgaaaaugagagaacccuggauuuucaugacucuaacgucaagaaucuuuaugaaaaaguaaagagccaacugaagaacaaugcuaaagagauuggaaacggcugcuucgaguuuuaccacaaguguaaugacgaaugcauggagucagugaaaaacgggacguaugauuaccccaaguauagugaagaguccaaauugaauagggagaagaucgacggaguuaagcucgaaagcauggguguguaccagauccuggccauuuauucuaccgucgcaucaaguuuagugcugcuagucagccucggcgccaucuccuucuggaugugcucuaacgggucgcugcagugucggauuugcauauga

SEQ ID NO: 135788 - RNA, 1698 nt, Artificial Sequence
  derived and/or modified CDS sequence (opt3) from hemagglutinin__InfluenzaA__AEQ38196
augaaggugaaacugcucguccuucugugcaccuucacagccacuuacgcugacacgaucuguauuggcuaucacgcaaacaauagcaccgauacaguugacacuguguuggagaagaacguaaccgugacacauuccgucaauuuacuggaaaacucucacaaugggaaacuaugccuccugaagggaauagcgccccuucagcuggguaacuguucaguggccggcuggaucuuggggaauccugagugcgaacuccugauuaguaaagagagcugguccuacaucguugaaaagccaaacccggagaauggaaccuguuaucccggccauuuugcugauuacgaggaacugagagagcaacucucuucggugagcucauucgaaagguuugagauuuucccuaaggagaguuccuggccaaaccacacugucacaggugccucugcaagcugcucccauaauggggaaaacucauuuuaucggaauuuacuguggcuuaccggaaagaacggcuuguaccccaaucugaguaagagcuaugccaacaacaaagagaaggaagugcuaguacucuggggcguucaccacccuccaaauaucgcugaccagaaaacgcuguaccauacugagaacgcauacgugucugucguguccucacacuauagccgcaaguucacccccgaaauagccaagcgaccuaaagugcgugaucaggaggggagaaucaauuacuauuggacacuucuggagccaggagacacuauuaucuuugaagcuaacgguaauuugauugccccgagguacgcguucgcacucagucggggcuuugggucuggaaucauaaacuccaaugcccccauggauaagugugacgcuaaaugccagaccccucaaggcgccauuaacagcucgcugccauuccagaauguccaucccguuacaaucggugaguguccuaaguaugugcgcucugcaaaauuaagaaugguaaccgggcugaggaacauuccauccauccagucacggggacucuuuggcgcuaucgccggcuucauugaagggggauggacggguaugguggauggcugguacggguaucaccaccagaaugagcaaggaaguggcuacgcggccgaccagaaaagcacucagaacgcaauaaaugguaucacaaacaaagucaauuccgugauugaaaagaugaacacccaguuuacugcuguugggaaggaguucaacaaacuugagcgccgaauggaaaaucugaacaagaaaguggaugacggcuucaucgauauauggacauacaaugccgaguugcuaguccugcucgaaaacgagagaacccuggacuuucaugacucuaaugugaagaaccuuuaugaaaaaguaaagagccaacugaagaauaacgcuaaagagauuggaaauggcugcuucgaguuuuaccacaaguguaacgaugaaugcauggagucaguuaaaaaugggacguaugaauaccccaaguauagugaggaguccaaauugaacagggaaaagaucgacggagugaagcucgagagcaugggugucuaccagauccuggccauuuauucuaccguggcaucaaguuuaguccugcuagugagccucggcgccaucuccuucuggaugugcucuaaugggucgcugcagugucggauuugcauauga

SEQ ID NO: 135789 - RNA, 1698 nt, Artificial Sequence; identical to SEQ ID NO: 135779
  derived and/or modified CDS sequence (opt3) from hemagglutinin__InfluenzaA__AEQ38197

SEQ ID NO: 135790 - RNA, 1698 nt, Artificial Sequence; identical to SEQ ID NO: 135779
  derived and/or modified CDS sequence (opt3) from hemagglutinin__InfluenzaA__AEQ38198

SEQ ID NO: 135791 - RNA, 1701 nt, Artificial Sequence; identical to SEQ ID NO: 135098
  derived and/or modified CDS sequence (opt3) from hemagglutinin__InfluenzaA__AEQ62909

SEQ ID NO: 135792 - RNA, 1701 nt, Artificial Sequence
  derived and/or modified CDS sequence (opt3) from hemagglutinin__InfluenzaA__AEQ62910
augaaggccauccugguggucaugcucuacaccuucgcuacagcaaacgccgacacucuuugcauuggcuaucacgcgaauaacagcacggauaccguugacacagugcuggagaaaaauguaacugugacccauuccgucaacuuguuagaagauaagcacaaugggaaacuguguaagcuaagaggaguggcuccccuccaucuggguaaaugcaacauagccggcuggauccuugggaauccugagugugaaucucugucaacagcaaguagcugguccuacauuguugagaccgccucuccagacaacggaacuugcuauccgggcgauuuuaucgacuacgaagaguugagggagcagcucucgucagugagcaguuucgaacgguuugagauuuuccccaagacauccucuuggccuaaucacgauagcaacaagggugucaccgcugcauguccacaugccggggcuaaauccuuuuauaagaaucugauguggcuggugaaaaagggaaacucauaccccaaacucaguaagagcuauaucaaugacaagggcaaagaaguauuaguucuguggggcauacaccacccuccaacgucugccgaucaacagucccuuuaccagaacgcggacgcauacguguucgucgggacuucacgcuauagcaagaaauuuaagcccgagaucgccauucgaccuaaagugcguggacaggaggguagaaugaauuacuauuggaccuugguggaaccaggcgauaagaucacauucgaggcuacugggaaccuggucguuccgagguacgccuuugcaauggaacggaacgcuggaaguggcauuaucauaucugacacccccgugcaugauugcaauacaaccugucaauccccuaaaggugccauuaacacgagccuaccauuccagaauauccaccccauuacuaucggggagugcccuaaguauguaaagucgacaaaacuccgccuggcgaccggacuuagaaacgugccaucuguccaguccaggggccuguuuggcgccaucgcaggguucauugaaggagguuggacuggcaugguggacgggugguacggauaucaucaccagaaugagcaaggcucagguuacgcugccgacuugaagaguacacagaacgcuauagaugagaucaccaauaaaguuaacagcgugauugaaaagaugaauacgcaguuuaccgccgucgggaaagaguucaaccagcucgaaaagcggaucgagaaucugaacaagaaaguggacgauggcuucuuagacauauggacauacaaugcagaacugcucguacuucuggagaacgagcgcacuuuggauuaucacgacuccaauguuaagaaccuauacgaaaaagugcgaucucaacugaagaacaaugccaaagagauuggaaacggcuguuuugaguucuaucauaagugcgauaauaccuguauggaaagcgucaagaacgggacauacgacuaucccaaauacucagaagaggcuaagcucaauagagaggaaaucgauggagugaaacuggagaguacuaggaucuaucagauucuugcgaucuacuccaccgucgcaagcucucugguguugguugugucacucggugccauuaguuuuuggaugugcagcaacggcucccugcagugccggauauguaucuga

SEQ ID NO: 135793 - RNA, 1701 nt, Artificial Sequence; identical to SEQ ID NO: 134915
  derived and/or modified CDS sequence (opt3) from hemagglutinin__InfluenzaA__AEQ62911

SEQ ID NO: 135794 - RNA, 1701 nt, Artificial Sequence; identical to SEQ ID NO: 135098
  derived and/or modified CDS sequence (opt3) from hemagglutinin__InfluenzaA__AEQ62912

SEQ ID NO: 135795 - RNA, 1701 nt, Artificial Sequence
  derived and/or modified CDS sequence (opt3) from hemagglutinin__InfluenzaA__AEQ62915
augaaggccauccuggugguccuccuuuacaccuucgcuacagcaaacgccgacacucugugcauuggcuaucacgcgaauaacagcacggauaccguugacacaguguuggagaaaaauguaacugugacccauuccgucaacuuacuggaagauaagcacaaugggaaacuauguaagcucagaggaguggcuccccugcaucuugguaaaugcaacauagccggcuggauccuggggaauccugagugugaaucuuugucaacagcaaguagcugguccuacauuguugagaccucuucgucagacaacggaacuugcuauccaggcgauuuuaucaauuacgaggagcucagggagcagcugagcaguguguccucuuucgaacgguuugagauuuucccgaagacaagcuccuggcccaaccacgacucaaauaagggugucaccgccgcuuguccucaugcaggggccaaaaguuuuuauaagaaccugaucuggcucgugaaaaagggaaauagcuacccaaaauuaucuaaguccuauauaaacgauaagggcaaagaaguacugguucuuuggggcauccaccaccccucaacgacugcugaccaacagagcuuguaccagaaugccgaugcguacguguucgucgggaccagucgcuauucuaagaaauuuaagccugagauugcaauccgaccaaaagugcgugaccaggagggaagaaugaacuacuauuggacacugguggaacccggugauaagauuacuuucgaggccaccggcaaccuagucguuccuagguacgcuuuugccauggaacggaaugcaggguccggaaucauaauuagcgacacaccagugcaugauugcaacaccacgugucaaacuccgaaaggcgcuaucaauacaucgcuccccuuccagaacauucacccuaucaccaucgguaagugcccaaaguauguaaaaucuacuaagcugcgccuugccacagggcugagaaaugugcccuccauucagucaaggggauuguuuggcgcgauagccggcuucaucgaagggggauggaccgguauggucgacggcugguacggguaucaucaccagaacgaacaaggaaguggcuacgcagcugaccucaaaagcacgcagaaugccauugauaagaucaccaacaaaguuaauuccgugauagagaagaugaacacacaguuuacugcuguggguaaggaguucaaucaccuggaaaaacggauugagaacuuaaauaagaaagucgacgauggguuccuggacaucuggaccuacaacgccgaacuccuugugcuguuggagaaugaacgcacacuagauuaucaugacucuaacguaaagaaccuguacgagaaaguucgaaaucagcucaagacuaacgcaaaggagaucggcaauggauguuuugaguucuaucacaaaugcgauaacaccuguauggaaagcgugaagaauggcacauacgacuauccuaaauacucagaagaggccaagcugaacagagaagagauugauggggucaaacuugagaguaccaggaucuaucaaauucuggcuauauacuccacuguggcgagcucuuugguccucgugguuucacugggagcaaucaguuuuuggaugugcagcaaugguuccuuacagugccggauuuguaucuga

SEQ ID NO: 135796 - RNA, 1701 nt, Artificial Sequence; identical to SEQ ID NO: 131459
  derived and/or modified CDS sequence (opt3) from hemagglutinin__InfluenzaA__AER08646

SEQ ID NO: 135797 - RNA, 1701 nt, Artificial Sequence; identical to SEQ ID NO: 133467
  derived and/or modified CDS sequence (opt3) from hemagglutinin__InfluenzaA__AER08648

SEQ ID NO: 135798 - RNA, 1701 nt, Artificial Sequence
  derived and/or modified CDS sequence (opt3) from hemagglutinin__InfluenzaA__AER08652
augaagaccaucauugcccugagcuacauacucugccuuguguucgcucagaaacugcccggcaacgacaauuccacagcaacuuuguguuuagggcaccaugccgucccuaacggaacgaucguuaagaccauuacaaaugaucaaaucgaggugacuaacgcgaccgaacugguacagucuucaaguacaggugagauuugcgacagcccacaccagauccuagauggcaaaaauuguacccucauagacgcucugcuuggggauccgcagugcgacggauuucaaaacaagaaaugggaucuguucguggaaagauccaaggccuauucuaauuguuaccccuaugacgucccugauuacgcaucguugaggucacucguggccagcaguggcacucuggaguuuaacaaugaauccuucaacuggacagguguuacccagaaugggacgucuagcgcuugcauccggcgcuccaagaacucauuuuucagucgacugaauuggcucacucauuuaaacuuuaaauauccagcacugaaugugaccaugcccaacaacgagcaguucgacaaacuuuacauuuggggaguccaccauccuggcacagauaaagaccagaucuuuuuguaugcccaagcuagcggccguauuacugugucuaccaagagaucccagcagacagccaucccaaauauagggucaaggccccggguacgcaacauuccuagcagaaucaguauuuacuggaccaucguuaaaccaggagauauccugcuaauuaauucuacggguaaccucauagcgccgaggggcuacuucaagauccgguccggaaagagcucgauuaugcgcucugacgcacccaucgggaaauguaauuccgagugcauaacuccuaacggcucaauuccaagugacaagcccuuucagaaugugaaccgaaucacauauggugccuguccuagauacgucaaacaaaauacccugaaacuugcuacugggaugaggaacgugccagaaaagcagacacggggaaucuucggcgccauugcaggcuuuaucgagaaugggugggaaggaaugguggaugguugguauggcuuccgucaccagaacagcgaggggcgcggacaagcugccgaccugaaguccacccaggcggccauugaucagauaaauggcaaauugaacagacucaucgguaagacgaaugagaaguuccaccagauugaaaaagaguuuucugaagucgaggggaggauccaagaccuggaaaaguacguugaggauaccaaaaucgacuuauggagcuauaacgcagagcugcucguggcucuugaaaaccagcauacaauugaucugacugacucagagaugaauaaguuguucgaaaagaccaagaagcagcuacgggagaacgccgaagauaugggcaauggaugcuuuaaaauauaccacaagugugacaacgcuugcaucggcaguauucgaaaugggacauaugaucaugacguauaccgcgacgaggcccugaacaauagauuccagaucaaaggaguggagcucaaguccgguuacaaagauuggauucuguggaucagcuuugcaauaucuugcuuccuucugugugucgccuugcucggcuuuaucaugugggcuugccaaaaggggaacauuagguguaauaucugcauuuga

SEQ ID NO: 135799 - RNA, 1701 nt, Artificial Sequence; identical to SEQ ID NO: 135798
  derived and/or modified CDS sequence (opt3) from hemagglutinin__InfluenzaA__AER08654

SEQ ID NO: 135800 - RNA, 1701 nt, Artificial Sequence
  derived and/or modified CDS sequence (opt3) from hemagglutinin__InfluenzaA__AER08656
augaagaccaucauugcccugagcuacauacucugccuuguguucgcucagaaacugcccggcaacgacaauuccacagcaacuuuguguuuagggcaccaugccgucccuaacggaacgaucguuaagaccauuacaaaugaucaaaucgaggugacuaacgcgaccgaacugguacagucuucaaguacaggugagauuugcgacagcccacaccagauccuagauggcaaaaauuguacccucauagacgcucugcuuggggauccgcagugcgacggauuucaaaacaagaaaugggaucuguucguggaaagauccaaggccuauucuaauuguuaccccuaugacgucccugauuacgcaucguugaggucacucguggccagcaguggcacucuggaguuuaacaaugaauccuucaacuggacagguguuacccagaaugggacgucuagcgcuugcauccggcgcuccaagaacucauuuuucagucgacugaauuggcucacucauuuaaacuuuaaauauccagcacugaaugugaccaugcccaacaacgagcaguucgacaagcuguacauuuggggaguccaccauccuggcacagauaaagaccagaucuuuuuguaugcccaagcuagcggccguauuacugugucuaccaagagaucccagcagacaguaaucccaaauauagggucaaggccccggguucgcaacauuccuagcagaaucaguauuuacuggaccaucgugaaaccaggagauauccugcuaauuaauucuacggguaaccucauagccccgaggggcuacuucaagaugcaguccggaaagagcucgaucaugcggucugacgcgcccauugggaaauguaauuccgagugcaucacuccuaacggcucaauaccaaaugacaagcccuuucaaaacgucaaucgcauuacauauggugcauguccucgauacgugaaacagaacacccugaaacuugccacugggaugagaaaugugccagaaaaacagacaaggggaaucuucggcgcuaucgccggcuuuauugagaacgggugggaaggaauggucgaugguugguauggcuuccggcaccaaaauagugaggggcguggacaggcagcugaccuuaagagcacccaggccgcgaucgaucagauuaacggcaaauugaaucgccucauagguaagacgaacgagaaguuccaccaaaucgaaaaagaguuuuccgaaguugaggggaggauucaggaccuggaaaaguacguggaggauaccaaaaucgacuuauggucuuauaacgccgagcugcucguagcacuugaaaaucagcauacaaucgaucugacugacagcgagaugaacaaguuguucgaaaagaccaagaagcagcuaagagagaaugcugaagauaugggcaacggaugcuuuaaaauuuaccacaagugugacaaugccugcauaggcucaauccggaacgggacauaugaucaugacguguaccgagacgaggcucugaauaaccgcuuccaaauuaaaggagucgagcucaagagugguuacaaagauuggauccuguggauuuccuuugccaucagcugcuuccuucuguguguggcauugcucggcuuuauaaugugggccugccagaaggggaauaucagauguaacauuugcaucuga

SEQ ID NO: 135801 - RNA, 1701 nt, Artificial Sequence
  derived and/or modified CDS sequence (opt3) from hemagglutinin__InfluenzaA__AER08660
augaagaccaucauugcccugagcuacauacucugccuuguguucgcucagaaacugcccggcaacgacaauuccacagcaacuuuguguuuagggcaccaugccgucccuaacggaacgaucguuaagaccauuacaaaugaucaaaucgaggugacuaacgcgaccgaacugguacagucuucaaguacaggugagauuugcaauagcccacaccagauccuagacggcgaaaacuguacccucauagaugcucugcuuggggacccgcagugcgauggauuucaaaauaaaaagugggaccuguucguggagagauccaaagccuauucuaacuguuaccccuaugaugucccugacuacgcaucguugaggucacucguggccagcaguggcacucuggaauuuaauaacgaguccuucaauuggacagguguuacccagaacgggacgucuagcgcuugcauccggcgcuccaauaacucauuuuucagucgacugaauuggcucacucauuuaaacuuuaaguauccagcacugaacgugaccaugcccaauaacgagcaguucgauaagcuguacauuuggggaguccaccauccuggcacagacaaagaucagaucuuuuuguaugcccaagcuagcggccguauuacugugucuaccaagagaucccagcaggccguaaucccaaauauagggucaaggccccggguucgcaacauuccuagcagaaucaguauuuacuggacaaucgugaaaccaggagacauccugcuaauuaauucuaccgguaaccucauagcgccgaggggcuacuucaagauccgguccgggaaaagcucgauuaugcgcucugaugcacccaucggaaaguguaauuccgccugcauaacgccuaacggcucaauuccaaaugacaagcccuuucagaacgucaaucgaaucacuuauggugcuuguccuagauacgugaaacaaaacacacugaaacuugccaccgggaugaggaaugugccagaaaaacagacucggggaaucuucggcgcaauugcuggcuuuaucgagaacgggugggaaggaauggucgacgguugguauggcuuccgucaccagaauagugaggggcgcggacaagccgcggaucuuaagagcacacaggccgcaauugaccagauaaacggcaaauugaacagacucaucgguaagaccaaugagaaauuccaccagauugaaaaggaguuuuccgaaguugaggggaggauccaagaucuggaaaaguacguggaggacacgaaaaucgauuuauggucuuauaacgcugagcugcucguagcccuugaaaaucagcauaccauugaccugacagauagcgagaugaacaaguuguucgaaaagacuaagaaacagcuacgggagaaugcugaagacaugggcaacggaugcuuuaagauauaccacaagugugauaaugccugcaucggcucaauucgaaacgggaccuaugaccaugauguguaccgcgacgaggcacugaauaacagauuccagaucaaaggagucgagcucaagagugguuacaaagacuggauucuguggaucuccuuugccauaagcugcuuccuucuguguguggcuuugcucggcuuuaucaugugggcgugccaaaaggggaauauuagguguaacaucugcauuuga

SEQ ID NO: 135802 - RNA, 1701 nt, Artificial Sequence
  derived and/or modified CDS sequence (opt3) from hemagglutinin__InfluenzaA__AER08664
augaagaccaucauugcccugagcuacauacucugccuuguguucgcucagaaacugcccggcaacgacaauuccacagcaacuuuguguuuagggcaccaugccgucccuaacggaacgaucguuaagaccauuacaaaugaucaaaucgaggugacuaacgcgaccgaacugguacagucuucaaguacaggugagauuugcgacagcccacaccagauccuagauggcgaaaauuguacccucauagacgcucugcuuggggauccgcagugcgacggauuucaaaacaaaaagugggaucuguucguggagagauccaaagccuauucuaauuguuaccccuaugacgucccugauuacgcaucguugaggucacucguggccagcaguggcacucuggaauuuaacuccgagucuuucaauuggacagguguuacccagaacgggacgagcuccgcuugcauccggcgcucaaauaacagcuuuuucagucgacugaauuggcucacucauuuaaacuuuaaguauccagcacugaaugugaccaugcccaacaacgagcaguucgacaaacuuuacauuuggggaguccaccauccuggcacagauaaggaccagaucuuuuuguaugcccaggcuucuggccguauuacuguguccaccaagagaucacaacaggccguaaucccaaauauagggagcaggccccggguucgcaacauuccuaguagaaucucuauuuacuggacaaucgugaaaccaggagauauccugcuaauuaauuccaccgguaaccucauagcgccgaggggcuacuucaagauccggagcgggaaaucgucuauuaugcgcuccgacgcacccaucggaaaguguaauucagaaugcauaacgccuaacggcaguauuccaaaugacaagcccuuucagaacgucaaucgaaucacuuauggugccuguccuagauacgugaaacaaagcacacugaaacuugcuaccgggaugaggaacgugccagagaagcagacucggggaaucuucggcgccauugcaggcuuuaucgaaaaugggugggagggaauggucgaugguugguauggcuuccgucaccagaacuccgaggggcgcggacaagcugccgaccugaagucuacacaggcggccauugaucagauaaauggcaaauugaacagacucaucgguaagaccaaugaaaaauuccaccagauugagaaggaauuuagcgagguugaagggaggauccaagaccuggagaaguacguggaggauacgaaaaucgacuuauggucauauaacgcagaacugcucguagcucuugagaaccagcauaccauugaucugacagacagugaaaugaauaaguuguucgagaaaacuaagaaacagcuacgggaaaacgccgaggauaugggcaauggaugcuuuaagauauaccacaagugugacaacgcuugcaucggcuccauucgaaaugggaccuaugaucaugacguguaccgcgacgaggcccugaacaauagauuccagaucaaaggagucgaacucaagagcgguuacaaagauuggauucuguggaucucuuuugcaauaucaugcuuccuucuguguguggccuugcucggcuuuaucaugugggcuugccaaaaggggaacauuagguguaauaucugcauuuga

SEQ ID NO: 135803 - RNA, 1701 nt, Artificial Sequence; identical to SEQ ID NO: 135030
  derived and/or modified CDS sequence (opt3) from hemagglutinin__InfluenzaA__AER08668

SEQ ID NO: 135804 - RNA, 1701 nt, Artificial Sequence
  derived and/or modified CDS sequence (opt3) from hemagglutinin__InfluenzaA__AER08670
augaagaccaucauugcccugagcuacauacucugccuuguguucgcucagaaacugcccggcaacgacaauuccacagcaacuuuguguuuagggcaccaugccgucccuaacggaacgaucguuaagaccauuacaaaugaucaaaucgaggugacuaacgcgaccgaacugguacagucuucaaguacaggugagauuugcaauagcccacaccagauccuagacggcgaaaacuguacccucauagaugcucugcuuggggacccgcagugcgauggauuucaaaauaaaaagugggaccuguucguggagagauccaaagcccauucuaacuguuaucccuacgaugucccugacuaugcaucguugaggucacucguggccagcaguggcacucuggaauuuaauaacgaguccuucaauuggacagguguuacccagaacgggacgucuagcgcuugcauccggcgcuccaauaacucauuuuucagucgacugaauuggcucacucacuuaaacuuuaaguacccagcacugaacgugaccaugcccaauaacgagcaguucgauaaacuuuauauuuggggaguccaucacccuggcacagacaaggaucagaucuuuuuguacgcccaagcuagcggccguauuacugugucuaccaagagaucccagcaggccguaaucccaaauauagggucaaggccccggguucgcaacauuccuagcagagugaguaucuauuggacaauugucaaaccaggagacauccugcuaaucaauucuaccgguaaccucauugcgccgaggggcuacuucaagauacgguccgggaaaagcucgaucaugaagucugaugcacccauuggaaaguguaauuccgccugcaucacgccuaacggcucaauaccaaaugacaaacccuuucagaacgugaaucgcauuacuuacggugcuuguccucgauaugugaagcaaaacacacugaaacuugccaccgggaugagaaaugucccagaaaagcagacuaggggaaucuucggcgcaaucgcuggcuuuauugagaacgggugggaaggaaugguugacgguugguacggcuuccggcaccagaauagugaggggcguggacaagccgcggaucugaaaagcacacaggccgcaaucgaccagauuaacggcaaguugaaccgccucauagguaaaaccaaugagaaguuccaucagaucgaaaaggaguuuuccgaaguggaggggaggauucaagaucuggaaaaauauguagaggacacgaagaucgauuuauggucuuacaacgcugagcugcucguggcccuugaaaaucagcacaccaucgaccugacagauagcgagaugaacaaauuguucgaaaagacuaaaaagcagcuaagagagaaugcugaagacaugggcaacggaugcuuuaagauuuaucauaaaugugauaaugccugcauaggcucaauccggaacgggaccuacgaccacgaugucuaucgagacgaggcacugaauaaccgcuuccagauuaagggaguggagcucaaaagugguuacaaggacuggauccuguggauuuccuuugccaucagcugcuuccuucuguguguugcuuugcucggcuuuauaaugugggcgugccaaaaagggaauaucagauguaacauuugcaucuga

SEQ ID NO: 135805 - RNA, 1701 nt, Artificial Sequence
  derived and/or modified CDS sequence (opt3) from hemagglutinin__InfluenzaA__AER08672
augaagaccaucauugcccugagcuacauacucugccuuguguucgcucagaaacugcccggcaacgacaauuccacagcaacuuuguguuuagggcaccaugccgucccuaacggaacgaucguuaagaccauuacaaaugaucaaaucgaggugacuaacgcgaccgaacugguacagucuucaaguacagguggcauuugcgacagcccacaccagauccuagaugggggaaauuguacccucauagacgcucugcuuggcgauccgcagugcgacgguuuucaaaacaaaaagugggaucuguucguggagagauccaaagccuauucuaauuguuaccccuaugacgucccugauuacgcaucguugaggucacucguggccagcagugggacucuggaauuuaacuccgagucuuucaauuggacaggaguuacccagaacggcacgagcuccgcuugcauccggcgcucaaauaacagcuuuuucagucgacugaauuggcucacucauuuaaacuuuaaguauccagcacugaaugugaccaugcccaacaacgaacaguucgacaaacuuuacauuuggggcguccaccauccugggacagauaaggaccagaucuuuuuguaugcccaggcuucuggacguauuacuguguccaccaagagaucacaacaggccguaaucccaaauauagguagcaggccccggguucgcaacauuccuaguagaaucucuauuuacuggacaaucgugaaaccaggcgauauccugcuaauuaauuccaccgggaaccucauagcgccgaggggauacuucaagauccggagcggcaaaucgucuauuaugcgcuccgacgcacccaucgguaaguguaauucagagugcauaacgccuaacgggaguauuccaaaugacaagcccuuucagaacgucaaucgaaucacuuauggagccuguccuagauacgugaaacaaagcacacugaaacuugcuaccggcaugaggaacgugccagagaagcagacucggggcaucuucggggccauugcaggauuuaucgaaaaugguugggagggcauggucgaugggugguauggauuccgucaccagaacuccgaaggccgcggucaagcugccgaccugaagucuacacaggcggccauugaucagauaaaugggaaauugaacagacucaucggcaagaccaaugagaaauuccaccagauugagaaggaauuuagcgagguugaaggaaggauccaagaccuggagaaguacguggaagauacgaaaaucgacuuauggucauauaacgcagagcugcucguagcucuugagaaccagcauaccauugaucugacagacagugaaaugaauaaguuguucgagaaaacuaagaaacagcuacgggaaaacgccgaggauaugggcaaugggugcuuuaagauauaccacaagugugacaacgcuugcaucggauccauucgaaaugguaccuaugaucaugacguguaccgcgacgaagcccugaacaauagauuccagaucaaaggcgucgagcucaagagcggguacaaagauuggauucuguggaucucuuuugcaauaucaugcuuccuucuguguguggccuugcucggauuuaucaugugggcuugccaaaagggcaacauuagguguaauaucugcauuuga

SEQ ID NO: 135806 - RNA, 1701 nt, Artificial Sequence
  derived and/or modified CDS sequence (opt3) from hemagglutinin__InfluenzaA__AER08674
augaagaccaucauugcccugagcuacauacucugccuuguguucgcucagaaacugcccggcaacgacaauuccacagcaacuuuguguuuagggcaccaugccgucccuaacggaacgaugguuaagaccaucacaaaugaucaaauugaggugacuaacgcgaccgaacugguacagucuucaaguacaggugagaucugcaauagcccacaccagauucuagacggcgaaaacuguacccucaucgaugcucugcuuggggacccgcagugcgauggauuucaaaauaaaaagugggaccuguucguggagagauccaaagcccauucuaacuguuaucccuacgaugucccugacuaugcaucguugaggucacucguggccagcaguggcacucuggaauuuaauaacgaguccuucaauuggacagguguuacccagaacgggacgucuagcgcuugcauacggcgcuccaauaacucauuuuucagucgacugaauuggcucacucacuuaaacuuuaaguacccagcacugaacgugaccaugcccaauaacgagcaguucgauaagcuguauaucuggggaguccaucacccuggcacagacaaagaucagaucuuuuuguacgcccaagcuagcggccguauuacugugucuaccaagagaucccagcaggccguaauuccaaauaucgggucaaggccccggguucgcaacauaccuagcagagugaguauuuauuggacaaucgucaaaccaggagacauucugcuaaucaauucuaccgguaaccucaucgcgccgaggggcuacuucaagauucgguccgggaaaagcucgauaaugcgcucugaugcacccaucggaaaguguaauuccgccugcauuacgccuaacggcucaaucccaaaugacaagcccuuucagaacgugaaucgaauaacuuacggugcuuguccuagauaugugaaacaaaacacacugaaacuugccaccgggaugaggaaugucccagaaaaacagacucggggaauuuucggcgcaaucgcuggcuuuaucgagaacgggugggaaggaaugguugacgguugguacggcuuccgucaccagaauagugaggggcgcggacaagccgcggaucuuaagagcacacaggccgcaauugaccagaucaacggcaaauugaacagacucauugguaagaccaaugagaaauuccaucagauagaaaaggaguuuuccgaaguggaggggaggauccaagaucuggaaaaguauguagaggacacgaaaauugauuuauggucuuacaacgcugagcugcucguggcccuugaaaaucagcacaccaucgaccugacagauagcgagaugaacaaguuguucgaaaagacuaagaaacagcuacgggagaaugcugaagacaugggcaacggaugcuuuaagaucuaucauaagugugauaaugccugcauuggcucaauacgaaacgggaccuacgaccacgaugucuaucgcgacgaggcacugaauaacagauuccagaucaaaggaguggagcucaagagugguuacaaagacuggauucuguggaucuccuuugccauuagcugcuuccuucuguguguugcuuugcucggcuuuaucaugugggcgugccaaaaggggaauauaagguguaacaucugcauuuga

SEQ ID NO: 135807 - RNA, 1701 nt, Artificial Sequence; identical to SEQ ID NO: 135030
  derived and/or modified CDS sequence (opt3) from hemagglutinin__InfluenzaA__AER08676

SEQ ID NO: 135808 - RNA, 1701 nt, Artificial Sequence; identical to SEQ ID NO: 135030
  derived and/or modified CDS sequence (opt3) from hemagglutinin__InfluenzaA__AER08678

SEQ ID NO: 135809 - RNA, 1701 nt, Artificial Sequence
  derived and/or modified CDS sequence (opt3) from hemagglutinin__InfluenzaA__AER08680
augaagaccaucauugcccugagcuacauacucugccuuguguucgcucagaaacugcccggcaacgacaauuccacagcaacuuuguguuuagggcaccaugccgucccuaacggaacgaucguuaagaccauuacaaaugaucaaaucgaggugacuaacgcgaccgaacugguacagucuucaagugcuggugagauuugcgacagcccacaccagauccuagauggcgaaaauuguacacucauagacgcccugcuuggggauccgcagugcgacggauuucaaaacaaaaagugggaucuguucguggagagauccagggcacauucuaauuguuaucccuacgacgucccugauuaugccucguugcggucacucguggcuagcaguggcacccuggaauuuaacaaugaguccuucaacuggacugguguuacacagaaugggaccucuagcgcaugcauccgccgauccaacaauucauuuuucagucgucugaacuggcucacgcacuuaaauuuuaaauacccagcccugaacgugacuaugcccaacaaugagcaguucgacaaacuuuauauuuggggaguccaucacccuggcaccgauaaggaccagaucuuuuuguacgcucaagccagcggcagaauuacagugucuacuaaaaggucccagcaggcgguaaucccaaacauagggucacggccccgcguuagaaauauuccuagcaggaucaguauuuauuggaccaucgugaagccaggagauauccugcuaauuaacucuacagguaaucucauagcaccgcggggcuacuucaaaauccgcuccggaaagagcucgauuaugcgaucugacgcccccaucgggaaauguaacuccgaaugcauaaccccuaauggcucaauuccaaacgacaagcccuuucagaaugucaacagaaucacguacggugcuuguccuagguaugugaagcaaaguacucugaaacuugccacagggaugcggaaugugccagagaagcagacccguggaaucuucggcgcaauugcuggcuuuaucgaaaacgggugggagggaaugauggaugguugguacggcuuccgccaccagaauagcgaggggagaggacaagccgcggaccugaaauccacucaggccgcaauugaucagauaaacggcaaguugaauaggcucaucgguaaaacaaacgaaaaguuccaucagauugagaaagaauuuucugaggucgaagggcggauccaagaccuggagaaguauguugaggauaccaagaucgacuuauggagcuacaacgcugaacugcucguggcccuugagaaucagcacacgauugaucugaccgacucagaaaugaacaaauuguucgagaagacaaagaagcagcuacgagaaaaugcugaggauaugggcaacggaugcuuuaaaauauaucauaagugugacaaugccugcaucggcaguauucgcaacgggacuuacgaucacgacguauauagagacgaggcacugaauaacagguuccagaucaagggaguggaacucaaauccgguuacaaggauuggauucuguggaucagcuuugccauaucuugcuuccuucugugugucgcuuugcucggcuuuaucaugugggcgugccaaaaagggaauauucgguguaacaucugcauuuga

SEQ ID NO: 135810 - RNA, 1701 nt, Artificial Sequence
  derived and/or modified CDS sequence (opt3) from hemagglutinin__InfluenzaA__AER08682
augaagaccgugaucgcccugagcuacauucucugccuugucuucgcucagaaacugcccggcaacgacaauuccacagcaacuuuguguuuagggcaccaugccguuccuaacggaacgauagugaagaccaucacaaaugaucaaauugagguaacuaacgcgaccgaacuggugcagucuucaaguacaggugagaucugcaauagcccacaccagauucuagacggcgaaaacuguacccucaucgaugcucugcuuggggacccgcagugcgauggauuucaaaauaaaaagugggaccuguucgucgagagauccaaagcccauucuaacuguuaucccuacgaugugccugacuaugcaucguugaggucacucguugccagcaguggcacucuggaauuuaauaacgaguccuucaauuggacaggugugacccagaacgggacgucuagcgcuugcauacggcgcuccaauaacucauuuuucagucgacugaauuggcucacucacuuaaacuuuaaguacccagcacugaacgucaccaugcccaauaacgagcaguucgauaagcuguauaucuggggagugcaucacccuggcacagacaaagaucagaucuuuuuguacgcccaagcuagcggccguauuacuguaucuaccaagagaucccagcaggccguuauuccaaauaucgggucaaggccccgggugcgcaacauaccuagcagagucaguauuuauuggacaaucgugaaaccaggagacauucugcuaaucaauucuaccgguaaccucaucgcgccgaggggcuacuucaagauucgguccgggaaaagcucgauaaugcgcucugaugcacccaucggaaaguguaauuccgccugcauuacgccuaacggcucaaucccaaaugacaagcccuuucagaacgugaaucgaauaacuuacggugcuuguccuagauaugucaaacaaaacacacugaaacuugccaccgggaugaggaauguuccagaaaaacagacucggggaauuuucggcgcaaucgcuggcuuuaucgagaacgggugggaaggaaugguggacgguugguacggcuuccgucaccagaauagugaggggcgcggacaagccgcggaucuuaagagcacacaggccgcaauugaccagaucaacggcaaauugaacagacucauugguaagaccaaugagaaauuccaucagauagaaaaggaguuuuccgaaguagaggggaggauccaagaucuggaaaaguauguggaggacacgaaaauugauuuauggucuuacaacgcugagcugcucgucgcccuugaaaaucagcacaccaucgaccugacagauagcgagaugaacaaguuguucgaaaagacuaagaaacagcuacgggagaaugcugaagacaugggcaacggaugcuuuaagaucuaucauaagugugauaaugccugcauuggcucaauacgaaacgggaccuacgaccacgauguguaucgcgacgaggcacugaauaacagauuccagaucaaaggaguugagcucaagagugguuacaaagacuggauucuguggaucuccuuugccauuagcugcuuccuucuguguguggcuuugcucggcuuuaucaugugggcgugccaaaaggggaauauaagguguaacaucugcauuuga

SEQ ID NO: 135811 - RNA, 1701 nt, Artificial Sequence
  derived and/or modified CDS sequence (opt3) from hemagglutinin__InfluenzaA__AER08684
augaagaccaucauugcccugagcuacauacucugccuuguguucgcucagaaacugcccggcaacgacaauuccacagcaacuuuguguuuagggcaccaugccgucccuaacggaacgaucguuaagaccauuacaaaugaucaaaucgaggugacuaacgcgaccgaacugguacagucuucaaguacaggugagauuugcaauagcccacaccagauccuagacggcgaaaacuguacccucauagaugcucugcuuggggacccgcagugcgauggauuucaaaauaaaaagugggaccuguucguggagagauccaaagcccauucuaacuguuaucccuacgaugucccugacuaugcaucguugaggucacucguggccagcaguggcacucuggaauuuaauaacgaguccuucaauuggacagguguuacccagaacgggacgucuagcgcuugcauccggcgcuccaauaacucauuuuucagucgacugaauuggcucacucacuuaaacuuuaaguacccagcacugaacgugaccaugcccaauaacgagcaguucgauaagcuguauauuuggggaguccaucacccuggcacagacaaagaucagaucuuuuuguacgcccaagcuagcggccguauuacugugucuaccaagagaucccagcaggccguaaucccaaauauagggucaaggccccggguucgcaacauuccuagcagagugaguaucuauuggacaauugucaaaccaggagacauccugcuaaucaauucuaccgguaaccucauugcgccgaggggcuacuucaagauacgguccgggaaaagcucgaucaugcgcucugaugcacccauuggaaaguguaauuccacgugcaucacuccuaacggcucaauaccaaaugacaagcccuuucagaacgugaaucgaauuacauacggugccuguccuagauaugugaaacaaaacacccugaaacuugcuacugggaugaggaaugucccagaaaaacagacacggggaaucuucggcgccaucgcaggcuuuauugagaacgggugggaaggaaugguugacgguugguacggcuuccgucaccagaauagugaggggcgcggacaagcugccgaucuuaagagcacccaggcggccaucgaccagauuaacggcaaauugaacagacucauagguaagacgaaugagaaauuccaucagaucgaaaaggaguuuuccgaaguggaggggaggauucaagaucuggaaaaguauguagaggacaccaaaaucgauuuauggucuuacaacgcagagcugcucguggcucuugaaaaucagcacacaaucgaccugacugauagcgagaugaacaaguuguucgaaaagaccaagaaacagcuacgggagaaugccgaagacaugggcaacggaugcuuuaagauuuaucauaagugugauaaugcuugcauaggcucaauccgaaacgggacauacgaccacgaugucuaucgcgacgaggcccugaauaacagauuccagauuaaaggaguggagcucaagagugguuacaaagacuggauccuguggauuuccuuugcaaucagcugcuuccuucuguguguugccuugcucggcuuuauaaugugggcuugccaaaaggggaauaucagguguaacauuugcaucuga

SEQ ID NO: 135812 - RNA, 1701 nt, Artificial Sequence
  derived and/or modified CDS sequence (opt3) from hemagglutinin__InfluenzaA__AER08686
augaagaccaucauugcccugagcuacauacucugccuuguguucgcucagaaacugcccggcaacgacaauuccacagcaacuuuguguuuagggcaccaugccgucccuaacggaacgaucguuaagaccauuacaaaugaucaaaucgaggugacuaacgcgaccgaacugguacagucuucaaguacaggugagauuugcaauagcccacaccagauccuagacggcgaaaacuguacccucauagaugcucugcuuggggacccgcagugcgauggauuucaaaauaaaaagugggaccuguucguggagagauccaaagcccauucuaacuguuaucccuacgaugucccugacuaugcaucguugaggucacucguggccagcaguggcacucuggaauuuaauaacgaguccuucaauuggacagguguuacccagaacgggacgucuagcgcuugcauccggcgcuccaauaacucauuuuucagucgacugaauuggcucacucacuuaaacuuuaaguacccagcacugaacgugaccaugcccaauaacgagcaguucgauaagcuguauauuuggggaguccaucacccuggcacagacaaagaucagaucuuuuuguacgcccaagcuagcggccguauuacugugucuaccaagagaucccagcaggccguaaucccaaauauagggucaaggccccggguucgcaacauuccuagcagagugaguaucuauuggacaauugucaaaccaggagacauccugcuaaucaauucuaccgguaaccucauugcgccgaggggcuacuucaagauacgguccgggaaaagcucgaucaugcgcucugaugcacccauuggaaaguguaauuccacgugcaucacuccuaacggcucaauaccaaaugacaagcccuuucagaacgugaaucgaauuacauacggugccuguccuagauaugugaaacaaaacacccugaaacuugcuacugggaugaggaaugucccagaaaaacagacacggggaaucuucggcgccaucgcaggcuuuauugagaacgggugggaaggaaugguugacgguugguacggcuuccgucaccagaauagugaggggcgcggacaagcugccgaucuuaagagcacccaggcggccaucgaccagauuaacggcaaauugaacagacucauagguaagacgaaugagaaauuccaucagaucgaaaaggaguuuuccgaaguggaggggaggauucaagaucuggaaaaguauaucgaggacaccaaaaucgauuuauggucuuacaacgcagagcugcucguagcucuugaaaaucagcacacaauugaccugacugauagcgagaugaacaaguuguucgaaaagaccaagaaacagcuacgggagaaugccgaagacaugggcaacggaugcuuuaagauauaucauaagugugauaaugcuugcaucggcucaauucgaaacgggacauacgaccacgauguguaucgcgacgaggcccugaauaacagauuccagaucaaaggagucgagcucaagagugguuacaaagacuggauucuguggaucuccuuugcaauaagcugcuuccuucuguguguggccuugcucggcuuuaucaugugggcuugccaaaaggggaauauuagguguaacaucugcauuuga

SEQ ID NO: 135813 - RNA, 1701 nt, Artificial Sequence; identical to SEQ ID NO: 135030
  derived and/or modified CDS sequence (opt3) from hemagglutinin__InfluenzaA__AER08688

SEQ ID NO: 135814 - RNA, 1701 nt, Artificial Sequence
  derived and/or modified CDS sequence (opt3) from hemagglutinin__InfluenzaA__AER08690
augaagaccaucauugcccugagcuacauacucugccuuguguucgcucagaaacugcccgagaacgacaauuccacagcaacuuuguguuuaggccaccaugccgucccuaacgggacgaucguuaagaccauuacaaaugaucaaaucgaagugacuaacgcgaccgagcugguacagucuucaaguacaggagaaauuugcaauagcccacaccagauccuagacggugagaacuguacccucauagaugcucugcuuggcgacccgcagugcgauggguuucaaaauaaaaagugggaccuguucguggaaagauccaaagcccauucuaacuguuaucccuacgaugucccugacuaugcaucguugaggucacucguggccagcaguggaacucuggaguuuaauaacgaguccuucaauuggacaggcguuacccagaacgguacgucuagcgcuugcauccggcgcuccaauaacucauuuuucagucgacugaauuggcucacucacuuaaacuuuaaguacccagcacugaacgugaccaugcccaauaacgaacaguucgauaagcuguauauuuggggaguccaucacccugggacagacaaagaucagaucuuuuuguacgcccaagcuagcggccguauuacugugucuaccaagagaucccagcaggccguaaucccaaauauaggcucaaggccccggguucgcaacauuccuagcagagugaguaucuauuggacaauugucaaaccaggggacauccugcuaaucaauucuaccggaaaccucauugcgccgagggguuacuucaagauacgguccggcaaaagcucgaucaugcgcucugaugcacccauugggaaguguaauuccacgugcaucacuccuaacggaucaauaccaaaugacaagcccuuucagaacgugaaucgaauuacauacggcgccuguccuagauaugugaaacaaaacacccugaaacuugcuacugguaugaggaaugucccagagaagcagacacgggggaucuucggagccaucgcaggcuuuauugaaaacggcugggaggggaugguugacggaugguacgguuuccgucaccagaauagugagggccgcgggcaagcugccgaucuuaagagcacccaggcggccaucgaccagauuaacggaaaauugaacagacucauaggcaagacgaaugaaaaauuccaucagaucgagaaggaauuuuccgagguggaagguaggauucaagaucuggagaaguauguagaggacaccaaaaucgauuuauggucuuacaacgcagaacugcucguggcucuugagaaucagcacacaaucgaccugacugauagcgaaaugaacaaguuguucgagaaaaccaagaaacagcuacgggaaaaugccgaggacauggggaacggcugcuuuaagauuuaucauaagugugauaaugcuugcauaggaucaauccgaaacggcacauacgaccacgaugucuaucgcgacgaggcccugaauaacagauuccagauuaaagggguggaacucaagaguggauacaaagacuggauccuguggauuuccuuugcaaucagcugcuuccuucuguguguuguguugcucgguuuuauaaugugggccugccaaaagggcaauaucagguguaacauuugcaucuga

SEQ ID NO: 135815 - RNA, 1701 nt, Artificial Sequence; identical to SEQ ID NO: 135030
  derived and/or modified CDS sequence (opt3) from hemagglutinin__InfluenzaA__AER08692

SEQ ID NO: 135816 - RNA, 1701 nt, Artificial Sequence
  derived and/or modified CDS sequence (opt3) from hemagglutinin__InfluenzaA__AER08698
augaagaccacaaucgcccugagccacauucucugccuuguguucgcucagaaacugcccggcaacgacaauuccacugcaacguuguguuuagggcaucacgccgucccuaacggaaccauaguuaagacaaucacuaaugaucaaauugaggugaccaacgcgacagaacugguacagucuucaagugcuggugagaucugcgacagcccacaucagauucuagauggcgaaaauuguacccucaucgacgcccugcuuggggauccgcagugcgacggauuucaaaacaaaaagugggaucuguucguggagagauccagggcauacucuaauuguuaucccuacgacgucccugauuaugccucguugcggucacucguggcuagcaguggcacucuggaauuuaacaaugaguccuucaacuggacagguguuacccagaaugggacgucuagcgcaugcauacgccgauccaacaauucauuuuucagucgucugaacuggcucacucacuuaaauuuuaaauacccagcccugaacgugaccaugcccaacaaugagcaguucgacaaguuguauaucuggggaguccaucacccuggcacagauaaggaccagauuuuucuuuacgcucaagccagcggcagaaucacugugucuaccaaaaggucccagcaggcgguaauuccaaacaucgggucacggccccgcguuagaaauauaccuagcaggauuaguaucuauuggacaauugugaagccaggagauauccugcuaaucaacucuaccgguaaucucauugcaccgcggggcuacuucaaaauacgcuccggaaagagcucgaucaugcgaucugacgcccccauugggaaauguaacuccgaaugcaucacgccuaauggcucaauaccaaacgacaagcccuuucagaaugucaacagaauuacuuacggugcuuguccuagguaugugaagcaaaguacacugaaacuugccaccgggaugcggaaugugccagagaagcagacucguggaaucuucggcgcaaucgcuggcuuuauugaaaacgggugggagggaauggucgaugguugguacggcuuccgccaccagaauagcgaggggagaggacaagccgcggaccugaaauccacacaggccgcaaucgaucagauuaacggcaaguugaauaggcucauagguaaaaccaacgaaaaguuccaucagaucgagaaagaauuuucugagguugaagggcggauucaagaccuggagaaguauguggaggauacgaagaucgacuuauggagcuacaacgcugaacugcucguagcccuugagaaucagcacaccaucgaucugacagacucagaaaugaacaaauuguucgagaagacuaaaaagcagcuacgagaaaaugcugaggauaugggcaacggaugcuuuaaaauuuaucauaagugugacaaugccugcauaggcaguauccgcaacgggaccuacgaucacgacguguauagagacgaggcacugaauaacagguuccagauuaagggagucgaacucaaauccgguuacaaggauuggauccuguggauuagcuuugccaucucuugcuuccuucuguguguggcuuugcucggcuuuauaaugugggcgugccaaaaagggaauauccgguguaacauuugcaucuga

SEQ ID NO: 135817 - RNA, 1701 nt, Artificial Sequence; identical to SEQ ID NO: 135030
  derived and/or modified CDS sequence (opt3) from hemagglutinin__InfluenzaA__AER08700

SEQ ID NO: 135818 - RNA, 1701 nt, Artificial Sequence
  derived and/or modified CDS sequence (opt3) from hemagglutinin__InfluenzaA__AER92712
augaaggccauccuggugguccuccuuuacaccuucgcuacagcaaacgccgacacucugugcauuggcuaucacgcgaauaacagcacggauaccguugacacaguguuggagaagaauguaacugugacccauuccgucgauuuacuggaagacaagcacaacgggaaacuauguaagcucagaggaguggcuccccugcaucuugguaaaugcaauauagccggcuggauccuggggaacccugagugugaaucuuugucaacagcaaguagcugguccuacauuguugagaccucuaauucggauaacggaacuugcuauccaggcgacuuuaucgauuacgaggagcucagggagcagcugucaagcgugaguuccuucgaacgguuugagauuuucccgaagacaucuagcuggcccaaucacgacuccaacaagggugucaccgccgcuuguccucaugcaggggccaaaucauuuuauaagaaucugaucuggcucgugaaaaagggaaacaguuacccaaaauuaaauaagagcuauauaaacgauaagggcaaagaaguacugguucuuuggggcauccaccaccccucuacguccacugaccaacagucauuguaccagaaugcugaugccuacguguucgucgggaccagccgcuauaguaagaaauuuaagccugagauugcgauccgaccaaaagugcguaaccaggagggaagaaugaacuacuauuggacacugguggaacccggugacaagauuacuuucgaggcaaccggcaaucuagucguuccuagguacgccuuuacaaucgaacggaacgcugggucuggaauaauuaucuccgauaccccaauucaugacugcaauacgacuugucaaacaccgaaaggcgccaucaacaccagccuccccuuccagaauauccacccuauuacuauagguaagugcccaaaguaugugaaaucgacaaagcugcgccuugcaaccgggcugagaaacguacccucuauccaguccaggggauuguuuggcgcuauugccggcuucaucgaagggggauggacggguaugguggacggcugguacggguaucaucaccagaaugaacaaggaucaggcuacgcggccgaucucaaaaguacccagaacgcaauagacgagauuacaaauaaggucaacagcgugaucgagaaaaugaauacucaguuuaccgcuguugguaaggaguucaaccaccuggaaaagcggaucgaaaauuuaaacaaaaagguggaugacggguuccuggauauuuggacauacaaugccgagcuccuuguccuguuggaaaacgagcgcacucuagacuaucaugauuccaacgugaaaaaucuguacgagaagguacgaucucagcucaaaaacaaugcuaaggaaaucggcaacggauguuuugaguucuaucacaagugcgacaauaccuguauggaaagcguuaaaaacggcacauacgauuauccuaaguacucagaggaagccaaacugaauagagaggagauugacggggugaaacuugaaaguaccaggauauaucaaauccuggcaauuuacuccacugucgccagcucuuuggugcucgucgugucacugggagcuaucaguuuuuggaugugcagcaacgguuccuuacagugccggaucuguauuuga

SEQ ID NO: 135819 - RNA, 1701 nt, Artificial Sequence; identical to SEQ ID NO: 133581
  derived and/or modified CDS sequence (opt3) from hemagglutinin__InfluenzaA__AET10090

SEQ ID NO: 135820 - RNA, 1701 nt, Artificial Sequence; identical to SEQ ID NO: 133581
  derived and/or modified CDS sequence (opt3) from hemagglutinin__InfluenzaA__AET10091

SEQ ID NO: 135821 - RNA, 1701 nt, Artificial Sequence; identical to SEQ ID NO: 133581
  derived and/or modified CDS sequence (opt3) from hemagglutinin__InfluenzaA__AET10092

SEQ ID NO: 135822 - RNA, 1701 nt, Artificial Sequence
  derived and/or modified CDS sequence (opt3) from hemagglutinin__InfluenzaA__AET10094
augaagaccaucauugcccugagcugcauacucugucuuguguucgcucagaaacugcccggcaacgacaauuccacagcaacuuugugcuuagggcaccaugccgucccuaacggaacgaucguuaagaccauuacaaaugaucaaaucgaggugacuaacgcgaccgaacugguacagucuucaaguacaggugagauuugugacagcccacaccagauccuagauggcgaaaauugcacccucauagacgcucugcuuggggauccgcagugugacggauuucaaaacaaaaagugggaucuguucguggagagauccaaagccuacucuucgugcuaucccuacgacgucccugauuaugcaucauugaggagccucguggccaguuccggcacucuggaauuuaauaacgagucuuucaauuggacagguguuacccagaacgggacgagcuccgcuuguauccggcgcucaaauaacagcuuuuucagucgacugaauuggcucacucauuuaaacuuuaaguacccagcacugaaugugaccaugcccaacaacgagcaguucgacaaacuuuauauuuggggaguccaccauccuggcacagauaaggaccagaucuuuuuguacgcccaggcuucuggccguauuacuguguccaccaagagaucacaacaggccguaaucccaaauauagggagcaggccccggguucgcaacauuccuaguagaaucucuauuuauuggacaaucgugaaaccaggagauauccugcuaauuaauuccaccgguaaccucauagcgccgaggggcuacuucaagauccggagcgggaaaucgucuauuaugcgcuccgacgcacccaucggaaagugcaauucagaauguauaacgccuaacggcaguauuccaaaugacaagcccuuucagaacgucaaucgaaucacuuacggugccugcccuagauaugugaaacaaagcacacugaaacuugcuaccgggaugaggaacgugccagagaagcagacucggggaaucuucggcgccauugcaggcuuuaucgaaaaugggugggagggaauggucgaugguugguacggcuuccgucaccagaacuccgaggggcgcggacaagcugccgaccugaagucuacacaggcggccauugaucagauaaauggcaaauugaacagacucaucgguaagaccaaugaaaaauuccaccagauugagaaggaauuuagcgagguugaagggaggauccaagaccuggagaaguauguggaggauacgaaaaucgacuuauggucauacaacgcagaacugcucguagcucuugagaaccagcauaccauugaucugacagacagugaaaugaauaaguuguucgagaaaacuaagaaacagcuacgggaaaacgccgaggauaugggcaauggauguuuuaccauauaucacaagugcgacaacgcuugcaucggcuccauucgaaaugggacauacgaucauaacguguaucgcgacgaggcccugaauaacagauuccagaucaagggagucgaacucaaaagcgguuacaaggacuggauucuguggaucucuuuugcaauaucauguuuccuucugugcguggccuugcucggcuuuaucaugugggcuugucaaaaagggaauauuaggugcaacaucuguauuuga

SEQ ID NO: 135823 - RNA, 1701 nt, Artificial Sequence
  derived and/or modified CDS sequence (opt3) from hemagglutinin__InfluenzaA__AET10095
augaagaccaucauugcccugagcuacauacucugccuuguguucgcucagaaacugcccggcaacgacaauuccacagcaacuuuguguuuagggcaccaugccgucccuaacggaacgaucguuaagaccauuacaaaugaucaaaucgaggugacuaacgcgaccgaacugguacagucuucaaguacaggugagauuugcgacagcccacaccagauccuagauggcgaaaauuguacccucauagacgcucugcuuggggauccgcagugcgacggauuucaaaacaaaaagugggaucuguucguggagagauccaaagccuauucuaauuguuaccccuaugacgucccugauuacgcaucguugaggucacucguggccagcaguggcacucuggaauuuaacaaugaguccuucaacuggacagguguuacccagaaugggacgucuagcgcuugcauccggcgcuccaacaauucauuuuucagucgacugaacuggcucacucauuuaaauuuuaaguauccagcacugaacgugaccaugcccaacaaugagcaguucgacaagcuguacauuuggggaguccaccauccuggcacagauaaagaccagaucuuuuuguaugcccaagcuagcggccguauuacugugucuaccaagagaucccagcaggccguaaucccaaacauagggucaaggccccggguucgcaauauuccuagcagaaucaguauuuacuggacaaucgugaaaccaggagauauccugcuaauuaacucuaccgguaaucucauagcgccgaggggcuacuucaagauccgguccgggaaaagcucgauuaugcgcucugacacgcccaucggaaaguguaacuccgaaugcauaacuccuaauggcucaauuccaaacgacaagcccuuucagaaugucaaccgaaucacauauggugcauguccuagauacgugaaacaaaauacccugaaacuugccacugggaugaggaacgugccagagaagcagacacggggaaucuucggcgcuauugccggcuuuaucgaaaaugggugggagggaauggucgaugguugguauggcuuccgucaccagaacagugaggggcgcggacaagcagcugaccuuaagagcacccaggccgcgauugaucagauaaauggcaaauugaacagacucaucgguaagacgaacgaaaaauuccaccagauugagaaggaauuuuccgagguugaagggaggauccaagaccuggagaaguacguggaggauaccaaaaucgacuuauggucuuauaaugccgaacugcucguagcacuugagaaccagcauacaauugaucugacugacagcgaaaugaauaaguuguucgagaaaaccaagaaacagcuacgggaaaacgcugaggauaugggcaauggaugcuuuaagauauaccacaagugugacaacgccugcaucgagucaauucgaaauggcacauaugaucaugacguguaccgcgacgaagcucugaacaauagauuccagaucaaaggggucgagcucaagaguggauacaaagauuggauucuguggaucuccuuugccauaagcugcuuccuucuguguguggcauugcucgguuuuaucaugugggccugccaaaagggcaacauuagguguaauaucugcauuuga

SEQ ID NO: 135824 - RNA, 1701 nt, Artificial Sequence
  derived and/or modified CDS sequence (opt3) from hemagglutinin__InfluenzaA__AET10096
augaagaccaucauugcccugagcuacauacucugccuuguguucgcucagaaauuucccggcaacgacaauuccacagcaacucuguguuuggggcaccaugccgucccuaacggaacgaucguuaagaccauuacaaaugaucaaaucgaggugacuaacgcgaccgaauuaguacaaaauucuucaacaggugagauuugcgacaguccacaccagaucauagauggcgaaaacuguacccugaucgacgcucuacucggggauccgcagugcgacggauuccagaauaaaaaguggaaccuguuuguggagagaagcaaagccuauuccaauuguuaccccuaugaugucccugacuacgcaucucuuaggucgcugguggccucaagcggcacuuuggaguucaacaaugaaaguuuuaacuggacagguguuacccagaaugggacguccucugcuugcauucggcgcagcaacaauuccuucuuuucacgacucaacuggcugacucaucugaacuucaaguauccagcacucaaugugaccaugcccaacaaugagcaguuugauaaguuauacaucuggggaguccaccauccuggcacagacaaagaucagauuuuccuguaugcccaagcuaguggccguaucacugugagcaccaagagaucucagcaggccguaauaccaaacauuggguccaggccccggguucgcaauaucccuucaagaauuagcaucuacuggacaaucgugaaaccaggagacauucuuuugauaaacaguaccgguaaucugaucgcgccgaggggcuacuuuaagauucggucugggaaauccagcaucaugcgcucggaugcacccauaggaaaguguaacucugaaugcauuacgccuaauggcuccaucccaaacgacaagcccuuccagaaugucaaccgaaucacuuauggugccuguccuagauacgugaaacaaaauacacuaaagcucgcuaccgggaugaggaacgugccagagaaacagacucggggaauuuuuggcgccaucgcaggcuucauugaaaaugggugggagggaauggucgacgguugguauggcuuccgucaccagaacucagaggggcgcggacaagcugccgaucugaagaguacacaggcggccauagaccagaucaacggcaaacuuaauagacugauugguaagaccaacgaaaaauuucaccagaucgagaaggaguucagcgaaguugaagggaggauccaagauuuggagaaguacguggaggacacgaaaauugaucucugguccuauaaugcagaacuguuaguagcucuggagaaccagcauaccauagaccucacagauucugaaaugaauaaacuuuuugagaagacuaagaaacagcugcgggaaaacgccgaggacaugggcaauggaugcuucaagaucuaccacaagugugauaacgcuugcauuggcagcauccgaaaugggaccuaugaccaugauguguaccgcgacgaggccuugaacaauagauuucagauuaaaggagucgaacuaaagucagguuacaaagacuggauccuguggauaaguuucgcaaucuccugcuuucuccuguguguggcccuucugggcuucauuaugugggcuugccaaaaggggaacaucagguguaauauuugcaucuga

SEQ ID NO: 135825 - RNA, 1701 nt, Artificial Sequence
  derived and/or modified CDS sequence (opt3) from hemagglutinin__InfluenzaA__AET10098
augaagaccaucauugcccugagcuacauacucugccuuguguucgcucagaaauuucccggcaacgacaauuccacagcaacucuguguuuggggcaccaugccgucccuaacggaacgaucguuaagaccauuacaaaugaucaaaucgaggugacuaacgcgaccgaauuaguacaaaauucuucaacaggugagauuugcgacaguccacaccagaucauagauggcgaaaacuguacccugaucgacgcucuacucggggauccgcagugcgacggauuccagaauaaaaagugggaucuguuuguggagagaagcaaagccuauuccaacuguuaccccuaugacgucccugauuacgcaucucuuaggucgcugguggccucaagcggcacuuuggaguucaauaacgaaaguuuuaauuggacagguguuacccagaacgggacguccucugcuugcauucggcgcagcaauaacuccuucuuuucacgacucaauuggcugacucaucugaacuucaaguauccagcacucaacgugaccaugcccaauaacgagcaguuugacaaguuauacaucuggggaguccaccauccuggcacagauaaagaccagauuuuccuguaugcccaagcuaguggccguaucacugugagcaccaagagaucucagcaggccguaauaccaaauauuggguccaggccccggguucgcaacaucccuucaagaauuagcaucuacuggacaaucgugaaaccaggagauauucuuuugauaaauaguaccgguaaccugaucgcgccgaggggcuacuuuaagauucggucugggaaauccagcaucaugcgcucggacgcacccauaggaaaguguaauucugaaugcauuacgccuaacggcuccaucccaaaugacaagcccuuccagaacgucaaucgaaucacuuauggugccuguccuagauacgugaaacaaaacacacuaaagcucgcuaccgggaugaggaaugugccagagaaacagacucggggaauuuuuggcgccaucgcaggcuucauugaaaacgggugggagggaauggucgaugguugguauggcuuccgucaccaaaauucagaggggcgcggacaggcugccgaccugaagaguacacaggcggccauagaucagaucaacggcaaacuuaacagacugauugguaagaccaaugaaaaauuucaccagaucgagaaggaguucagcgaaguugaagggaggauccaagacuuggagaaguacguggaggauacgaaaauugaccucugguccuauaacgcagaacuguuaguagcucuggagaaucagcauaccauagaucucacagacucugaaaugaacaaacuuuuugagaagacuaagaaacagcugcgggaaaaugccgaggauaugggcaacggaugcuucaagaucuaccacaagugugacaaugcuugcauuggcagcauccgaaacgggaccuaugaucaugacguguaccgcgacgaggccuugaauaacagauuucagauuaaaggagucgaacuaaagucagguuacaaagauuggauccuguggauaaguuucgcaaucuccugcuuucuccuguguguggcccuucugggcuucauuaugugggcuugccaaaaggggaauaucagguguaacauuugcaucuga

SEQ ID NO: 135826 - RNA, 1701 nt, Artificial Sequence; identical to SEQ ID NO: 134903
  derived and/or modified CDS sequence (opt3) from hemagglutinin__InfluenzaA__AET10099

SEQ ID NO: 135827 - RNA, 1701 nt, Artificial Sequence; identical to SEQ ID NO: 135030
  derived and/or modified CDS sequence (opt3) from hemagglutinin__InfluenzaA__AET10100

SEQ ID NO: 135828 - RNA, 1701 nt, Artificial Sequence
  derived and/or modified CDS sequence (opt3) from hemagglutinin__InfluenzaA__AET10101
augaagaccaucauugcccugagcugcauacucugucuuguguucgcucagaaacugcccggcaacgacaauuccacagcaacuuugugcuuagggcaccaugccgucccuaacggaacgaucguuaagaccauuacaaaugaucaaaucgaggugacuaacgcgaccgaacugguacagucuucaaguacaggugagauuugugacagcccacaccagauccuagauggcgaaaauugcacccucauagacgcucugcuuggggauccgcagugugacggauuucaaaacaaaaagugggaucuguucguggagagauccaaagccuacucuaauugcuaucccuacgacgucccugauuaugcaucguugaggucacucguggccagcaguggcacucuggaauuuaacaaugaguccuucaacuggacagguguuacccagaaugggacgucuagcgcuuguauccggcgcuccaacaauucauuuuucagucgacugaacuggcucacucauuuaaauuuuaaguacccagcacugaacgugaccaugcccaacaaugagcaguucgacaaacuuuauauuuggggaguccaccauccuggcgccgauaaggaccagaucuuuuuguacgcucaagccagcggccguauuacagugucuacuaagagaucccagcaggcgguaaucccaaacauagggucaaggccccggguucgcaauauuccuagcagaaucaguauuuauuggaccaucgugaaaccaggagauauccugcuaauuaacucuacagguaaucucauagcaccgaggggcuacuucaagauccgguccgggaaaagcucgauuaugcgcucugacgcccccaucggaaagugcaacuccgaauguauaaccccuaauggcucaauuccaaacgacaagcccuuucagaaugucaaccgaaucacguacggugcuugcccuagauaugugaaacaaaguacucugaaacuugccacagggaugaggaaugugccagagaagcagacccggggaaucuucggcgcaauugcuggcuuuaucgaaaacgggugggagggaauggucgaugguugguacggcuuccgucaccagaauagcgaggggcgcggacaagccgcggaccugaaguccacucaggccgcaauugaucagauaaacggcaaauugaauagacucaucgguaagacaaacgaaaaauuccaccagauugagaaggaauuuucugagguugaagggaggauccaagaccuggagaaguauguggaggauaccaaaaucgacuuauggagcuacaacgcugaacugcucguagcccuugagaaucagcauacgauugaucugaccgacucagaaaugaacaaguuguucgagaaaacaaagaaacagcuacgggaaaaugcugaggauaugggcaacggauguuuuacuauauaucacaagugcgacaaugccugcaucggcaguauucgaaacgggaccuacgaucauaauguguaucgcgacgaggcacugaacaauagauuccagaucaagggagucgaacucaaauccgguuacaaggacuggauucuguggaucagcuuugccauaucuuguuuccuucugugcguggcuuugcucggcuuuaucaugugggcgugucaaaaagggaacauuaggugcaauaucuguauuuga

SEQ ID NO: 135829 - RNA, 1701 nt, Artificial Sequence
  derived and/or modified CDS sequence (opt3) from hemagglutinin__InfluenzaA__AET10102
augaagaccaucauugcccugagcuacauacucugccuuguguucacacagaaacugcccggcaacgacaauuccacugcuacguuguguuuagggcaccaugcagucccuaacggaaccaucguuaagacaauuacuaaugaucaaaucgaggugaccaacgccacagaacugguacagucuucaaguaccggugagauuugcgacagcccacaccagauccuagauggcaaaaauuguacucucauagacgcgcugcuuggggauccgcagugcgacggauuucaaaacaagaaaugggaucuguucguggaaagauccaaggcuuauucuaauuguuaccccuuugacgucccugauuaugccucguugaggucacucguggcaagcaguggcacacuggaguucaacaaugaauccuuuaacuggaccgguguuacgcagaaugggacuucuagcgccugcaugcggcgcuccaagucaaguuucuuuagccgacugaacuggcucacccauuuaaauuucaaauacccagcucugaacgugacaaugcccaaugacgagcaguuugauaaacuuuauaucuggggaguccaccauccuggcacugacaaggaucagauuuucuuguacgcacaagccucuggccguaucaccguguccacaaagagaucacagcagaccguaauuccaaacaucgggagcaggccccggauacgcaacauuccuaguagaaucucuauuuauuggacgaucguuaaaccaggagacauccugcuaauuaauuccacugguaaccucauagcuccgaggggcuacuuuaagauccggagcgggaagucgucuauuaugcgcuccgacgcccccaucggaaaauguaauucagagugcauaacaccuaacggcaguauuccaaaugauaagcccuuccagaacgugaaucgaaucaccuacggugcguguccuagauaugucaaacaaaacacucugaaacuugcaacagggaugaggaaugugccagaaaagcagacccggggaaucuuuggcgccauugcuggcuucaucgagaacgggugggaaggaaugguggacgguugguacggcuuccgucaccagaauagcgaggggcgcggacaagccgcagaucugaaguccacgcaggcugccauugaccagauaaacggcaaauugaauagacucaucgguaggaccaacgagaaguuucaccagauugaaaaggaguucucugaagucgaggggcggauccaagaucuggaaaaauauguugaggacacaaagaucgauuuauggagcuacaaugcggagcugcucguggcccuugaaaaccagcauacuauugaccugaccgauucagagaugaacaaauuguuugaaaagacacgaaaacagcuacgcgagaaugcagaagacaugggcaacggaugcuucaagauauaucacaagugugauaaugcuugcaucggcaguauuagaaacgggacuuacgaccaugacguauauagggaugaggcccugaauaaccgguuucagaucaaaggaguggagcucaaguccgguuacaaagacuggauucuguggaucagcuucgcuauaucuugcuuucuucugugugucgccucauugggcuucaucaugugggcaugccaaaaggggaauauucgcuguaacaucugcauuuga

SEQ ID NO: 135830 - RNA, 1701 nt, Artificial Sequence
  derived and/or modified CDS sequence (opt3) from hemagglutinin__InfluenzaA__AET10103
augaagaccaucauugcccugagcuacauacucugccuuguguucgcucagaaacugcccggcaacgacaauuccacagcaacuuuguguuuagggcaccaugccgucccuaacggaacgaucguuaagaccauuacaaaugaucaaaucgaggugacuaacgcgaccgaacugguacaaaauucuucaacaggugagauuugcgacaguccacaccagauccuagauggcgaaaacuguacccucauagacgcucugcuuggggauccgcagugcgacggauuucagaauaaaaagugggaucuguucguggagagaagcaaagccuauuccaacuguuaccccuaugacgucccugauuacgcaucuuugaggucgcucguggccucaagcggcacucuggaauuuaauaacgagaguuucaauuggacagguguuacccagaacgggacguccucugcuugcauccggcgcagcaauaacuccuuuuucucacgacugaauuggcucacucauuuaaacuuuaaguauccagcacugaacgugaccaugcccaauaacgagcaguucgacaaacuuuacauuuggggaguccaccauccuggcacagauaaggaccagaucuuuuuguaugcccaagcuaguggccguauuacugugagcaccaagagaucucagcaggccguaaucccaaauauaggguccaggccccggguucgcaacauuccuucaagaaucagcauuuacuggacaaucgugaaaccaggagauauccugcuaauuaauaguaccgguaaccucauagcgccgaggggcuacuucaagauccggucugggaaauccagcauuaugcgcucggacgcacccaucggaaaguguaauucugaaugcauaacgccuaacggcuccauuccaaaugacaagcccuuucagaacgucaaucgaaucacuuauggugccuguccuagauacgugaaacaaaacacacugaaacuugcuaccgggaugaggaaugugccagagaagcagacucggggaaucuucggcgccauugcaggcuuuaucgaaaacgggugggagggaauggucgaugguugguauggcuuccgucaccaaaauucagaggggcgcggacaggcugccgaccugaagaguacacaggcggccauugaucagauaaacggcaaauugaacagacucaucgguaagaccaaugaaaaauuccaccagauugagaaggaauuuagcgagguugaagggaggauccaagaccuggagaaguacguggaggauacgaaaaucgacuuaugguccuauaacgcagaacugcucguagcucuugagaaucagcauaccauugaucugacagacucugaaaugaacaaguuguucgagaaaacuaagaaacagcuacgggaaaaugccgaggauaugggcaacggaugcuuuaagauauaccacaagugugacaaugcuugcaucggcagcauucgaaacgggaccuaugaucaugacguguaccgcgacgaggcccugaauaacagauuccagaucaaaggagucgaacucaagucagguuacaaagauuggauucuguggaucaguuuugcaauauccugcuuccuucuguguguggccuugcucggcuuuaucaugugggcuugccaaaaggggaauauuagguguaacaucugcauuuga

SEQ ID NO: 135831 - RNA, 1701 nt, Artificial Sequence
  derived and/or modified CDS sequence (opt3) from hemagglutinin__InfluenzaA__AET10104
augaagaccaucauugcccugagcuacauacucugccuuguguucgcucagaaauuucccggcaacgacaauuccacagcaacucuguguuuggggcaccaugccgucccuaacggaacgaucguuaagaccauuacaaaugaucaaaucgaggugacuaacgcgaccgaauuaguacaaaauucuucaacaggugagauuugcgacaguccacaccagaucauagauggcgaaaacuguacccugaucgacgcucuacucggggauccgcagugcgacggauuccagaauaaaaagugggaucuguuuguggagagaagcaaagccuauuccaacuguuaccccuaugacgucccugauuacgcaucucuuaggucgcugguggccucaagcggcacuuuggaguucaauaacgaaaguuuuaauuggacagguguuacccagaacgggacguccucugcuugcauucggcgcagcaauaacuccuucuuuucacgacucaauuggcugacucaucugaacuucaaguauccagcacucaacgugaccaugcccaauaacgagcaguuugacaaguuauacaucuggggaguccaccauccuggcacagauaaagaccagauuuuccuguaugcccaagcuaguggccguaucacugugagcaccaagagaucucagcaggccguaauaccaaauauuggguccaggccccggguucgcaacaucccuucaagaauuagcaucuacuggacaaucgugaaaccaggagauauucuuuugauaaauaguaccgguaaccugaucgcgccgaggggcuacuuuaagauucggucugggaaauccagcaucaugcgcucggacgcacccauaggaaaguguaauucugaaugcauuacgccuaacggcuccaucccaaaugacaagcccuuccagaacgucaaucgaaucacuuauggugccuguccuagauacgugaaacaaaacacacuaaagcucgcuaccgggaugaggaaugugccagagaaacagacucggggaauuuuuggcgccaucgcaggcuucauugaaaacgggugggagggaauggucgaugguugguauggcuuccgucaccaaaauucagaggggcgcggacaggcugccgaccugaagaguacacaggcggccauagaucagaucaacggcaaacuuaacagacugauugguaagaccaaugaaaaauuucaccagaucgagaaggaguucagcgaaguugaagggaggauccaagacuugggcaaguacguggaggauacgaaaauugaccucugguccuauaacgcagagcuguuaguagcucuggaaaaucagcauaccauagaucucacagacucugagaugaacaaacuuuuugaaaagacuaagaaacagcugcgggagaaugccgaagauaugggaaacggcugcuucaagaucuaccacaagugugacaaugcuugcauugggagcauccgaaacggaaccuaugaucaugacguguaccgcgacgaggccuugaauaacagauuucagauuaaaggugucgagcuaaagucaggcuacaaagauuggauccuguggauaaguuucgcaaucuccugcuuucuccuguguguggcccuucugggguucauuaugugggcuugccaaaagggaaauaucagguguaacauuugcaucuga

SEQ ID NO: 135832 - RNA, 1701 nt, Artificial Sequence
  derived and/or modified CDS sequence (opt3) from hemagglutinin__InfluenzaA__AET10105
augaagaccaucauugcccugagcuacauacucugccuuguguucgcucaggagcugcccggcaacgacaauuccacagcaacuuuguguuuagggcaccaugccgucccuaacggaacgaucguuaaaaccauuacaaaugaucaaaucgaagugacuaacgcgaccgagcugguacagucuucaaguacaggugaaauuugcaauagcccacaccagauccuagacggcgagaacuguacccucauagaugcucugcuuggggacccgcagugcgauggauuucaaaauaagaaaugggaccuguucguggaaagauccaaggcccauucuaacuguuaucccuacgaugucccugacuaugcaucguugaggucacucguggccagcaguggcacucuggaguuuaauaacgaguccuucaauuggacagguguuacccagaacgggacgucuagcgcuugcauccggcgcuccaauaacucauuuuucagucgacugaauuggcucacucacuuaaacuuuaaauacccagcacugaacgugaccaugcccaauaacgaacaguucgauaaacuuuauauuuggggaguccaucacccuggcacagacaaggaucagaucuuuuuguacgcccaagcugccggccguauuacugugagcaccaagagaucucagcaggcgguaaucccaaauauaggguccaggccccggguucgcaacauuccuucaagagugagcaucuauuggacaauugucaagccaggagacauccugcuaaucaauaguaccgguaaccucauugcaccgaggggcuacuucaaaauacggucugggaaguccagcaucaugcgcucggaugcccccauuggaaaauguaauucugcuugcaucacgccuaacggcuccauaccaaaugacaagcccuuucagaacgugaaucgaauuacuuacggugccuguccuagauaugugaagcaaaacacacugaaacuugcaaccgggaugaggaaugucccagagaagcagacucggggaaucuucggcgcuaucgccggcuuuauugaaaacgggugggagggaaugguugacgguugguacggcuuccgucaccaaaauucagaggggcgcggacaggcggccgaucugaaaaguacacaggcagcuaucgaccagauuaacggcaaguugaacagacucauagguaaaaccaaugaaaaguuccaucagaucgagaaagaauuuagcgagguggaagggaggauucaagaucuggagaaguauguagaggacacgaagaucgauuuaugguccuacaacgccgaacugcucguggcucuugagaaucagcacaccaucgaccugacagauucugaaaugaacaaauuguucgagaagacuaaaaagcagcuacgggaaaaugccgaggacaugggcaacggaugcuuuaaaauuuaucauaagugugauaaugcaugcauaggcagcauccgaaacgggaccuacgaccacgaugucuaucgcgacgaggcccugaauaacagauuccagauuaagggaguggaacucaaaucagguuacaaggacuggauccuguggauuaguuuugcuaucuccugcuuccuucuguguguugcguugcucggcuuuauaaugugggcaugccaaaaagggaauaucagguguaacauuugcaucuga

SEQ ID NO: 135833 - RNA, 1701 nt, Artificial Sequence
  derived and/or modified CDS sequence (opt3) from hemagglutinin__InfluenzaA__AET10106
augaagaccaucauugcccugagcuacauacucugccuuguguucgcucagaaacugcccggcaacuauaauuccacagcaacuuuguguuuagggcaccaugccgucccuaacggaacgaucguuaagaccauuacaaaugaccaaaucgaggugacuaacgcgaccgaacugguacagucuucaaguacaggugagauuugcaauagcccacaccagauccuagauggcgaaaacuguacccucauagacgcucugcuuggggauccgcagugcgacggauuucaaaauaaaaagugggaucuguucguggagagauccaaagcccauucuaacuguuaccccuaugacgucccugauuacgcaucguugaggucacucguggccagcaguggcacucuggaauuuaauaacgaguccuucaauuggacagguguuacccagaacgggacgucuagcgcuugcauccggcgcuccaauaacucauuuuucagucgacugaauuggcucacucacuuaaacuuuaaguauccagcacugaacgugaccaugcccaauaacgagcaguucgacaagcuguacauuuggggaguccaucacccuggcacagauaaagaccagaucuuuuuguaugcccaagcuagcggccguauuacugugucuaccaagagaucccagcaggccguaaucccaaauauagggucaaggccccggguucgcaacauuccuagcagagugaguaucuacuggacaauugucaaaccaggagauauccugcuaaucaauucuaccgguaaccucauugcgccgaggggcuacuucaagauacgguccgggaaaagcucgaucaugcgcucugacgcacccauuggaaaguguaauuccgccugcaucacgccuaacggcucaauaccaaaugauaagcccuuucagaacgugaaucgaauuacuuauggugcuuguccuagauacgugaaacaaaacacacugaaacuugccaccgggaugaggaaugucccagaaaaacagacucggggaaucuucggcgcaaucgcuggcuuuauugagaacgggugggaaggaaugguugacgguugguauggcuuccgucaccagaauagugaggggcgcggacaagccgcggaccuuaagagcacacaggccgcaaucgaucagauuaacggcaaauugaacagacucauagguaagaccaaugagaaauuccaucagaucgaaaaggaguuuuccgaaguggaggggaggauucaagaccuggaaaaguacguagaggauacgaaaaucgacuuauggucuuauaacgcugagcugcucguggcccuugaaaaucagcacaccaucgaucugacagacagcgagaugaacaaguuguucgaaaagacuaagaaacagcuacgggagaaugcugaagauaugggcaacggaugcuuuaagauuuaccauaagugugacaaugccugcauaggcucaauccgaaacgggaccuaugaucacgacgucuaccgcgaugaggcacugaauaacagauuccagauuaaaggaguggagcucaagagugguuacaaagacuggauccuguggauuuccuuugccaucagcugcuuccuucuguguguugcuuugcucggcuuuauaaugugggcgugccaaaaggggaauaucagguguaacauuugcaucuga

SEQ ID NO: 135834 - RNA, 1701 nt, Artificial Sequence
  derived and/or modified CDS sequence (opt3) from hemagglutinin__InfluenzaA__AET10107
augaagaccaucauugcccugagcuacauacucugccuuguguucgcucaggagauccccggcaacgacaauuccacagcaacucuguguuuggggcaccaugccgucccuaacggaacgauuguuaaaaccaucacaaaugaucaaauugaagugacuaacgcgaccgaguuaguacagucuucaaguacaggugaaaucugcaauagcccacaccagauacuggacggcgagaacuguacccuaaucgaugcucuccugggggacccgcagugcgauggauuucaaaauaagaaaugggaccuuuucguggaaagauccaaggcccauucuaacuguuaucccuacgaugucccugacuaugcaucgcugaggucauugguggccagcaguggcacucucgaguuuaauaacgaguccuucaauuggacagguguuacccagaacgggacgucuagcgcuugcauucggcgcuccaauaacucauuuuucagucgacugaauuggcugacucaccucaacuuuaaauacccagcauuaaacgugaccaugcccaauaacgaacaguucgauaagcuguauaucuggggaguccaucacccuggcacagacaaggaucagauuuuucuuuacgcccaagcuagcggccguaucacugugucuaccaaaagaucccagcaggccguaauaccaaauauugggucaaggccccggguucgcaacaucccuagcagagugaguauuuauuggacaaucgucaagccaggagacaucuugcugauuaauucuaccgguaaccuaauagcgccgaggggcuacuucaaaauccgguccggaaagagcucgauuaugcgcucugaugcacccaucgggaaauguaauuccgccugcauaacgccuaacggcucaauuccaaaugacaagcccuuucagaacgugaaucgaaucacuuacggugcuuguccuagauaugugaagcaaaacacacucaaacuggccaccgggaugaggaaugucccagagaagcagacucggggaaucuucggcgcaauugcuggcuuuaucgaaaacgggugggagggaaugguugacgguugguacggcuuccgucaccagaauagugaggggcgcggacaagccgcggaucuuaaaagcacacaggccgcaauugaccagauaaacggcaagcugaacagauugaucgguaaaaccaaugaaaaguuccaucagauugagaaagaauuuuccgagguggaagggaggauccaagaucucgagaaguauguagaggacacgaagaucgaucuguggucuuacaacgcugaauuacugguggcccucgagaaucagcacaccauugaccuuacagauagcgaaaugaacaaacuguucgagaagacuaaaaagcaguugcgggaaaaugcugaggacaugggcaacggaugcuuuaaaauauaucauaagugugauaaugccugcaucggcucaauucgaaacgggaccuacgaccacgaugucuaucgcgacgaggcacuaaauaacagauuccagaucaagggaguggaacugaaaagugguuacaaggacuggauucucuggaucuccuuugccauaagcugcuuccugcuuuguguugcucuguugggcuuuaucaugugggcgugccaaaaagggaauauuaaguguaacaucugcauuuga

SEQ ID NO: 135835 - RNA, 1701 nt, Artificial Sequence; identical to SEQ ID NO: 131459
  derived and/or modified CDS sequence (opt3) from hemagglutinin__InfluenzaA__AET10108

SEQ ID NO: 135836 - RNA, 1701 nt, Artificial Sequence; identical to SEQ ID NO: 135030
  derived and/or modified CDS sequence (opt3) from hemagglutinin__InfluenzaA__AET10109

SEQ ID NO: 135837 - RNA, 1701 nt, Artificial Sequence
  derived and/or modified CDS sequence (opt3) from hemagglutinin__InfluenzaA__AET10110
augaagaccaucauugcccugagcuacauacucugccuuguguucgcucagaaacugcccggcaacgacaauuccacagcaacuuuguguuuagggcaccaugccgucccuaacggaacgaucguuaagaccauuacaaaugaucaaaucgaggugacuaacgcgaccgaacugguacagucuucaaguacaggugagauuugcaauagcccacaccagauccuagacggcgaaaacuguacccucauagaugcucugcuuggggacccgcagugcgauggauuucaaaauaaaaagugggaccuguucguggagagauccaaagccuauucuaacuguuaccccuaugaugucccugacuacgcaucguugaggucacucguggccagcaguggcacucuggaauuuaauaacgaguccuucaauuggacagguguuacccagaacgggacgucuagcgcuugcauccggcgcuccaauaacucauuuuucagucgacugaauuggcucacucauuuaaacuuuaaguauccagcacugaacgugaccaugcccaauaacgagcaguucgauaagcuguacauuuggggaguccaccauccuggcacagacaaagaucagaucuuuuuguaugcccaagcuagcggccguauuacugugucuaccaagagaucccagcaggccguaaucccaaauauagggucaaggccccggguucgcaacauuccuagcagagugaguaucuacuggacaauugucaaaccaggagacauccugcuaaucaauucuaccgguaaccucauugcgccgaggggcuacuucaagauacgguccgggaaaagcucgaucaugcgcucugaugcacccauuggaaaguguaauuccgccugcaucacgccuaacggcucaauaccaaaugacaagcccuuucagaacgugaaucgaauuacuuauggugcuuguccuagauacgugaaacaaaacacacugaaacuugccaccgggaugaggaaugucccagaaaaacagacucggggaaucuucggcgcaaucgcuggcuuuauugagaacgggugggaaggaaugguugacgguugguauggcuuccgucaccagaauagugaggggcgcggacaagccgcggaucuuaagagcacacaggccgcaaucgaccagauuaacggcaaauugaacagacucauagguaagaccaaugagaaauuccaccagaucgaaaaggaguuuuccgaaguggaggggaggauucaagaucuggaaaaguacguagaggacacgaaaaucgauuuauggucuuauaacgcugagcugcucguggcccuugaaaaucagcauaccaucgaccugacagauagcgagaugaacaaguuguucgaaaagacuaagaaacagcuacgggagaaugcugaagacaugggcaacggaugcuuuaagauuuaccacaagugugauaaugccugcauaggcucaauccgaaacgggaccuaugaccaugaugucuaccgcgacgaggcacugaauaacagauuccagauuaaaggaguggagcucaagagugguuacaaagacuggauccuguggauuuccuuugccaucagcugcuuccuucuguguguugcuuugcucggcuuuauaaugugggcgugccaaaaggggaauaucaaauguaacauuugcaucuga

SEQ ID NO: 135838 - RNA, 1701 nt, Artificial Sequence
  derived and/or modified CDS sequence (opt3) from hemagglutinin__InfluenzaA__AET10111
augaagaccaucauugcccugagcuacauacucugccuuguguucgcucaggagauccccggcaacgacaauuccacagcaacucuguguuuggggcaccaugccgucccuaacggaacgauuguuaaaaccaucacaaaugaucaaauugaagugacuaacgcgaccgaguuaguacagucuucaaguacaggugaaaucugcaauagcccacaccagauacuggacggcgagaacuguacccuaaucgaugcucuccugggggacccgcagugcgauggauuucaaaauaagaaaugggaccuuuucguggaaagauccaaggcccauucuaacuguuaucccuacgaugucccugacuaugcaucgcugaggucauugguggccagcaguggcacucucgaguuuaauaacgaguccuucaauuggacagguguuacccagaacgggacgucuagcgcuugcauucggcgcuccaauaacucauuuuucagucgacugaauuggcugacucaccucaacuuuaaauacccagcauuaaacgugaccaugcccaauaacgaacaguucgauaagcuguauaucuggggaguccaucacccuggcacagacaaggaucagauuuuucuuuacgcccaagcuagcggccguaucacugugucuaccaaaagaucccagcaggccguaauaccaaauauugggucaaggccccggguucgcaacaucccuagcagagugaguauuuauuggacaaucgucaagccaggagacaucuugcugucuaauuccaccgguaaccuaauuggcccgaggggguacuucaaaauacggagcggaaagucgucuaucaugcgcuccgaugcgcccauuggcaaauguaauucagcaugcaucacgccuaacgguaguauaccaaaugacaagcccuuucagaacgugaaucgaauuacuuacggggccuguccuagauaugugaagcaaaacacacucaaacuggcuaccggaaugaggaaugucccagagaagcagacucggggcaucuucggcgccaucgcaggguuuauugaaaacggaugggaggguaugguugacggcugguacggguuccgucaccagaauagcgagggacgcggccaagcugccgaucuuaaauccacacaggcggccaucgaccagauuaacgguaagcugaacagauugauagggaaaaccaaugaaaaguuccaucagaucgagaaagaauuuucugagguggaaggcaggauucaagaucucgagaaguauguagaggacacgaagaucgaucuguggagcuacaacgcagaauuacugguggcucucgagaaucagcacaccaucgaccuuacagauucagaaaugaacaaacuguucgagaagacuaaaaagcaguugcgggaaaaugccgaggacaugggaaacggcugcuuuaaaauuuaucauaagugugauaaugcuugcauagggaguauccgaaacggaaccuacgaccacgaugucuaucgcgacgaggcccuaaauaacagauuccagauuaaggguguggaacugaaauccggcuacaaggacuggauccucuggauuagcuuugcaaucucuugcuuccugcuuuguguugcccuguugggguuuauaaugugggcuugccaaaaaggaaauaucagguguaacauuugcaucuga

SEQ ID NO: 135839 - RNA, 1701 nt, Artificial Sequence
  derived and/or modified CDS sequence (opt3) from hemagglutinin__InfluenzaA__AET10113
augaagaccaucauugcccugagcuacauacucugccuuguguucgcucaggagcugcccggcaacgacaauuccacagcaacuuuguguuuagggcaccaugccguccaaaacggaacgaucguuaaaaccauuacaaaugaucagaucgaagugacuaacgcgaccgagcugguacagucuucaaguacaggugaaauuugcaauagcccucaccagauccuagacggcgagaacuguacccucauagaugcucugcuuggggacccacaaugcgauggauuucagaauaagaaaugggaccuguucguggaaagauccaaggcccauucuaacuguuauccguacgauguccccgacuaugcaucguugaggucacucguggccagcaguggcacucuggaguuuaauaacgaguccuucaauuggacagguguuacccagaacgggacgucuagcgcuugcauccggcgcuccaauaacucauuuuucagucgacugaauuggcucacucacuuaaacuuuaaauacccugcacugaacgugaccaugccaaauaacgaacaguucgauaaacuuuauauuuggggaguccaucaccccggcacagacaaggaucaaaucuuuuuguacgcccaggcuagcggccguauuacugugucuaccaagagaucccagcaggccguaaucccuaauauagggucaaggccacggguucgcaacauucccagcagagugaguaucuauuggacaauugucaagccuggagacauccugcuaaucaauucuaccgguaaccucauugcgccaaggggcuacuucaaaauacgguccggaaagagcucgaucaugcgcucugaugcaccgauugggaaauguaauuccgccugcaucacgcccaacggcucaauaccuaaugacaagccauuucaaaacgugaaucgaauuacuuacggugcuugucccagauaugugaagcagaacacacugaaacuugccaccgggaugaggaaugucccugagaagcagacucggggaaucuucggcgcaaucgcuggcuuuauugaaaacgggugggagggaaugguugacgguugguacggcuuccgucaccaaaauagugaggggcgcggacaggccgcggaucugaaaagcacacaggccgcaaucgaccagauuaacggcaaguugaacagacucauagguaaaaccaaugaaaaguuccaucaaaucgagaaagaauuuuccgagguggaagggaggauucaggaucuggagaaguauguagaggacacgaagaucgauuuauggucuuacaacgcugaacugcucguggcccuugagaaucagcacaccaucgaccugacagauagcgaaaugaacaaauuguucgagaagacuaaaaagcagcuacgggaaaaugcugaggacaugggcaacggaugcuuuaaaauuuaucauaagugugauaaugccugcauaggcucaauccgaaacgggaccuacgaccacgaugucuaucgcgacgaggcacugaauaacagauuccaaauuaagggaguggaacucaaaagugguuacaaggacuggauccuguggauuuccuuugccaucagcugcuuccuucuguguguugcuuugcucggcuuuauaaugugggcgugccagaaagggaauaucagguguaacauuugcaucuga

SEQ ID NO: 135840 - RNA, 1701 nt, Artificial Sequence
  derived and/or modified CDS sequence (opt3) from hemagglutinin__InfluenzaA__AET10114
augaagaccaucauugcccugagcuacauacucugccuuguguucgcucaggagcugcccggcaacgacgauuccacagcaacuuuguguuuagggcaccaugccgucccuaauggaacgaucguuaaaaccauuacaaacgaccaaaucgaagugacuaaugcgaccgagcugguacagucuucaaguacaggugaaauuugcaacagcccacaccagauccuagauggcgagaauuguacccucauagacgcucugcuuggggauccgcagugcgacggauuucaaaacaagaaaugggaucuguucguggaaagauccaaggcccauucuaauuguuaucccuacgacgucccugauuaugcaucguugaggucacucguggccagcaguggcacucuggaguuuaacaaugaguccuucaacuggacagguguuacccagaaugggacgucuagcgcuugcauccggcgcuccaacaauucauuuuucagucgacugaacuggcucacucacuuaaauuuuaaauacccagcacugaacgugaccaugcccaacaaugaacaguucgacaaacuuuauauuuggggaguccaucacccuggcacagauaaggaccagaucuuuuuguacgcccaagcuagcggccguauuacugugucuaccaagagaucccagcaggccguaaucccaaacauagggucaaggccccggguucgcaauauuccuagcagagugaguaucuauuggacaauugucaagccaggagauauccugcuaaucaacucuaccgguaaucucauugcgccgaggggcuacuucaaaauacgguccggaaagagcucgaucaugcgcucugacgcacccauugggaaauguaacuccgccugcaucacgccuaauggcucaauaaguaacgacaagccauuucagaaugugaaccgaauuacuuacggugcuugucccagauaugugaagcaaaauacacugaaacuugccaccgggaugaggaacgucccugagaagcagacucggggaaucuucggcgcaaucgcuggcuuuauugaaaaugggugggagggaaugguugaugguugguacggcuuccgucaccagaacagcgaggggcgcggacaagccgcggaccugaaauccacacaggccgcaaucgaucagauuaauggcaaguugaacagacucauagguaaaaccaacgaaaaguuccaucagaucgagaaagaauuuucugagguggaagggaggauucaagaccuggagaaguauguagaggauacgaagaucgacuuauggagcuacaaugcugaacugcucguggcccuugagaaccagcacaccaucgaucugacagacucagaaaugaauaaauuguucgagaagacuaaaaagcagcuacgggaaaacgcugaggauaugggcaauggaugcuuuaaaauuuaucauaagugugacaacgccugcauaggcaguauccgaaaugggaccuacgaucacgacgucuaucgcgacgaggcacugaacaauagauuccagauuaagggaguggaacucaaauccgguuacaaggauuggauccuguggauuagcuuugccaucucuugcuuccuucuguguguugcuuugcucggcuuuauaaugugggcgugccaaaaagggaacaucauguguaauauuugcaucuga

SEQ ID NO: 135841 - RNA, 1698 nt, Artificial Sequence
  derived and/or modified CDS sequence (opt3) from hemagglutinin__InfluenzaA__AET50439
augaaggugaaacugcucguccuucugugcaccuucacagccacuuacgcugacacgaucuguauuggcuaucacgcaaacaauagcaccgauacaguugacacuguguuggagaagaacguaaccgugacacauuccgucaauuuacuggaaaacucucacaaugggaaacuaugccuccugaagggaauagcgccccuucagcuggguaacuguucaguggccggcuggaucuuggggaauccugagugcgaacuccugauuaguaaagagagcugguccuacaucguugaaaagccaaacccggagaauggaaccuguuaucccggccauuuugcugauuacgaggaacugagagagcaacucucuucggugagcucauucgaaagguuugagauuuucccuaaggagaguuccuggccaaaccacacugucacaggugugucugccagcugcucccauaauggggaaucaaguuuuuaucggaacuuacuguggcuuaccggcaaaaauggauuguaccccaaccugagcaagucuuaugcaaauaacaaagagaaggaagugcuaguucucuggggcgugcaccacccuccaaacaucgggaaucagaaagcccuguaccauacggagaacgcuuacgucuccguggugucaagccacuauagucgcaaguucacucccgaaauagcaaagcgaccuaaaguccgugaccaggagggaagaaucaauuacuauuggacccuucuggagccaggugauacaauuaucuuugaagccaacggcaauuugauugcuccgagguacgccuucgcgcucucucggggguuuggauccggcaucauaaacagcaaugcacccauggacaagugugaugccaaaugccagacuccucaaggugcuauuaacucgucucugccauuccagaauguucaucccgugaccaucggggaguguccuaaguauguacgcuccgccaaauuaagaauggugacaggacugaggaacauuccaucaauccagagucggggccucuuuggcgcaaucgcuggguucauugaaggagguuggaccggcauggucgacgggugguacggauaucaccaccagaaugagcaaggcagcgguuacgccgcggaucagaaguccacgcagaacgccauaaaugggaucacuaacaaaguaaauucuguuauugaaaagaugaacacacaguuuaccgcagugggcaaggaguucaacaaacuugagcgccgaauggaaaaucugaacaagaaagucgacgauggauucaucgacauauggacuuacaaugcugaguugcuagugcugcucgaaaacgagagaacacuggauuuucaugacagcaauguaaagaaccuuuaugaaaaaguuaagucacaacugaagaauaacgccaaagagauuggcaaugggugcuucgaguuuuaccacaaguguaacgacgaaugcauggagagugugaaaaauggaaccuaugauuaccccaaguauuccgaagagagcaaauugaacagggagaagaucgacggugucaagcucgaaucuaugggcguguaccagauccuggcuauuuauucaacggucgccaguagcuuagugcugcuaguuucccucggggcaaucucuuucuggaugugcucgaauggaagccugcagugucggauuugcauauga

SEQ ID NO: 135842 - RNA, 1698 nt, Artificial Sequence
  derived and/or modified CDS sequence (opt3) from hemagglutinin__InfluenzaA__AET50440
augaaggugaaacugcucguccuucugugcaccuucacagccacuuacgcugacacgaucuguauuggcuaucacgcaaacaauagcaccgauacaguugacacuguguuggagaagaacguaaccgugacacauuccgucaauuuacuggaaaacucucacaaugggaaacuaugccuccugaagggaauagcgccccuucagcuggguaacuguucaguggccggcuggaucuuggggaauccugagugcgaacuccugauuaguaaagagagcugguccuacaucguugaaaagccaaacccggagaauggaaccuguuaucccggccauuuugcugauuacgaggaacugagagagcaacucucuucggugagcucauucgaaagguuugagauuuucccuaaggagaguuccuggccaacucacacagucaccggugugucugccagcugcucccauaacggggaaucaaguuuuuaucggaauuuacuguggcuuacgggcaaaaacggauuguaccccaaucugagcaagucuuaugcaaacaauaaagagaaggaaguucuaguacucuggggcgugcaccacccuccaaacaucgggaaccagaaagcccuguaccauacugagaaugcuuacgucuccguggugucaagccacuauagucgcaaguucacccccgaaauagcaaagcgaccuaaaguccgugaccaggagggaagaaucaacuacuauuggacacuucuggagccaggugauacuauuaucuuugaagccaauggcaacuugauugcuccgagguacgccuucgcgcucucucggggguuuggauccggcaucauaaauagcaacgcacccauggacaagugugaugccaaaugccagaccccucaaggugcuauuaauucgucucugccauuccagaacguucaucccgugacaaucggggaguguccuaaguauguacgcuccgccaaauuaagaauggugaccggacugaggaauauuccaucaauccagagucggggccucuuuggcgcaaucgcuggguucauugaaggagguuggacgggcauggucgacgggugguacggauaucaccaccagaacgagcaaggcagcgguuacgccgcggaucagaaguccacucagaaugccauaaacgggaucacaaauaaagugaacucuguuauugaaaagaugaauacccaguuuacugcagugggcaaggaguucaacaaacuugagcgccgaauggaaaaccugaauaagaaagucgacgauggauucaucgacauauggacauacaacgcugaguugcuagugcugcucgaaaaugagagaacccuggauuuucaugacagcaacguaaagaaucuuuaugaaaaaguuaagucacaacugaagaacaaugccaaagagauuggcaacgggugcuucgaguuuuaccacaaguguaaugacgaaugcauggagagugugaaaaacggaacguaugauuaccccaaguauuccgaagagagcaaauugaauagggagaagaucgacggugucaagcucgaaucuaugggcguguaccagauccuggcuauuuauucaaccgucgccaguagcuuagugcugcuaguuucccucggggcaaucucuuucuggaugugcucgaacggaagccugcagugucggauuugcauauga

SEQ ID NO: 135843 - RNA, 1698 nt, Artificial Sequence
  derived and/or modified CDS sequence (opt3) from hemagglutinin__InfluenzaA__AET50441
augaaggugaaacugcucguccuucugugcaccuucacagccacuuacgcugacacgaucuguauuggcuaucacgcaaacaauagcaccgauacaguugacacuguguuggagaagaacguaaccgugacacauuccgucaauuuacuggaaaacucucacaaugggaaacuaugccuccugaagggaauagcgccccuucagcuggguaacuguucaguggccggcuggaucuuggggaauccugagugcgaacuccugauuaguaaagagagcugguccuacaucguugaaaagccaaacccggagaauggaaccuguuaucccggccauuuugcugauuacgaggaacugagagagcaacucucuucggugagcucauucgaaagguuugagauuuucccuaaggagaguuccuggccaacucacacagucaccggugugucugccagcugcucccauaacggggaaucaaguuuuuaucggaauuuacuguggcuuacgggcaaaaacggauuguaccccaaucugagcaagucuuaugcaaacaauaaagagaaggaaguucuaguacucuggggcgugcaccacccuccaaacaucgggaaccagaaagcccuguaccauacugagaaugcuuacgucuccguggugucaagccacuauagucgcaaguucacccccgaaauagcaaagcgaccuaaaguccguggacaggaggguagaaucaacuacuauuggacacuucuggagccaggcgacacuauuaucuuugaagccaaugggaacuugauugcuccgagguacgccuucgcgcucucucggggauuuggcuccgguaucauaaauagcaacgcacccauggauaagugugacgccaaaugccagaccccucaaggggcuauuaauucgucucugccauuccagaacguucaucccgugacaaucggagaguguccuaaguauguacgcuccgccaaauuaagaauggugaccggccugaggaauauuccaucaauccagagucggggccucuuuggggcaaucgcuggauucauugaagguggcuggacggggauggucgauggaugguacggcuaucaccaccagaacgagcaagguagcggguacgccgcggaccagaaguccacucagaaugccauaaacggcaucacaaauaaagugaacucuguuauugaaaagaugaauacccaguuuacugcagugggaaaggaguucaacaaacuugagcgccgaauggaaaaccugaauaagaaagucgaugacggcuucaucgauauauggacauacaacgcugaguugcuagugcugcucgaaaaugagagaacccuggacuuucaugauagcaacguaaagaaucuuuaugaaaaaguuaagucacaacugaagaacaaugccaaagagauugggaacggaugcuucgaguuuuaccacaaguguaaugacgaaugcauggagagugugaaaaacgguacguaugacuaccccaaguauuccgaagagagcaaauugaauagggagaagaucgauggcgucaagcucgaaucuauggggguguaccagauccuggcuauuuauucaaccgucgccaguagcuuagugcugcuaguuucccucggagcaaucucuuucuggaugugcucgaacggcagccugcagugucggauuugcauauga

SEQ ID NO: 135844 - RNA, 1698 nt, Artificial Sequence
  derived and/or modified CDS sequence (opt3) from hemagglutinin__InfluenzaA__AET50442
augaaggugaaacugcucguccuucugugcaccuucacagccacuuacgcugacacgaucuguauuggcuaucacgcaaacaauagcaccgauacaguugacacuguguuggagaagaacguaaccgugacacauuccgucaauuuacuggaaaacucucacaaugggaaacuaugccuccugaagggaauagcgccccuucagcuggguaacuguucaguggccggcuggaucuuggggaauccugagugcgaacuccugauuaguaaagagagcugguccuacaucguugaaaagccaaacccggagaauggaauuuguuaucccggccauuuugcugauuacgaggaacugagagagcaacucucuucggugagcucauucgaaagguuugagaucuucccuaaggagaguuccuggccaacccacacugucacaggugugucugccagcugcucccauaacggggaaucaaguuuuuaucggaauuuacuguggcuuaccggcaaaaacggauuguaccccaaucugagcaagucuuaugcaaacaauaaagagaaggaaguucuaguacucuggggcgugcaccacccuccaaacauagggaaccagaaagcccuguaccauacggagaaugcuuacgucuccguggugucaagccacuauagucgcaaguucacucccgaaaucgcaaagcgaccuaaaguccguggacaggaggguagaauuaacuacuauuggacccuucuggagccaggcgacacaaucauuuuugaagccaaugggaacuugaucgcuccgagguacgccuucgcgcucucucggggauuuggcuccgguauaauuaauagcaacgcacccauggauaagugugacgccaaaugccagacuccucaaggggcuaucaauucgucucugccauuccagaacguucaucccgugaccauuggagaguguccuaaguauguacgcuccgccaaauuaagaauggugacaggccugaggaauaucccaucaauccagagucggggccucuuuggggcaauugcuggauucauagaagguggcuggaccgggauggucgauggaugguacggcuaucaccaccagaacgagcaagguagcggguacgccgcggaccagaaguccacgcagaaugccaucaacggcauuacuaauaaagugaacucuguuaucgaaaagaugaauacacaguuuaccgcagugggaaaggaguucaacaaacuugagcgccgaauggaaaaccugaauaagaaagucgaugacggcuucauagauauuuggacuuacaacgcugaguugcuagugcugcucgaaaaugagagaacacuggacuuucaugauagcaacguaaagaaucuuuaugaaaaaguuaagucacaacugaagaacaaugccaaagagaucgggaacggaugcuucgaguuuuaccacaaguguaaugacgaaugcauggagagugugaaaaacgguaccuaugacuaccccaaguauuccgaagagagcaaauugaauagggagaagaucgauggcgucaagcucgaaucuauggggguguaccagauucuggcuaucuauucaacggucgccaguagcuuagugcugcuaguuucccucggagcaauuucuuucuggaugugcucgaacggcagccugcagugucggauaugcaucuga

SEQ ID NO: 135845 - RNA, 1698 nt, Artificial Sequence
  derived and/or modified CDS sequence (opt3) from hemagglutinin__InfluenzaA__AET84163
augaaggugaaacugcucguccuucugugcaccuucacagccacuuacgcugacacgaucuguauuggcuaucacgcaaacaauagcaccgauacaguugacacuguguuggagaagaacguaaccgugacacauuccgucaauuuacuggaaaacucucacaaugggaaacuaugccuccugaagggaauagcgccccuucagcuggguaacuguucaguggccggcuggaucuuggggaauccugagugcgaaagucucauuagcaaagaguccuggucuuacaucguugaaaagccaaacccggagaauggaaccuguuaucccggccauuuugcugauuacgaggaacugagagagcaacugucgucagugagcaguuucgaaagguuugagauuuucccuaaggaguccucuuggccaaaccacacugucacaggugugagcgccuccugcucacauaauggggaaaguagcuuuuaucggaaccucuuauggcugaccggaaagaauggccuuuaccccaacuugucuaaguccuaugcaaauaacaaagagaaggaaguacugguucuauggggcgugcaccacccuccaucaaucagcaaccagaaaacgcucuaccauacugagaaugccuacgucaguguggugucuucccacuauagccgcaaguucacccccgaagucgcuaagcgaccuaaaguucgugaccaggaggggagaauaaacuacuauuggacacugcuugagccaggagauacuaucauuuuugaagcaaaugguaaccugaucgccccgagguacgcuuucgccuugucgcggggcuuugggucuggaauuaucaauuccaacgcgcccauggacaagugugaugcaaaaugccagaccccucaaggcgccauaaauucaagucucccauuccagaacgugcaucccguaacaauuggugaguguccuaaguaugugcgcagcgcuaaacugagaauggucaccggguuaaggaauaucccauccauucagucucggggacuguuuggcgccaucgcaggcuucaucgaagggggauggacggguaugguggacggcugguacggguaucaccaccagaacgagcaaggaagcggcuacgcugccgaucagaagucaacucagaaugcgauuaacgguauaacaaauaaaguuaacagugugaucgaaaagaugaauacccaguuuacugccgucgggaaggaguucaacaaacucgagcgccgaauggaaaaccuuaauaagaaaguggacgauggcuucauugacaucuggacauacaacgcagagcuguugguacuacuggaaaaugagagaacccucgauuuucaugacuccaacguuaagaaucuguaugaaaaagugaaaagccaacuuaagaacaaugcuaaagagauaggaaacggcugcuucgaguuuuaccacaaguguaaugacgaaugcauggagucugucaaaaacgggacguaugauuaccccaaguauucagaagagaguaaacugaauagggagaagauugacggagugaaguuggaaagcaugggugucuaccagauccucgccaucuauuccaccguggcuucuucgcugguuuuacuggugagccuaggcgccauuuccuucuggaugugcucaaacgggagucuccagugucggaucugcauuuga

SEQ ID NO: 135846 - RNA, 1698 nt, Artificial Sequence
  derived and/or modified CDS sequence (opt3) from hemagglutinin__InfluenzaA__AET84174
augaaggugaaacugcucguccuucugugcaccuucacagccacuuacgcugacacgaucuguauuggcuaucacgcaaacaauagcaccgauacaguugacacuguguuggagaagaacguaaccgugacacauuccgucaauuuacuggaaaacucucacaaugggaaacuaugccuccugaagggaauagcgccccuucagcuggguaacuguucaguggccggcuggaucuuggggaauccugagugcgaacuccugauuaguaaagagagcugguccuacaucguugaaaagccaaacccggagaauggaaccuguuaucccggccauuuugcugauuacgaggaacugagagagcaacucucuucggugagcucauucgaaagguuugagauuuucccuaaggagaguuccuggccaaaccacacugucacaggugugucugccagcugcucccauaauggggaaucaaguuuuuaucggaacuuacuguggcuuaccggaaagaauggcuuguaccccaaccugagcaagucuuaugcaaauaacaaagagaaggaagugcuaguucucuggggcgugcaccacccuccaaacaucgucgaccagaaaacgcuguaccgcacugagaaugccuacguguccguggucucaagccauuauagucgaaaguucacccccgaaauagcuaagcguccuaaaguuagagaucaggaggggaggaucaacuacuauuggacacuucuggagccaggagacacuauuaucuuugaagcaaaugguaacuugauugccccgcgguacgcuuucgcccucauccgcggcuuugggucuggaauaauuaauuccaacgcgcccaugggcaagugugaugcaaaaugccagaccccucaaggugccaucaauagcucgcugccauuccagaacgugcaccccguaacaauuggggaguguccuaaguaugugagaucugcuaaauuaaggauggucaccggacugcggaauaucccauccauccagucacgcggccucuuuggcgccauugcaggguucauagaaggagguuggacgggcaugguggacgggugguacggauaucaucaccagaacgagcaaggcagugguuacgcugccgaucagaaaagcacucagaaugcgaucaacgggauuacaaauaaaguuaacuccgugaucgaaaagaugaauacccaguuuacugccgucggcaaggaguucaacaaacuugagcgaagaauggaaaaccugaauaagaaaguggacgauggauucauagacauuuggacauacaacgcagaguugcuaguacugcucgaaaaugagaggacccuggauuuucacgacucuaacguuaagaaucuuuaugaaaaaguaaagagccaacugaagaacaaugcuaaagagaucggcaacgggugcuucgaguuuuaccauaaguguaaugacgaaugcauggagucagucaaaaacggaacguaugauuaccccaaguauagugaagaguccaaauugaaucgggagaagaucgacggugugaagcucgaaagcaugggcgucuaccagauucuggccaucuauucuaccguggcuucaaguuuaguucugcuagugagccucggggccauuuccuucuggaugugcucuaacggaucgcugcagugucguauaugcaucuga

SEQ ID NO: 135847 - RNA, 1698 nt, Artificial Sequence
  derived and/or modified CDS sequence (opt3) from hemagglutinin__InfluenzaA__AET84196
augaaggugaaacugcucguccuucugugcaccuucacagccacuuacgcugacacgaucuguauuggcuaucacgcaaacaauagcaccgauacaguugacacuguguuggagaagaacguaaccgugacacauuccgucaauuuacuggaaaacucucacaaugggaaacuaugccuccugaagggaauagcgccccuucagcuggguaacuguucaguggccggcuggaucuuggggaauccugagugcgaaagucucauuagcaaagaguccuggucuuacaucguugaaaagccaaacccggagaauggaaccuguuaucccggccauuuugcugauuacgaggaacugagagagcaacugucgucagugagcaguuucgaaagguuugagauuuucccuaaggaguccucuuggccaaaccacacugucacaggugugagcgccuccugcucacauaauggggaaaguagcuuuuaucggaaccucuuauggcugacccgcaaaaauggacuuuaccccacguugucuaaguccuaugcaaacaauaaagagaaggaaguacugguucuauggggcgugcaccacccuccaucaaucaacgaccagaaaacucucuaccauaccgagaacgccuacgucagcguggugaguucucacuauucccgaaaguucacacccgaaauagcuaagcguccuaaagucagagaucaggagggcaggaucaauuacuauuggacucugcuugagccaggggacaccauuaucuuugaagcaaacggaaaucugauugccccgcgguacgcuuucgccuugagccgcgguuuuggcucggggaucauaaacucuuccgcgcccauggauaagugugacgcaaaaugccagacaccucaaggagccauuaauucaagucucccauuccagaacguucaucccgugaccaucggcgaguguccuaaguauguaagaagcgcuaaacugaggauggugacggguuuacggaauauuccauccauccagucucgcgggcuguuuggagccaucgcaggcuucauugaaggcggguggacuggaauggucgaugguugguacggcuaucaccaccagaacgagcaagggagcggauacgcugccgaccagaagucaacacagaaugcgauaaacggcaucaccaauaaagugaacaguguuauugaaaagaugaauacucaguuuacagccguggguaaggaguucaacaaacucgagcgaagaauggaaaaucuuaacaagaaagucgaugacggguucaucgauauauggaccuacaacgcagagcuguuggugcuacuggaaaaugagaggacgcucgacuuucauaacuccaauguaaagaaccuguaugaaaaaguuaagagccaacuuaagaauaacgcuaaagagauuggcaauggaugcuucgaguuuuaccacaaguguaacgacgaaugcauggagucugugaaaaauggcaccuaugauuaccccaaguauucagaagagaguaaacugaaccgggagaagaucgacggggucaaguuggaaagcaugggaguguaccagauccucgccauuuauuccacagucgcuucuucgcugguguuacugguuagccuaggugccaucuccuucuggaugugcucaaauggcagucuccagugucguauuugcauauga

SEQ ID NO: 135848 - RNA, 1698 nt, Artificial Sequence
  derived and/or modified CDS sequence (opt3) from hemagglutinin__InfluenzaA__AET84207
augaaggugaaacugcucguccuucugugcaccuucacagccacuuacgcugacacgaucuguauuggcuaucacgcaaacaauagcaccgauacaguugacacuguguuggagaagaacguaaccgugacacauuccgucaauuuacuggaaaacucucacaaugggaaacuaugccuccugaagggaauagcgccccuucagcuggguaacuguucaguggccggcuggaucuuggggaauccugagugcgaacuccugauuaguaaagagagcugguccuacaucguugaaaagccaaacccggagaauggaaccuguuaucccggccauuuugcugauuacgaggaacugagagagcaacucucuucggugccuucauucgaaagguuugagauuuucccaaaggagagcaguuggcccaaccacacugucacagguguguccgccucuugcagccauaauggggaauccucauuuuaucggaacuuacuguggcuuaccggcaaaaauggauuguacccuaaccugaguaagagcuaugcaaauaacaaagagaaggaaguucuaguacucuggggcgugcaccacccacccucuaucaacgaccagaaaacgcuguaccauacugagaaugccuacgucuccguggugucaagccacuauagucgcaaguucaccccugaaauagcuaagcgaccaaaaguccgugaucaggaggggagaaucaacuacuauuggacacuucuggagccgagggacacuauuaucuuugaagcaaauggaaacuugauugcuccccgguacgccuucgcccucucucgcgguuuuggcuccgggaucauaaauagcaacgcgccuauggauaagugugacgcaaaaugccagaccccacaaggagccauuaauucgucucugcccuuccagaacguucauccugugacaaucggcgaguguccaaaguauguaagauccgcuaaauuaaggauggugaccggucugcggaauauucccucaauccagagucgcgggcucuuuggagccaucgcaggcuucauugaaggcggguggacgggaauggucgaugguugguacggcuaucaccaccagaacgagcaagggagcggauacgcugccgaccagaaguccacucagaaugcgauaaacggcaucacaaauaaagugaacucuguuauugaaaagaugaauacccaguuuacugccguggguaaggaguucaacaaacuugagcgaagaauggaaaaccugaauaagaaagucgaugacggguucaucgauauauggacauacaacgcagaguugcuagugcugcucgaaaaugagaggacccuggacuuucaugacagcaacguaaagaaucuuuaugaaaaaguuaagucacaacugaagaacaaugcuaaagagauuggcaacggaugcuucgaguuuuaccacaaguguaaugaugaaugcauggagagugugaaaaacggcacguaugacuacccgaaguauuccgaagagagcaaauugaaucgggagaagaucgauggggucaagcucgaaucuaugggaguguaccagauccuggccauuuauucaaccgucgcuaguagcuuagugcugcuaguuucccucggugccaucucuuucuggaugugcucgaacggcagccugcagugucguauuugcauauga

SEQ ID NO: 135849 - RNA, 1698 nt, Artificial Sequence
  derived and/or modified CDS sequence (opt3) from hemagglutinin__InfluenzaA__AET84218
augaaggugaaacugcucguccuucugugcaccuucacagccacuuacgcugacacgaucuguauuggcuaucacgcaaacaauagcaccgauacaguugacacuguguuggagaagaacguaaccgugacacauuccgucaauuuacuggaaaacucucacaaugggaaacuaugccuccugaagggaauagcgccccuucagcuggguaacuguucaguggccggcuggaucuuggggaauccugagugcgaacuccugauuaguaaagagagcugguccuacaucguugaaaagccaaacccggagaauggaaccuguuaucccggccauuuugcugauuacgaggaacugagagagcaacucucuucggugagcucauucgaaagguuugagauuuucccuaaggagaguuccuggccaaaccacacugucacaggugugucugccagcugcucccauaauggggaaucaaguuuuuaucggaacuuacuguggcuuaccggaaagaauggcuuguaccccaaccugagcaagucuuaugcaaauaacaaagagaaggaaguucuaguacucuggggcgugcaccacccuccaaacaucuccaaucagaaaacgcuguaccauacugagaacgccuacgucucaguggugagcagucacuauucucgcaaguucacccccgaaauagcuaagcgaccuaaaguccgugaccaggaggggagaaucaauuacuauuggacacuucuggagccaggagauacuauuaucuuugaagcauccgguaacuugauugccccgagguacgcuuucgcccucagccggggcuuugggucgggaaucauaaauucuaacgcgcccauggacaagugugaugcaaaaugccagaccccucaaggcgccauuaauuccucacugccauuccagaacguucaucccgugacaaucggugaguguccuaaguauguacgcagugcuaaauuaagaauggugaccgggcugaggaauauuccaagcauccagucccggggacucuuuggcgccaucgcaggcuucauugaagggggauggacggguauggucgacggcugguacggguaucaccaccagaacgagcaaggaucuggcuacgcugccgaucagaaaagcacucagaaugcgauaaacgguaucacaaauaaagugaacucaguuauugaaaagaugaauacccaguuuacugccguggggaaggaguucaacaaacuugagcgccgaauggaaaaccugaauaagaaagucgacgauggcuucaucgacauauggacauacaacgcagaguugcuagugcugcucgaaaaugagagaacccuggauuuucaugacaguaacguaaagaaucuuuaugaaaaaguuaagucccaacugaagaacaaugcuaaagagauuggaaacggcugcuucgaguuuuaccacaaguguaaugacgaaugcauggagagcgugaaaaacgggacguaugauuaccccaaguauucugaagagucaaaauugaauagggagaagaucgacggagucaagcucgaaaguauggguguguaccagauccuggccauuuauagcaccgucgcuuccucuuuagugcugcuaguuucgcucggcgccaucagcuucuggaugugcuccaacgggucacugcagugucggauuugcauauga

SEQ ID NO: 135850 - RNA, 1698 nt, Artificial Sequence
  derived and/or modified CDS sequence (opt3) from hemagglutinin__InfluenzaA__AET84229
augaaggugaaacugcucguccuucugugcaccuucacagccacuuacgcugacacgaucuguauuggcuaucacgcaaacaauagcaccgauacaguugacacuguguuggagaagaacguaaccgugacacauuccgucaauuuacuggaaaacucucacaaugggaaacuaugccuccugaagggaauagcgccccuucagcuggguaacuguucaguggccggcuggaucuuggggaauccugagugcgaacuccugauuaguaaagagagcugguccuacaucguugaaaagccaaacccggagaauggaaccuguuaucccggccauuuugcugauuacgaggaacugagagagcaacucucuucggugagcucauucgaaagguuugagauuuucccuaaggagaguuccuggccaaaccacacugucacaggugugucugccagcugcucccauaauggggaaucaaguuuuuaucggaacuuacuguggcuuaccggaaagaauggcuuguaccccacgcugagcaagucuuaugcaaacaauaaagagaaggaagugcuaguucucuggggcgugcaccacccuccaaacaucgucgaccagaaaacucuguaccgcaccgagaacgccuacguguccguggucucaagccauuauagucgaaaguucacacccgaaauagcuaagcguccuaaaguuagagaucaggaggggaggaucaauuacuauuggacucuucuggagccaggagacaccauuaucuuugaagcaaacgguaauuugauugccccgcgguacgcuuucgcccucucucgcggcuuuggguccggaaucauaaacagcaaugcgcccaugggcaagugugaugcaaaaugccagacaccucaaggugccauuaacucgucucugccauuccagaaugugcaccccguaaccaucggggaguguccuaaguaugugagauccgcuaaauuaaggauggucacgggacugcggaacauuccacccauccagucacgcggccucuuuggcgccaucgcaggguucauugaaggagguuggacuggcaugguggacgggugguacggauaucaucaccagaaugagcaaggcagugguuacgcugccgaucagaaaagcacacagaacgcgauaaaugggaucaccaacaaaguuaauuccgugauugaaaagaugaacacucaguuuacagccgucggcaaggaguucaauaaacuugagcgaagaauggaaaaccugaacaagaaaguggacgauggauucaucgacauauggaccuacaaugcagaguugcuaguacugcucgaaaacgagaggacgcuggauuuucacgacucuaauguuaagaaccuuuaugaaaaaguaaagagccaacugaagaauaacgcuaaagagauuggcaaugggugcuucgaguuuuaccauaaguguaacgacgaaugcauggagucagucaaaaauggaaccuaugauuacccgaaguauagugaagaguccaaauugaaccgggagaagaucgacggugugaagcucgaaagcaugggcgucuaccagauccuggccauuuauucuacaguggcuucaaguuuaguucugcuagugagccucggggccaucuccuucuggaugugcucuaauggaucgcugcagugucguauuugcauauga

SEQ ID NO: 135851 - RNA, 1698 nt, Artificial Sequence
  derived and/or modified CDS sequence (opt3) from hemagglutinin__InfluenzaA__AET84240
augaaggugaaacugcucguccuucugugcaccuucacagccacuuacgcugacacgaucuguauuggcuaucacgcaaacaauagcaccgauacaguugacacuguguuggagaagaacguaaccgugacacauuccgucaauuuacuggaaaacucucacaaugggaaacuaugccuccugaagggaauagcgccccuucagcuggguaacuguucaguggccggcuggaucuuggggaauccugagugcgaacuccugauuaguaaagagagcugguccuacaucguugaaaagccaaacccggagaauggaaccuguuaucccggcuacuuugcugauuaugaggaacugagagagcaacucucuucggugagcucauucgaaagguuugagauuuucccuaaggagaguuccuggccaaaccauacugucacaggugugucugccagcugcucccacaauggggaaucaaguuuuuaccggaacuuacuguggcuuaccggcaaaaauggauuguaucccaaccugagcaagucuuacgcaaauaacaaagagaaggaaguucuaguacucuggggcgugcaucacccuccaaacaucgucgaccagaaaacgcuguaccgcacugagaaugccuauguguccguggucucaagccacuacagucgaaaguucacccccgaaauagcuaagcguccuaaaguuagagaucaggaggggaggaucaacuauuacuggacacuucuggagccaggagacacuauuaucuuugaagcaaaugguaacuugauugccccgcgguaugcuuucgcccucucucgcggcuuuggguccggaaucauaaauagcaacgcgcccaugggcaagugugaugcaaaaugccagaccccucaaggugccauuaauucgucucugccauuccagaacgugcaucccguaacaaucggggaguguccuaaguacgugagauccgcuaaauuaaggauggucaccggacugcggaauauuccaucaauccagagucgcggccucuuuggcgccaucgcaggguucauugaaggagguuggacgggcaugguggacgggugguauggauaccaccaucagaacgagcaaggcagcgguuacgcugccgaucagaaguccacucagaaugcgauaaacgggaucacaaauaaaguuaacucugugauugaaaagaugaauacccaguuuacugccgucggcaaggaguucaacaaacuugagcgaagaauggaaaaccugaauaagaaaguggacgauggauucaucgacauauggacauauaacgcagaguugcuaguacugcucgaaaaugagaggacccuggauuuucacgacagcaacguuaagaaucuuuacgaaaaagugaagucacaacugaagaacaaugcuaaagagauuggcaacgggugcuucgaguuuuaucacaaguguaauaacgaaugcauggagagugucaaaaauggaacguacgacuaucccaaguacuccgaagagagcaaauugaaccgggagaagaucgauggugugaagcucgaaucuaugggcgucuaucagauccuggccauuuacucaaccguggcuaguagcuuaguucugcuagugucccucggggccaucucuuucuggaugugcucgaauggaagccugcagugucguauuugcauauga

SEQ ID NO: 135852 - RNA, 1698 nt, Artificial Sequence
  derived and/or modified CDS sequence (opt3) from hemagglutinin__InfluenzaA__AET84251
augaaggugaaacugcucguccuucugugcaccuucacagccacuuacgcugacacgaucuguauuggcuaucacgcaaacaauagcaccgauacaguugacacuguguuggagaagaacguaaccgugacacauuccgucaauuuacuggaaaacucucacaaugggaaacuaugccuccugaagggaauagcgccccuucagcuggguaacuguucaguggccggcuggaucuuggggaauccugagugcgaacuccugauuaguaaagagagcugguccuacaucguugaaaagccaaacccggagaauggaaccuguuaucccggccauuuugcugauuacgaggaacugagagagcaacucucuucggugagcucauucgaaagguuugagauuuucccuaaggagaguuccuggccaaaccacacugucacaggugugucugccagcugcucccauaauggggaaucaaguuuuuaucggaacuuacuguggcuuaccggcaaaaauggauuguaccccaaccugagcaagucuuaugcaaauaacaaagagaaggaagugcuaguucucuggggcgugcaccacccuccaaacaucgucaaucagaaaacgcuguaccgcacugagaacgccuacguguccguggucucaagccauuauagucgaaaguucacccccgaaauagcuaagcguccuaaaguuagagaccaggaggggaggaucaauuacuauuggacacuucuggagccaggagauacuauuaucuuugaagcaaacgguaauuugauugccccgcgguacgcuuucgcccucucucgcggcuuuggguccggaaucauaaacagcaaugcgcccaugggcaagugugacgcaaaaugccagaccccucacggugccauuaacucgugucugccauuccaaaaugugcaucccguaacaaucggggagugcccuaaguaugugagaucugcuaaauuaaggauggucaccggacugcggaacauuccauccauccagucacgcggccucuuuggcgccaucgcaggguucauugaaggagguuggacgggcaugguggaugggugguacggauaucaccaccagaaugagcagggcagugguuacgcugccgaccaaaagagcacucagaacgcgauaaaugggaucacaaacaaaguuaauuccgugauugaaaagaugaacacccaguuuacugccgucggcaaggaguucaacaaacuugagcgaagaauggaaaaucugaacaagaaaguggaugacggauucaucgauauauggacauacaaugcagaguugcuaguacugcucgaaaacgagaggacccuggacuuucaugauucuaauguuaagaaccuuuaugaaaaaguaaagagccagcugaagaauaacgcuaaagagauuggcaauggguguuucgaguuuuaccacaagugcaacgacgaaugcauggagucagucaaaaauggaacguaugacuaccccaaguauagugaagaguccaaauugaacaaggagaagaucgauggugugaaacucgaaagcaugggcgucuaccaaauccuggccauuuauucuaccguggcuucaaguuuaguucugcuagugagccucggggccaucuccuucuggauguguucuaauggaucgcugcagugccggauuuguauauga

SEQ ID NO: 135853 - RNA, 1698 nt, Artificial Sequence
  derived and/or modified CDS sequence (opt3) from hemagglutinin__InfluenzaA__AET84262
augaaggugaaacugcucguccuucugugcaccuucacagccacuuacgcugacacgaucuguauuggcuaucacgcaaacaauagcaccgauacaguugacacuguguuggagaagaacguaaccgugacacauuccgucaauuuacuggaaaacucucacaaugggaaacuaugccuccugaagggaauagcgccccuucagcuggguaacuguucaguggccggcuggaucuuggggaauccugagugcgaacuccugauuaguaaagagagcugguccuacaucguugaaaagccaaacccggagaauggaaccuguuaucccggccauuuugcugauuacgaggaacugagagagcaacucucuucggugagcucauucgaaagguuugagauuuucccuaaggagaguuccuggccaaaccacacugucacaggugugucugccagcugcucccauaauggggaaucaaguuuuuaucggaacuuacuguggcuuaccggcaaaaauggauuguaccccaaccugagcaagucuuaugcaaauaacaaagagaaggaagugcuaguucucuggggcgugcaccacccuccaaacaucgucgaccagaaaacgcuguaccgcacugagaaugccuacguguccguggucucaagccauuauagucgaaaguucacccccgaaauagcuaagcguccuaaaguuagagaucaggaggggaggaucaacuacuauuggacacuucuggagccaggagacacuauuaucuuugaagcaaaugguaacuugauugccccgcgguacgcuuucgcccucucucgcggcuuuggguccggaaucauaaauagcaacgcgcccauggauaagugugacgcaaaaugccagaccccucacggcgccauuaauucgugucugccauuccaaaacgugcaucccguaacaaucggugagugcccuaaguaugugagaucugcuaaauuaaggauggucaccgggcugcggaauauuccauccauccagucacgcggacucuuuggcgccaucgcaggcuucauugaagggggauggacggguaugguggauggcugguacggguaucaccaccagaacgagcagggaaguggcuacgcugccgaccaaaagagcacucagaaugcgauaaacgguaucacaaauaaaguuaacuccgugauugaaaagaugaauacccaguuuacugccgucgggaaggaguucaacaaacuugagcgaagaauggaaaaccugaauaagaaaguggaugacggcuucaucgauauauggacauacaacgcagaguugcuaguacugcucgaaaaugagaggacccuggacuuucaugacucuaacguuaagaaucuuuaugaaaaaguaaagagccagcugaagaacaaugcuaaagagauuggaaacggcuguuucgaguuuuaccacaagugcaaugaugaaugcauggagucagucaaaaacgggacguaugacuaccccaaguauagugaagaguccaaauugaaucgggagaagaucgauggagugaagcucgaaagcaugggugucuaccaaauccuggccauuuauucuaccguggcuucaaguuuaguucugcuagugagccucggcgccaucuccuucuggauguguucuaacgggucgcugcagugccguauuuguauauga

SEQ ID NO: 135854 - RNA, 1698 nt, Artificial Sequence; identical to SEQ ID NO: 135781
  derived and/or modified CDS sequence (opt3) from hemagglutinin__InfluenzaA__AET84284

SEQ ID NO: 135855 - RNA, 1698 nt, Artificial Sequence
  derived and/or modified CDS sequence (opt3) from hemagglutinin__InfluenzaA__AET84306
augaaggugaaacugcucguccuucugugcaccuucacagccacuuacgcugacacgaucuguauuggcuaucacgcaaacaauagcaccgauacaguugacacuguguuggagaagaacguaaccgugacacauuccgucaauuuacuggaaaacucucacaaugggaaacuaugccuccugaagggaauagcgccccuucagcuggguaacuguucaguggccggcuggaucuuggggaauccugagugcgaacuccugauuaguaaagagagcugguccuacaucguugaaaagccaaacccggagaauggaaccuguuaucccggccauuuugcugauuacgaggaacugagagagcaacucucuucggugagcucauucgaaagguuugagauuuucccuaaggagaguuccuggccaaaccacacugucacaggugugucugccagcugcucccauaauggggaaucaaguuuuuaucggaacuuacuguggcuuaccggcaaaaauggauuguaccccaaccugagcaagucuuaugcaaauaacaaagagaaggaagugcuaguucucuggggcgugcaccacccuccaaacaucgggaaucagaaagcccuguaccauacggagaacgcuuacgucuccguggugucaagccacuauaguauaaaguucacucccgaaaucgcaaagcgcccuaaaguccgagaccaggagggacguauuaauuacuauuggacccuucuggagccaggugauacaaucauuuuugaagccaacggcaauuugaucgcuccgagauacgccuucgcgcucucuaggggguuuggauccggcauaauuaacagcaaugcacccauggacaagugugaugccaaaugccagacuccucaaggugcuaucaacucgucucugccauuccagaauguucaucccgugaccauuggggaguguccuaaguauguacgguccgccaaauuacgcauggugacaggacugagaaacaucccaucaauccagaguaggggccucuuuggcgcaauugcuggguucauagaaggagguuggaccggcauggucgacgggugguacggauaucaccaccagaaugagcaaggcagcgguuacgccgcggaucagaaguccacgcagaacgccaucaaugggauuacuaacaaaguaaauucuguuaucgaaaagaugaacacacaguuuaccgcagugggcaaggaguucaacaaacuugagcggcgcauggaaaaucugaacaagaaagucgacgauggauucauagacauuuggacuuacaaugcugaguugcuagugcugcucgaaaacgagcgaacacuggauuuucaugacagcaauguaaagaaccuuuaugaaaaaguuaagucacaacugaagaauaacgccaaagagaucggcaaugggugcuucgaguuuuaccacaaguguaacgacgaaugcauggagagugugaaaaauggaaccuaugauuaccccaaguauuccgaagagagcaaauugaacagagagaagaucgacggugucaagcucgaaucuaugggcguguaccagauucuggcuaucuauucaacggucgccaguagcuuagugcugcuaguuucccucggggcaauuucuuucuggaugugcucgaauggaagccugcaguguaggauaugcaucuga

SEQ ID NO: 135856 - RNA, 1698 nt, Artificial Sequence
  derived and/or modified CDS sequence (opt3) from hemagglutinin__InfluenzaA__AET84339
augaaggugaaacugcucguccuucugugcaccuucacagccacuuacgcugacacgaucuguauuggcuaucacgcaaacaauagcaccgauacaguugacacuguguuggagaagaacguaaccgugacacauuccgucaauuuacuggaaaacucucacaaugggaaacuaugccuccugaagggaauagcgccccuucagcuggguaacuguucaguggccggcuggaucuuggggaauccugagugcgaacuccugauuaguaaagagagcugguccuacaucguugaaaagccaaacccggagaauggaaccuguuaucccggccauuuugcugauuacgaggaacugagagagcaacucucuucggugagcucauucgaaagguuugagauuuucccuaaggagaguuccuggccaaaccacacugucacaggugugucugccagcugcucccauaauggggaacggucauuuuaucgcaacuuacuguggcuuaccggaaagaauggcuuguaccccaaccugaguaagagcuaugcaaauaacaaagagaaggaagugcuaguucucuggggcgugcaccacccuccaaacaucgggaaucagaaaacgcuguaccauacugagaacgccuacgucucugugguguccucacacuauagccgaaaguucacccccgaaauagcuaagcguccuaaagucagagaccaggagggaaggaucaauuacuauuggacacuucuggagccaggugauacuauuaucuuugaagcaaacggcaauuugauugccccgcgguacgcuuucgcccucagucgcggguuuggaucuggcaucauaaacuccaaugcgcccauggacaagugugaugcaaaaugccagaccccucaaggugccauuaacagcucgcugccauuccagaauguucaucccgugacaaucggggaguguccuaaguauguaagaucugcuaaauuaaggauggugaccggacugcggaacauuccauccauccagucacgcggccucuuuggcgccaucgcaggguucauugaaggagguuggacgggcauggucgacgggugguacggauaucaccaccagaaugagcaaggcagugguuacgcugccgaucagaaaagcacucagaacgcgauaaaugggaucacaaacaaaguaaauuccguuauugaaaagaugaacacccaguuuacugccgugggcaaggaguucaacaaacuugagcgaagaauggaaaaucugaacaagaaagucgacgauggauucaucgacauauggacauacaaugcagaguugcuagugcugcucgaaaacgagaggacccuggauuuucaugacucuaauguaaagaaccuuuaugaaaaaguuaagagccaacugaagaauaacgcuaaagagauuggcaaugggugcuucgaguuuuaccacaaguguaacgacgaaugcauggagucagugaaaaauggaacguaugauuaccccaaguauagugaagaguccaaauugaaccgggagaagaucgacggugucaagcucgaaagcaugggcguguaccagauccuggccauuuauucuaccgucgcuucaaguuuagugcugcuaguuagccucggggccaucuccuucuggaugugcucuaauggaucgcugcagugucguauuugcauauga

SEQ ID NO: 135857 - RNA, 1698 nt, Artificial Sequence; identical to SEQ ID NO: 135856
  derived and/or modified CDS sequence (opt3) from hemagglutinin__InfluenzaA__AET84361

SEQ ID NO: 135858 - RNA, 1698 nt, Artificial Sequence
  derived and/or modified CDS sequence (opt3) from hemagglutinin__InfluenzaA__AET84372
augaaggugaaacugcucguccuucugugcaccuucacagccacuuacgcugacacgaucuguauuggcuaucacgcaaacaauagcaccgauacaguugacacuguguuggagaagaacguaaccgugacacauuccgucaauuuacuggaaaacucucacaaugggaaacuaugccuccugaagggaauagcgccccuucagcuggguaacuguucaguggccggcuggaucuuggggaauccugagugcgaacuccugauuaguaaagagagcugguccuacaucguugaaaagccaaacccggagaauggaaccuguuaucccggccauuuugcugauuacgaggaacugagagagcaacucucuucggugagcucauucgaaagguuugagauuuucccuaaggagaguuccuggccaaaccacacugucacaggugugucugccagcugcucccauaauggggaacggucauuuuaucgcaacuuacuguggcuuaccggaaagaauggcuuguaccccaaccugaguaagagcuaugcaaauaacaaagagaaggaaguucuaguacucuggggcgugcaccacccuccaaacaucggggaccagaaaacgcuguaccauacugagaaugccuacgucucugugguguccucacacuauagccgaaaguucacccccgaaauagcuaagcguccuaaagucagagaucaggagggaaggaucaacuacuauuggacacuucuggagccaggugacacuauuaucuuugaagcaaauggcaacuugauugccccgcgguacgcuuucgcccucagucgcggguuuggaucuggcaucauaaauuccaacgcgcccauggauaagugugacgcaaaaugccagaccccucaaggugccauuaauagcucgcugccauuccagaacguucaucccgugacaaucggggaguguccuaaguauguaagaucugcuaaauuaaggauggugaccggacugcggaauauuccauccauccagucacgcggccucuuuggcgccaucgcaggguucauugaaggagguuggacgggcauggucgaugggugguacggauaucaccaccagaacgagcaaggcagugguuacgcugccgaccagaaaagcacucagaaugcgauaaacgggaucacaaauaaagugaacuccguuauugaaaagaugaauacccaguuuacugccgugggcaaggaguucaacaaacuugagcgaagaauggaaaaccugaauaagaaagucgaugacggauucaucgauauauggacauacaacgcagaguugcuagugcugcucgaaaaugagaggacccuggacuuucaugacucuaacguaaagaaucuuuaugaaaaaguuaagagccaacugaagaacaaugcuaaagagauuggcaacgggugcuucgaguuuuaccacaaguguaaugaugaaugcauggagucagugaaaaacggaacguaugacuaccccaaguauagugaagaguccaaauugaaucgggagaagaucgauggugucaagcucgaaagcaugggcguguaccagauccuggccauuuauucuaccgucgcuucaaguuuagugcugcuaguuagccucggggccaucuccuucuggaugugcucuaacggaucgcugcagugucguauuugcauauga

SEQ ID NO: 135859 - RNA, 1698 nt, Artificial Sequence
  derived and/or modified CDS sequence (opt3) from hemagglutinin__InfluenzaA__AET84394
augaaggugaaacugcucguccuucugugcaccuucacagccacuuacgcugacacgaucuguauuggcuaucacgcaaacaauagcaccgauacaguugacacuguguuggagaagaacguaaccgugacacauuccgucaauuuacuggaaaacucucacaaugggaaacuaugccuccugaagggaauagcgccccuucagcuggguaacuguucaguggccggcuggaucuuggggaauccugagugcgaacuccugauuaguaaagagagcugguccuacaucguugaaaagccaaacccggagaauggaaccuguuaucccggccauuuugcugauuacgaggaacugagagagcaacucucuucggugagcucauucgaaagguuugagauuuucccuaaggagaguuccuggccaaaccacacugucacaggugugucugccagcugcucccauaauggggaacggucauuuuaucgcaacuuacuguggcuuaccggaaagaauggcuuguaccccaaccugaguaagagcuaugcaaauaacaaagagaaggaaguucuaguacucuggggcgugcaccacccuccagacaucgggaaccagaaaacgcuguaccauacugagaaugccuacgucucugugguguccucacacuauagccgaaaguucacccccgaaauagcuaagcguccuaaagucagagaucaggagggaaggaucaacuacuauuggacacuucuggagccaggugacacuauuaucuuugaagcaaauggcaacuugauugccccgcgguacgcuuucgcccucagucgcggguuuggaucuggcaucauaaauuccaacgcgcccauggauaagugugacgcaaaaugccagaccccucaaggugccauuaauagcucgcugccauuccagaacguucaucccgugacaaucggggaguguccuaaguauguaagaucugaaaaauuaaggauggugaccggacugcggaauauuccauccauccagucacgcggccucuuuggcgcuaucgccggguucauugagggagguuggacgggcauggucgaugggugguacggauaucaccaccagaacgaacaaggcagugguuacgcagcugaccagaaaagcacucagaaugccauaaacgggaucacaaauaaagugaacuccguuauugagaagaugaauacccaguuuacugcggugggcaaggaguucaacaaacuugaacgaagaauggagaaccugaauaagaaagucgaugacggauucaucgauauauggacauacaacgccgaauugcuagugcugcucgagaaugaaaggacccuggacuuucaugacucuaacguaaagaaucuuuaugagaaaguuaagagccaacugaagaacaaugcaaaagagauuggcaacgggugcuucgaauuuuaccacaaguguaaugaugagugcauggaaucagugaaaaacggaacguaugacuaccccaaguauagugaggaguccaaauugaaucgggaaaagaucgauggugucaagcucgagagcaugggcguguaccagauccuggcuauuuauucuaccgucgccucaaguuuagugcugcuaguuagccucggggcuaucuccuucuggaugugcucuaacggaucgcugcagugucguauuugcauauga

SEQ ID NO: 135860 - RNA, 1698 nt, Artificial Sequence; identical to SEQ ID NO: 133564
  derived and/or modified CDS sequence (opt3) from hemagglutinin__InfluenzaA__AET84405

SEQ ID NO: 135861 - RNA, 1698 nt, Artificial Sequence
  derived and/or modified CDS sequence (opt3) from hemagglutinin__InfluenzaA__AET84416
augaaggugaaacugcucguccuucugugcaccuucacagccacuuacgcugacacgaucuguauuggcuaucacgcaaacaauagcaccgauacaguugacacuguguuggagaagaacguaaccgugacacauuccgucaauuuacuggaaaacucucacaaugggaaacuaugccuccugaagggaauagcgccccuucagcuggguaacuguucaguggccggcuggaucuuggggaauccugagugcgaacuccugauuaguaaagagagcugguccuacaucguugaaaagccaaacccggagaauggaaccuguuaucccggccauuuugcugauuacgaggaacugagagagcaacucucuucggugagcucauucgaaagguuugagauuuucccuaaggagaguuccuggccaaaccacacugucacaggugugucugccagcugcucccauaauggggaacggucauuuuaucgcaacuuacuguggcuuaccggaaagaauggcuuguaccccacgcugaguaagagcuaugcaaacaauaaagagaaggaaguucuaguacucuggggcgugcaccacccuccagacaucggggaucagaaaacucuguaccauaccgagaacgccuacgucucugugguguccucacacuauagccgaaaguucacacccgaaauagcuaagcguccuaaagucagagaccaggagggaaggaucaacuacuauuggacucuucuggagccaggugauaccauuaucuuugaagcaaauggcaacuugauugccccgcgguacgcuuucgcccucagucgcggguuuggaucuggcaucauaaauuccaacgcgcccauggacaagugugaugcaaaaugccagacaccucaaggugccauuaauagcucgcugccauuccagaacguucaucccgugaccaucggggaguguccuaaguauguaagaucugcuaaauuaaggauggugacgggacugcggaauauuccauccauccagucacgcggccucuuuggcgccaucgcaggguucauugaaggagguuggacuggcauggucgacgggugguacggauaucaccaccagaacgagcaaggcagugguuacgcugccgaucagaaaagcacacagaaugcgauaaacgggaucaccaauaaagugaacuccguuauugaaaagaugaauacucaguuuacagccgugggcaaggaguucaacaaacuugagcgaagaauggaaaaucugaacaagaaagucgacgauggauucaucgacauauggaccuacaacgcagaguugcuagugcugcucgaaaaugagaggacgcuggacuuucaugauucuaacguaaagaaucuuuaugaaaaaguuaagagccaacugaagaacaaugcuaaagagauuggcaacgggugcuucgaguuuuaccacaaguguaaugacgaaugcauggagucagugaaaaacggaaccuaugauuaccccaaguauagugaagaguccaaauugaaucgggagaagaucgacggugucaagcucgaaagcaugggcguguaccagauccuggccauuuauucuacagucgcuucaaguuuagugcugcuaguuagccucggggccaucuccuucuggaugugcucuaacggaucgcugcagugucguauuugcauauga

SEQ ID NO: 135862 - RNA, 1698 nt, Artificial Sequence
  derived and/or modified CDS sequence (opt3) from hemagglutinin__InfluenzaA__AET84427
augaaggugaaacugcucguccuucugugcaccuucacagccacuuacgcugacacgaucuguauuggcuaucacgcaaacaauagcaccgauacaguugacacuguguuggagaagaacguaaccgugacacauuccgucaauuuacuggaaaacucucacaaugggaaacuaugccuccugaagggaauagcgccccuucagcuggguaacuguucaguggccggcuggaucuuggggaauccugagugcgaacuccugauuaguaaagagagcugguccuacaucguugaaaagccaaacccggagaauggaaccuguuaucccggccauuuugcugauuacgaggaacugagagagcaacucucuucggugagcucauucgaaagguuugagauuuucccuaaggagaguuccuggccaaaccacacugucacaggugugucugccagcugcucccauaauggggaaucaaguuuuuaucggaacuuacuguggcuuaccggcaaaaauggauuguaccccaaccugagcaagucuuaugcaaauaacaaagagaaggaagugcuaguucucuggggcgugcaccacccuccaaacaucgggaaucagaaaacgcuguaccauacugagaacgccuacgucuccguggugucaagccacuauagucgcaaguucacccccgaaauagcuaagcgaccuaaaguccgugaccaggagggaagaaucaauuacuauuggacacuucuggagccaggugauacuauuaucuuugaagcaaacggcaauuugauugccccgagguacgcuuucgcccucucucggggguuuggauccggcaucauaaacagcaaugcgcccauggacaagugugaugcaaaaugccagaccccucaaggugccauuaacucgucucugccauuccagaauguucaucccgugacaaucggggaguguccuaaguauguacgcuccgcuaaauuaagaauggugaccggacugaggaacauuccaucaauccagagucggggccucuuuggcgccaucgcaggguucauugaaggagguuggacgggcauggucgacgggugguacggauaucaccaccagaaugagcaaggcagcgguuacgcugccgaucagaaguccacucagaacgcgauaaaugggaucacaaacaaaguaaauucuguuauugaaaagaugaacacccaguuuacugccgugggcaaggaguucaacaaacuugagcgccgaauggaaaaucugaacaagaaagucgacgauggauucaucgacauauggacauacaaugcagaguugcuagugcugcucgaaaacgagagaacccuggauuuucaugacagcaauguaaagaaccuuuaugaaaaaguuaagucacaacugaagaauaacgcuaaagagauuggcaaugggugcuucgaguuuuaccacaaguguaacgacgaaugcauggagagugugaaaaauggaacguaugauuaccccaaguauuccgaagagagcaaauugaacagggagaagaucgacggugucaagcucgaaucuaugggcguguaccagauccuggccauuuauucaaccgucgcuaguagcuuagugcugcuaguuucccucggggccaucucuuucuggaugugcucgaauggaagccugcagugucggauuugcauauga

SEQ ID NO: 135863 - RNA, 1698 nt, Artificial Sequence
  derived and/or modified CDS sequence (opt3) from hemagglutinin__InfluenzaA__AET84438
augaaggugaaacugcucguccuucugugcaccuucacagccacuuacgcugacacgaucuguauuggcuaucacgcaaacaauagcaccgauacaguugacacuguguuggagaagaacguaaccgugacacauuccgucaauuuacuggaaaacucucacaaugggaaacuaugccuccugaagggaauagcgccccuucagcuggguaacuguucaguggccggcuggaucuuggggaauccugagugcgaacuccugauuaguaaagagagcugguccuacaucguugaaaagccaaacccggagaauggaaccuguuaucccggccauuuugcugauuacgaggaacugagagagcaacucucuucggugagcucauucgaaagguuugagauuuucccuaaggagaguuccuggccaaaccacacugucacaggugugucugccagcugcucccauaauggggaaucaaguuuuuaucggaacuuacuguggcuuaccggcaaaaauggauuguaccccaaccugagcaagucuuaugcaaauaacaaagagaaggaaguucuaguacucuggggcgugcaccacccuccaaacaucgggguccagaaaacgcuguacaauacugagaacgccuacguguccguggucucaagccauuauagucgcaaguucacccccgaaauagcuaagcgaccuaaaguucgugaccaggagggaagaaucaauuacuauuggacacuucuggagccaggugauacuauuauguuugaagcaaacggcaauuugaucgccccgagguacgcuuucgcccucucucggggguuuggauccggcauuaucaacagcaaugcgcccauggacaagugugaugcaaaaugccagaccccucaaggugccauaaacucgucucugccauuccagaaugugcaccccguaacaauuggggaguguccuaaguaugugcgcuccgcuaaauuaagaauggucaccggacugaggaacaucccaucaauucagagucggggccucuuuggcgccaucgcaggguucaucgaaggagguuggacgggcaugguggacgggugguacggauaucaucaccagaaugagcaaggcagcgguuacgcugccgaucagaaguccacucagaacgcgauuaaugggauaacaaacaaaguuaauucugugaucgaaaagaugaacacccaguuuacugccgucggcaaggaguucaacaaacuugagcgccgaauggaaaaucugaacaagaaaguggacgauggauucauugacaucuggacauacaaugcagaguugcuaguacugcucgaaaacgagagaacccuggauuuucacgacagcaauguuaagaaccuuuaugaaaaagugaagucacaacugaagaauaacgcuaaagagauaggcaaugggugcuucgaguuuuaccauaaguguaacgacgaaugcauggagagugucaaaaauggaacguaugauuaccccaaguauuccgaagagagcaaauugaacagggagaagauugacggugugaagcucgaaucuaugggcgucuaccagauccuggccaucuauucaaccguggcuaguagcuuaguucugcuagugucccucggggccauuucuuucuggaugugcucgaauggaagccugcagugucggaucugcauuuga

SEQ ID NO: 135864 - RNA, 1698 nt, Artificial Sequence
  derived and/or modified CDS sequence (opt3) from hemagglutinin__InfluenzaA__AET84449
augaaggugaaacugcucguccuucugugcaccuucacagccacuuacgcugacacgaucuguauuggcuaucacgcaaacaauagcaccgauacaguugacacuguguuggagaagaacguaaccgugacacauuccgucaauuuacuggaagauucucacaacgggaaacuaugccuccugaagggaauagcgccccuucagcuggguaauuguucaguggccggcuggaucuuggggaacccugagugcgaacuccugauuaguagagagagcugguccuacaucguugaaaaaccaaauccggagaacggaaccuguuaucccggccauuuugcugacuacgaggaacugagggagcaacucucuucggugagcucauucgaacgguuugagauuuucccuaaggagaguuccuggccaaaucacacuacaaccggugucucugccagcugcucccauaacggggaaucaaguuuuuauaagaauuuacuguggcuuacgggaaagaacggcuuguaccccaaucugagcaagucuuaugcaaacaauaaagagaaggaagugcuaguacucuggggcguucaccacccuccaaacaucggggaucagcgcgcccuguaccauacugagaacgcuuacguguccgucgugucaagccacuauagucgaaaauucacccccgaaauagcaaagcguccuaaggugagagaccaggagggaaggaucaauuacuauuggacacuucuggagccaggugauacuauuaucuuugaagccaacggcaauuugauugcuccgcgguacgccuucgcgcucucucgcggguuuggauccggcaucauaaacagcaaugcacccauggacgguugugaugccaaaugccagaccccucaaggggcuauuaacucgucucugccauuccagaauguccaucccguuacaaucggagaguguccuaaguaugugagauccgccaaauuaaggaugguaaccggccugcggaacauuccaucaauccagagucgcggccucuuuggggcaaucgcuggauucauugaagguggcuggacggggaugguggacggaugguacggcuaucaccaccagaaugagcaagguagcggguacgccgcggaucagaaguccacucagaacgccauaaauggcaucacaaacaaagucaauucugugauugaaaagaugaacacccaguuuacugcaguuggaaaagaguucaauaaacuugagcgaagaauggaaaaccugaacaagaaaguggacgauggcuucaucgacauauggacauacaaugcugaguugcuaguccugcucgaaaacgagaggacccuggacuuucaugauagcaaugugaagaaccuuuaugaaaaaguaaagucacaacugaaaaauaacgccaaggagauugggaauggaugcuucgaguuuuaccacaaguguaacgacgaaugcauggagaguguuaaaaaugguacguaugauuaccccaaguauuccgaagagagcaaauugaaccgggagaagaucgacggcgugaaacucgaaucuaugggggucuaccagauccuggcuauuuauucaaccguggccaguagcuuaguccugcuagugucccucggagcaaucucuuucuggaugugcucgaauggcagccugcagugucguauuugcauauga

SEQ ID NO: 135865 - RNA, 1701 nt, Artificial Sequence
  derived and/or modified CDS sequence (opt3) from hemagglutinin__InfluenzaA__AET98600
augaagaccaucauugcccugagcuacauacucugccuuguguucgcucagaaacugcccggcaacgacaauuccacagcaacuuuguguuuagggcaccaugccgucccuaacggaacgaucguuaagaccauuacaaaugaucaaaucgaggugacuaacgcgaccgaacugguacagucuucaaguacaggugagauuugcgacagcccacaccagauccuagauggcgaaaauuguacccucauagacgcucugcuuggggauccgcagugcgacggauuucaaaacaaaaagugggaucuguucguggagagauccaaagccuauucuaauuguuaccccuaugacgucccugauuacgcaucguugaggucacucguggccagcaguggcacucuggaauuuaacaaugaguccuucaacuggacagguguuacccagaaugggacgucuagcgcuugcauccggcgcuccaacaauucauuuuucagucgacugaacuggcucacucauuuaaauuuuaaguauccagcacugaacgugaccguccccaacaaugagcaguucgacaaacuuuacauuuggggagugcaccauccuggcacagauaaggaccagaucuuuuuguaugcccaagcuagcggccguauuacuguaucuaccaagagaucccagcaggccguuaucccaaacauagggucaaggccccgggugcgcaauauuccuagcagaaucaguauuuacuggacaaucgucaaaccaggagauauccugcuaauuaacucuaccgguaaucucauagcgccgaggggcuacuucaagauccgguccgggaaaagcucgauuaugcgcucugacgcacccaucggaaaguguaacuccgaaugcauaacgccuaauggcucaauuccaaacgacaagcccuuucagaaugugaaccgaaucacuuauggugccuguccuagauacgugaaacaaaguacacugaaacuugcuaccgggaugaggaaugucccagagaagcagacucggggaaucuucggcgccauugcaggcuuuaucgaaaacgggugggagggaaugguugaugguugguauggcuuccgucaccagaauagcgaggggcgcggacaagcugccgaccugaaguccacacaggcggccauugaucagauaaacggcaaauugaauagacucaucgguaagaccaacgaaaaauuccaccagauugagaaggaauuuucugagguggaagggaggauccaagaccuggagaaguacguagaggauacgaaaaucgacuuauggagcuauaacgcagaacugcucguggcucuugagaaucagcauaccauugaucugacagacucagaaaugaacaaguuguucgagaaaacuaagaaacagcuacgggaaaaugccgaggauaugggcaacggaugcuuuaccauauaccacaagugugacaaugcuugcaucggcaguauucgaaacgggacauaugaucauaaugucuaccgcgacgaggcccugaacaauagauuccagaucaagggaguggaacucaaauccgguuacaaggacuggauucuguggaucagcuuugcaauaucuugcuuccuucuguguguugccuugcucggcuuuaucaugugggcuugccaaaaagggaacauuagguguaauaucugcauuuga

SEQ ID NO: 135866 - RNA, 1701 nt, Artificial Sequence
  derived and/or modified CDS sequence (opt3) from hemagglutinin__InfluenzaA__AEV76874
augaaggccauccuggugguccuccuuuacaccuucgcuacagcaaacgccgacacucugugcauuggcuaucacgcgaauaacagcacggauaccguugacacaguguuggagaaaaauguaacugugacccauuccgucaacuuacuggaagauaagcacaaugggaaacuauguaagcucagaggaguggcuccccugcaucuugguaaaugcaacauagccggcuggauccuggggaauccugagugugaaucuuuuucaacagcaaguagcugguccuacauuguugagaccucuucgucagacaacggaacuugcuauccaggcgauuucaucgacuacgaagaguugagggagcagcucagcaguguguccucuuuugaacgguucgagauuuuuccgaagacaagcuccuggcccaaucacgauucaaacaagggugucaccgccgcuuguccucaugcaggggccaaaggauucuauaagaaucugaucuggcuggugaaaaagggcaacaguuacccaaaacucagcaagucuuauauaaaugacaagggcaaagaaguauuaguucugugggggauccaccaccccuccacgacugcugaucaacagucacuuuaccagaacgccgacaccuacguguuugucggaacaagccgcuauaguaagaaauucaauccugagauugagauccgaccaaaggugcgugaucaggaagguagaaugaacuacuauuggacuuugguggagcccggcgacaaaauuaccuuugaagcgacagggaaccuggucguuccuagguacgcauucgccauggagcggaaugcuggaucuggcaucauaauuuccgauaccccagugcaugacugcaacacgacuugucaaacaccgaagggugccaucaauaccagccuacccuuucagaacauucacccuaucacuaucgggaaaugcccaaaguauguaaagucgacaaaacuccgccuggcaaccggacuuagaaaugugcccucuauucaguccaggggccuguucggcgcuauagccggguuuaucgaaggagguuggacgggcauggucgacgggugguacggauaucaucaccagaacgagcaaggcucagguuacgcggccgauuugaagaguacccagaaugcaauugacaaaaucacaaacaaggugaauagcguuauagagaaaaugaacacucaguucaccgcuguggggaaggaguucaaucaccucgaaaagcggauugaaaaccugaauaaaaaggucgaugacggcuuuuuagauaucuggacauacaacgccgagcugcucgugcuucuggaaaaugagcgcacuuuggacuaucaugauuccaacguuaaaaaccuauacgagaagguacgaaaucagcugaaaaacaaugcuaaggaaaucggaaacggcuguuucgaguuuuaucacaagugcgacaauaccuguauggaaucugugaaaaacgggacauacgauuauccuaaguacagcgaggaagccaaacucaauagagaggagauugacggagucaagcuggaaucaaccaggaucuaucaaauucuugcaauauacaguacuguggccuccagccuggucuuggugguuucucucggugcuaucucauucuggaugugcaguaacggcagccugcagugccggauuuguaucuga

SEQ ID NO: 135867 - RNA, 1701 nt, Artificial Sequence; identical to SEQ ID NO: 130717
  derived and/or modified CDS sequence (opt3) from hemagglutinin__InfluenzaA__AEW10574

SEQ ID NO: 135868 - RNA, 1701 nt, Artificial Sequence; identical to SEQ ID NO: 130717
  derived and/or modified CDS sequence (opt3) from hemagglutinin__InfluenzaA__AEW10584

SEQ ID NO: 135869 - RNA, 1701 nt, Artificial Sequence; identical to SEQ ID NO: 131070
  derived and/or modified CDS sequence (opt3) from hemagglutinin__InfluenzaA__AEW10594

SEQ ID NO: 135870 - RNA, 1701 nt, Artificial Sequence; identical to SEQ ID NO: 131070
  derived and/or modified CDS sequence (opt3) from hemagglutinin__InfluenzaA__AEW10604

SEQ ID NO: 135871 - RNA, 1701 nt, Artificial Sequence; identical to SEQ ID NO: 131070
  derived and/or modified CDS sequence (opt3) from hemagglutinin__InfluenzaA__AEW10614

SEQ ID NO: 135872 - RNA, 1701 nt, Artificial Sequence; identical to SEQ ID NO: 131070
  derived and/or modified CDS sequence (opt3) from hemagglutinin__InfluenzaA__AEW10624

SEQ ID NO: 135873 - RNA, 1701 nt, Artificial Sequence; identical to SEQ ID NO: 130717
  derived and/or modified CDS sequence (opt3) from hemagglutinin__InfluenzaA__AEW10634

SEQ ID NO: 135874 - RNA, 1701 nt, Artificial Sequence; identical to SEQ ID NO: 130704
  derived and/or modified CDS sequence (opt3) from hemagglutinin__InfluenzaA__AEW10644

SEQ ID NO: 135875 - RNA, 1701 nt, Artificial Sequence
  derived and/or modified CDS sequence (opt3) from hemagglutinin__InfluenzaA__AEW10654
augaaggccauccuggugguccuccuuuacaccuucgcuacagcaaacgccgacacucugugcauuggcuaucacgcgaauaacagcacggauaccguugacacaguguuggagaagaauguaacugugacccauuccgucaacuuacuggaagauaagcacaaugggaaacuauguaagcucagaggaguggcuccccugcaucuugguaaaugcaacauagccggcuggauccuggggaauccugagugugaaucuuugucaacagcaaguagcugguccuacauuguugagaccucuucgucagacaacggaacuugcuauccaggcgauuuuaucgacuacgaggagcucagggagcagcugagcaguguguccucuuucgaacgguuugagauuuucccgaagacaagcuccuggcccaaucacgauucaaacaagggugucaccgccgcuuguccucaugcaggggccaaaaguuuuuauaagaaucugaucuggcucgugaaaaagggaaacagcuacccaaaauuaaauaagucuuauauaaacgacaagggcaaagaaguacugguucuuuggggcauccaccaccccuccacgucagcugaucaacagagcuuguaccagaaugccgacgcguacguguucgucgggaguucucgcuauuccaagaaauuuaagccugagauugcaauccgaccaaaagugcgugaucaggagggaagaaugaacuacuauuggacucugguggaacccggugacaagauuaccuucgaggccacaggcaaccuagucguuccuagguacgcuuuugccauggaacggaaugcagggagcggaaucauaauuucggauacuccagugcaugacugcaacaccacaugucaaaccccgaaaggcgcuaucaauacgucucuccccuuccagaacauucacccuaucacuaucgguaagugcccaaaguauguaaaauccacaaagcugcgccuugccaccgggcugagaaaugugcccucaauucagaguaggggauuguuuggcgcgauagccggcuucaucgaagggggauggacugguauggucgacggcugguacggguaucaucaccagaacgaacaaggaagcggcuacgcagcugaucucaaauccacacagaaugccauugacgagaucaccaacaagguaaauucuguuauagagaaaaugaacacgcaguuuaccgcuguggguaaggaguucaaucaccuggaaaagcggauugaaaacuuaaauaaaaaggucgaugacggguuccuggauaucuggacauacaacgccgagcuccuugugcuguuggaaaaugagcgcacucuagacuaucaugauagcaacgugaaaaaccuguacgagaagguucgaucacagcucaaaaauaacgcaaaggaaaucggcaauggauguuuugaguucuaucacaagugcgacaacaccuguauggaaagugugaaaaauggcacauacgauuauccuaaguacuccgaggaagccaaacugaacagagaggagauugacggggucaaacuugaaagcacuaggaucuaucaaauucuggcuauauacucuaccguggcgucaaguuugguccucgugguuagccugggagcaaucuccuuuuggaugugcucuaaugguucguuacagugccggauuuguaucuga

SEQ ID NO: 135876 - RNA, 1701 nt, Artificial Sequence; identical to SEQ ID NO: 130704
  derived and/or modified CDS sequence (opt3) from hemagglutinin__InfluenzaA__AEW10664

SEQ ID NO: 135877 - RNA, 1701 nt, Artificial Sequence
  derived and/or modified CDS sequence (opt3) from hemagglutinin__InfluenzaA__AEW10674
augaaggccauccuggugguccuccuuuacaccuucgcuacagcaaacgccgacacucugugcauuggcuaucacgcgaauaacagcacggauaccguugacacaguguuggagaaaaauguaacugugacccauuccgucaacuuacuggaagauaagcacaaugggaaacuauguaagcucagaggaguggcuccccugcaucuugguaaaugcaacauagccggcuggauccuggggaauccugagugugaaucuuugucaacagcaaguagcugguccuacauuguugagaccucuucgucagacaacggaacuugcuauccaggcgauuuuaucgacuacgaagaacucagggagcagcugagcaguguguccucuuucgaacgguuugagauuuucccgaagacaagcuccuggcccaaucacgauucaaacaagggugucaccgccgcuuguccucaugcagaagccaaaaguuuuuauaagaaucugaucuggcucgugaaaaaggggaacagcuacccaaaauuaucuaaguccuauauaaaugacaagggaaaagagguacugguucuuuggggcauccaccaccccucaacgagcgcugaucaacagaguuuguaccagaacgccgacgcguacguguucgucggcacuucucgcuauuccaagaaauuuaagccugagauugcaauccgaccaaaagugcgugaucaggaagggagaaugaauuacuauuggacccugguggagcccggagacaagauuacauucgaagccacugguaaccuagucguuccuagguacgcuuuugccauggagcggaacgcaggcagcgggaucauaauuucggauaccccagugcaugacugcaauacaaccugucaaacgccgaaaggagcuaucaacacuucucuccccuuccagaauauucacccuaucacaaucggcaagugcccaaaguauguaaaauccaccaagcugcgccuugccacuggucugagaaacgugcccucaauucagaguaggggguuguuuggagcgauagccggcuucaucgaaggcggguggacaggaauggucgacgguugguacggcuaucaucaccagaaugagcaagggagcggauacgcagcugaucucaaauccacccagaacgccauugacgagaucacgaauaaggugaacucuguuauagaaaagaugaauacccaguuuacagcugugggcaaggaguucaaccaccuggaaaagcggauugagaauuuaaacaaaaaggucgaugacgguuuccuggauaucuggacuuacaaugccgaacuccuugugcuguuggagaacgagcgcacccuagacuaucaugauagcaauguuaaaaaccuguacgaaaagguacgaucacagcucaaaaacaaugcaaaggagaucgggaacggcuguuuugaguucuaucacaagugcgacaauacauguauggagagugugaaaaacggaacuuacgauuauccuaaguacuccgaagaggccaaacugaauagagaggaaauugacggcgucaaacuugagagcaccaggaucuaucaaauucuggcuauauacucuacaguggcgucaaguuugguccucgugguuagccugggggcaaucuccuuuuggaugugcucuaacggaucguuacagugccggauuuguaucuga

SEQ ID NO: 135878 - RNA, 1701 nt, Artificial Sequence; identical to SEQ ID NO: 130717
  derived and/or modified CDS sequence (opt3) from hemagglutinin__InfluenzaA__AEW10684

SEQ ID NO: 135879 - RNA, 1701 nt, Artificial Sequence; identical to SEQ ID NO: 130704
  derived and/or modified CDS sequence (opt3) from hemagglutinin__InfluenzaA__AEW10694

SEQ ID NO: 135880 - RNA, 1701 nt, Artificial Sequence; identical to SEQ ID NO: 130704
  derived and/or modified CDS sequence (opt3) from hemagglutinin__InfluenzaA__AEW10704

SEQ ID NO: 135881 - RNA, 1701 nt, Artificial Sequence; identical to SEQ ID NO: 135875
  derived and/or modified CDS sequence (opt3) from hemagglutinin__InfluenzaA__AEW10724

SEQ ID NO: 135882 - RNA, 1701 nt, Artificial Sequence; identical to SEQ ID NO: 130717
  derived and/or modified CDS sequence (opt3) from hemagglutinin__InfluenzaA__AEW10734

SEQ ID NO: 135883 - RNA, 1701 nt, Artificial Sequence
  derived and/or modified CDS sequence (opt3) from hemagglutinin__InfluenzaA__AEW10744
augaaggccauccuggugguccuccuuuacaccuucgcuacagcaaacgccgacacucugugcauuggcuaucacgcgaauaacagcacggauaccguugacacaguguuggagaaaaauguaacugugacccauuccgucaacauauuagaagauaagcacaaugggaaacuguguaagcuaagaggaguggcuccccuccaucuggguaaaugcaacaucgccggcuggauucuugggaauccugagugugaaucucugucaacagcaaguagcugguccuacaucguugagaccucuucgucagacaacggaacuugcuauccaggcgauuuuauugacuacgaagaguugagggagcagcucagcaguguguccucuuucgaacgguuugagaucuucccgaagacaagcuccuggcccaaucacgauucaaacaagggugucaccgccgcuuguccucaugcaggggccaaaaguuuuuauaagaaucugauauggcuggugaaaaagggaaacagcuacccaaaacucucuaaguccuauaucaaugacaagggcaaagaaguauuaguucuguggggcauucaccaccccucaacgagcgcugaucaacagagucuuuaccagaacgccgacgcguacguguucgucgggucuucccgcuauagcaagaaauuuaagccugagaucgcaauucgaccaaaagugcgugaucaggagggaagaaugaauuacuauuggacuuugguggaacccggugacaagaucaccuucgaggccacaggcaaccuggucguuccuagguacgcuuuugccauggaacggaacgcagggucgggaauaauuaucucugauacuccagugcaugacugcaauaccacaugucaaaccccgaaaggcgcuauuaacacgucccuacccuuccagaauauccacccuaucacuauugguaagugcccaaaguauguaaaaucaacaaagcuccgccuggccaccgggcuuagaaacgugcccaguauacugagcaggggauuguuuggcgcgaucgccggcuucauugaagggggauggacugguauggucgacggcugguacggguaucaucaccagaaugaacagggauccggcuacgcagcugaucucaaaucuacacaaaacgccaucgacgagauaaccaauaaggugaacagcguuauugagaaaaugaauacgcaguuuaccgcuguggguaaggaguucaaccaccuggagaagcggaucgaaaauuuaaacaaaaaggucgaugacggguuccuggauaucuggacauacaaugccgagcuccuugugcuguuggaaaacgagcgcacucuagacuaucaugauucaaauguaaagaaccuguacgagaagguucgaagucagcucaaaaacaaugcaaaggaaauuggcaacggauguuuugaguucuaucacaagugcgacaauaccuguauggaauccgugaaaaacggcacauacgauuauccuaaguacagcgaggaagccaaacugaauagagaggagaucgacggggucaaacuugaaucuacuaggauuuaucagauacuggcuaucuacucaaccguggcgaguagcuugguccucgugguuucccugggagcaauuucuuuuuggaugugcucgaacgguagcuuacaaugccggaucuguaucuga

SEQ ID NO: 135884 - RNA, 1701 nt, Artificial Sequence; identical to SEQ ID NO: 135883
  derived and/or modified CDS sequence (opt3) from hemagglutinin__InfluenzaA__AEW10754

SEQ ID NO: 135885 - RNA, 1701 nt, Artificial Sequence
  derived and/or modified CDS sequence (opt3) from hemagglutinin__InfluenzaA__AEW10764
augaaggccauccuggugguccuccuuuacaccuucgcuacagcaaacgccgacacucugugcauuggcuaucacgcgaauaacagcacggauaccguugacacaguguuggagaaaaauguaacugugacccauuccgucaacauauuagaagauaagcacaaugggaaacuguguaagcuaagaggaguggcuccccuccaucuggguaaaugcaacaucgccggcuggauucuugggaauccugagugugaaucucugucaacagcaaguagcugguccuacaucguugagaccucuucgucagacaacggaacuugcuauccaggcgauuuuauugacuacgaagaguugagggagcagcucagcaguguguccucuuucgaacgguuugagaucuucccgaagacaagcuccuggcccaaucacgauucaaacaagggugucaccgccgcuuguccucaugcaggggccaaaaguuuuuauaagaaucugauauggcuggugaaaaagggaaacagcuacccaaaacucucuaaguccuauaucaaugacaagggcaaagaaguauuaguucuguggggcauucaccaccccucaacgagcgcugaucaacagagucuuuaccagaacgccaaugcguacguguucgucgggucuucccgcuauagcaagaaauuuaagccugagaucgcaauucgaccaaaagugcgugaccaggagggaagaaugaacuacuauuggacuuugguggaacccggugauaagaucaccuucgaggccacaggcaaccuggucguuccuagguacgcuuuugccauggaacggaaugcagggucgggaauaauuaucucugacacuccagugcaugauugcaacaccacaugucaaaccccgaaaggcgcuauuaauacgucccuacccuuccagaacauccacccuaucacuauugguaagugcccaaaguauguaaaaucaacaaagcuccgccuggccaccgggcuuagaaaugugcccaguauacagagcaggggacuguuuggcgcgaucgccggcuucauugaagggggauggacugguauggucgacggcugguacggguaucaucaccagaacgaacaaggauccggcuacgcagcugacuugaaaucuacacagaaugccaucgaugagauaaccaacaaggugaauagcguuauugagaaaaugaacacgcaguuuaccgcuguggguaaggaguucaaucaccucgagaagcggaucgaaaaccugaauaaaaaggucgacgauggguucuuagacaucuggacauacaacgccgagcugcucgugcuucuggaaaaugagcgcacuuuggauuaucaugacucaaacguuaaaaaccuauacgagaagguacgaagucagcugaaaaauaacgcaaaggaaauuggcaauggauguuuugaguucuaucacaagugcgauaacaccuguauggaauccgugaaaaauggcacauacgacuauccuaaguacagcgaggaagccaaacucaacagagaggagaucgauggggucaagcuggaaucuacuaggauuuaucaaauacuugcuaucuacucaaccguggcgaguagccuggucuuggugguuucccucggagcaauuucuuuuuggaugugcucgaaugguagccugcagugccggaucuguaucuga

SEQ ID NO: 135886 - RNA, 1701 nt, Artificial Sequence; identical to SEQ ID NO: 130961
  derived and/or modified CDS sequence (opt3) from hemagglutinin__InfluenzaA__AEW10774

SEQ ID NO: 135887 - RNA, 1701 nt, Artificial Sequence; identical to SEQ ID NO: 130704
  derived and/or modified CDS sequence (opt3) from hemagglutinin__InfluenzaA__AEW10784

SEQ ID NO: 135888 - RNA, 1701 nt, Artificial Sequence; identical to SEQ ID NO: 130704
  derived and/or modified CDS sequence (opt3) from hemagglutinin__InfluenzaA__AEW10794

SEQ ID NO: 135889 - RNA, 1701 nt, Artificial Sequence; identical to SEQ ID NO: 130897
  derived and/or modified CDS sequence (opt3) from hemagglutinin__InfluenzaA__AEW10804

SEQ ID NO: 135890 - RNA, 1701 nt, Artificial Sequence; identical to SEQ ID NO: 130715
  derived and/or modified CDS sequence (opt3) from hemagglutinin__InfluenzaA__AEW10814

SEQ ID NO: 135891 - RNA, 1701 nt, Artificial Sequence; identical to SEQ ID NO: 130808
  derived and/or modified CDS sequence (opt3) from hemagglutinin__InfluenzaA__AEW10824

SEQ ID NO: 135892 - RNA, 1701 nt, Artificial Sequence; identical to SEQ ID NO: 130704
  derived and/or modified CDS sequence (opt3) from hemagglutinin__InfluenzaA__AEW10834

SEQ ID NO: 135893 - RNA, 1701 nt, Artificial Sequence; identical to SEQ ID NO: 130897
  derived and/or modified CDS sequence (opt3) from hemagglutinin__InfluenzaA__AEW10844

SEQ ID NO: 135894 - RNA, 1701 nt, Artificial Sequence
  derived and/or modified CDS sequence (opt3) from hemagglutinin__InfluenzaA__AEW10854
augaaggccauccuggugguccuccuuuacaccuucgcuacagcaaacgccgacacucugugcauuggcuaucacgcgaauaacagcacggauaccguugacacaguguuggagaaaaauguaacugugacccauuccgucaacauauuagaagauaagcacaaugggaaacuguguaagcuaagaggaguggcuccccuccaucuggguaaaugcaacaucgccggcuggauucuugggaauccugagugugaaucucugucaacagcaaguagcugguccuacaucguugagaccucuucgucagacaacggaacuugcuauccaggcgauuuuauugacuacgaagaguugagggagcagcucagcaguguguccucuuucgaacgguuugagaucuucccgaagacaagcuccuggcccaaucacgauucaaacaagggugucaccgccgcuuguccucaugcaggggccaaaaguuuuuauaagaaucugauauggcuggugaaaaagggaaacagcuacccaaaacucucuaaguccuauaucaaugacaagggcaaagaaguauuaguucuguggggcauucaccaccccucaacgagcgcugaucaacagagucuuuaccagaacgccgacgcguacguguucgucgggucuucccgcuauagcaagaaauuuaagccugagaucacuauucgaccaaaagugcgugaucaggagggaagaaugaauuacuauuggaccuugguggaacccggugacaagaucacauucgaggcaacuggcaaccuggucguuccuagguacgccuuugcuauggaacggaacgccgggucgggaauaauuaucucugauaccccagugcaugacugcaauacaaccugucaaacgccgaaaggcgcaauuaacacuucccuacccuuccagaauauccacccuaucacaauugguaagugcccaaaguauguaaaaucaaccaagcuccgccuggcuacugggcuuagaaacgugcccaguauacagagcaggggacuguuuggcgccaucgcgggcuucauugaagggggauggacagguauggucgacggcugguacggguaucaucaccagaaugaacaaggauccggcuacgccgcagauuugaaaucuacccagaacgcuaucgacgagauaacgaauaaggugaacagcguuauugagaaaaugaauacccaguuuacagccguggguaaggaguucaaccaccucgagaagcggaucgaaaaucugaacaaaaaggucgaugacggguucuuagauaucuggacuuacaaugcugagcugcucgugcuucuggaaaacgagcgcaccuuggacuaucaugauucaaauguuaaaaaccuauacgagaagguacgaagucagcugaaaaacaaugccaaggaaauuggcaacggauguuuugaguucuaucacaagugcgacaauacauguauggaauccgugaaaaacggcacuuacgauuauccuaaguacagcgaggaagcaaaacucaauagagaggagaucgacggggucaagcuggaaucuaccaggauuuaucaaauacuugccaucuacucaacaguggcuaguagccuggucuuggugguuucccucggagcgauuucuuuuuggaugugcucgaacgguagccugcagugccggaucuguaucuga

SEQ ID NO: 135895 - RNA, 1701 nt, Artificial Sequence; identical to SEQ ID NO: 130897
  derived and/or modified CDS sequence (opt3) from hemagglutinin__InfluenzaA__AEW10864

SEQ ID NO: 135896 - RNA, 1701 nt, Artificial Sequence; identical to SEQ ID NO: 130897
  derived and/or modified CDS sequence (opt3) from hemagglutinin__InfluenzaA__AEW10874

SEQ ID NO: 135897 - RNA, 1701 nt, Artificial Sequence; identical to SEQ ID NO: 130897
  derived and/or modified CDS sequence (opt3) from hemagglutinin__InfluenzaA__AEW10884

SEQ ID NO: 135898 - RNA, 1701 nt, Artificial Sequence; identical to SEQ ID NO: 130704
  derived and/or modified CDS sequence (opt3) from hemagglutinin__InfluenzaA__AEW10894

SEQ ID NO: 135899 - RNA, 1701 nt, Artificial Sequence; identical to SEQ ID NO: 130897
  derived and/or modified CDS sequence (opt3) from hemagglutinin__InfluenzaA__AEW10904

SEQ ID NO: 135900 - RNA, 1701 nt, Artificial Sequence; identical to SEQ ID NO: 130897
  derived and/or modified CDS sequence (opt3) from hemagglutinin__InfluenzaA__AEW10914

SEQ ID NO: 135901 - RNA, 1701 nt, Artificial Sequence; identical to SEQ ID NO: 130704
  derived and/or modified CDS sequence (opt3) from hemagglutinin__InfluenzaA__AEW10924

SEQ ID NO: 135902 - RNA, 1701 nt, Artificial Sequence; identical to SEQ ID NO: 130704
  derived and/or modified CDS sequence (opt3) from hemagglutinin__InfluenzaA__AEW10934

SEQ ID NO: 135903 - RNA, 1701 nt, Artificial Sequence; identical to SEQ ID NO: 130897
  derived and/or modified CDS sequence (opt3) from hemagglutinin__InfluenzaA__AEW10944

SEQ ID NO: 135904 - RNA, 1701 nt, Artificial Sequence; identical to SEQ ID NO: 130717
  derived and/or modified CDS sequence (opt3) from hemagglutinin__InfluenzaA__AEW10954

SEQ ID NO: 135905 - RNA, 1701 nt, Artificial Sequence; identical to SEQ ID NO: 130717
  derived and/or modified CDS sequence (opt3) from hemagglutinin__InfluenzaA__AEW10964

SEQ ID NO: 135906 - RNA, 1701 nt, Artificial Sequence; identical to SEQ ID NO: 130897
  derived and/or modified CDS sequence (opt3) from hemagglutinin__InfluenzaA__AEW10974

SEQ ID NO: 135907 - RNA, 1701 nt, Artificial Sequence; identical to SEQ ID NO: 130717
  derived and/or modified CDS sequence (opt3) from hemagglutinin__InfluenzaA__AEW10984

SEQ ID NO: 135908 - RNA, 1701 nt, Artificial Sequence; identical to SEQ ID NO: 130717
  derived and/or modified CDS sequence (opt3) from hemagglutinin__InfluenzaA__AEW10994

SEQ ID NO: 135909 - RNA, 1701 nt, Artificial Sequence; identical to SEQ ID NO: 130717
  derived and/or modified CDS sequence (opt3) from hemagglutinin__InfluenzaA__AEW11004

SEQ ID NO: 135910 - RNA, 1701 nt, Artificial Sequence; identical to SEQ ID NO: 130717
  derived and/or modified CDS sequence (opt3) from hemagglutinin__InfluenzaA__AEW11014

SEQ ID NO: 135911 - RNA, 1701 nt, Artificial Sequence; identical to SEQ ID NO: 130717
  derived and/or modified CDS sequence (opt3) from hemagglutinin__InfluenzaA__AEW11024

SEQ ID NO: 135912 - RNA, 1701 nt, Artificial Sequence; identical to SEQ ID NO: 130717
  derived and/or modified CDS sequence (opt3) from hemagglutinin__InfluenzaA__AEW11034

SEQ ID NO: 135913 - RNA, 1701 nt, Artificial Sequence; identical to SEQ ID NO: 130897
  derived and/or modified CDS sequence (opt3) from hemagglutinin__InfluenzaA__AEW11044

SEQ ID NO: 135914 - RNA, 1701 nt, Artificial Sequence; identical to SEQ ID NO: 130717
  derived and/or modified CDS sequence (opt3) from hemagglutinin__InfluenzaA__AEW11054

SEQ ID NO: 135915 - RNA, 1701 nt, Artificial Sequence; identical to SEQ ID NO: 130704
  derived and/or modified CDS sequence (opt3) from hemagglutinin__InfluenzaA__AEW11064

SEQ ID NO: 135916 - RNA, 1701 nt, Artificial Sequence; identical to SEQ ID NO: 130704
  derived and/or modified CDS sequence (opt3) from hemagglutinin__InfluenzaA__AEW11074

SEQ ID NO: 135917 - RNA, 1701 nt, Artificial Sequence
  derived and/or modified CDS sequence (opt3) from hemagglutinin__InfluenzaA__AEW11084
augaaggccauccuggugguccuccuuuacaccuucgcuacagcaaacgccgacacucugugcauuggcuaucacgcgaauaacagcacggauaccguugacacaguguuggagaaaaauguaacugugacccauuccgucaacuuacuggaagauaagcacaaugggaaacuauguaagcucagaggaguggcuccccugcaucuugguaaaugcaacauagccggcuggauccuggggaauccugagugugaaucuuugucaacagcaaguagcugguccuacauuguugagaccucuucgucagacaacggaacuugcuauccaggcgauuuuaucgacuacgaggagcucagggagcagcugagcaguguguccucuuucgaacgguuugagauuuucccgaagacaagcuccuggcccaaucacgauucaaacaagggugucaccgccgcuugucugcaugcaggggccaaaaguuuuuauaagaaucucaucugguuagugaaaaagggaaacagcuacccuaaacugucuaaguccuauauaaaugacaagggcaaagaaguacuuguuuuguggggcauccaccacccaucaacgagcgcugaucaacagagucuguaccagaacgccgacgcguacguguucgucgggucuucccgcuauagcaagaaauuuaagcccgagauugcaauccgaccuaaagugcgugaucaggagggaagaaugaauuacuauuggacucuaguggaaccaggugacaagauuaccuucgaggccacaggcaaccucgucguucccagguacgcuuuugccauggaacggaacgcagggucgggaaucauaauuucugauacuccugugcaugacugcaauaccacaugucaaaccccaaaaggcgcuaucaacacgucccugccguuccagaauauucaccccaucacuaucgguaagugcccuaaguauguaaaaucaacaaaacuucgccuggccaccggguugagaaacgugccaaguauucagagcaggggacucuuuggcgcgauagccggcuucaucgaagggggauggacugguauggucgacggcugguacggguaucaucaccagaaugaacaaggauccggcuacgcagcugaucugaaaucuacacagaacgccauugacgagaucaccaauaaggugaacagcguuauagagaaaaugaauacgcaguuuaccgcuguggguaaggaguucaaccacuuagaaaagcggauugaaaaucugaacaaaaaggucgaugacggguuccucgauaucuggacauacaaugccgagcuucugguguugcuagaaaacgagcgcacucuggacuaucaugauucaaauguaaagaaccucuacgagaagguucgaagucagcugaaaaacaaugcaaaggaaaucggcaacggauguuuugaguucuaucacaagugcgacaauaccuguauggaauccgugaaaaacggcacauacgauuaucccaaguacagcgaggaagccaaacuuaauagagaggagauugacggggucaagcuggaaucuacuaggaucuaucaaauuuuggcuauauacucaaccguggcgaguagccucguccuggugguuuccuuaggagcaaucucuuuuuggaugugcucgaacgguagccugcagugccggauuuguaucuga

SEQ ID NO: 135918 - RNA, 1701 nt, Artificial Sequence; identical to SEQ ID NO: 130704
  derived and/or modified CDS sequence (opt3) from hemagglutinin__InfluenzaA__AEW11094

SEQ ID NO: 135919 - RNA, 1701 nt, Artificial Sequence; identical to SEQ ID NO: 130704
  derived and/or modified CDS sequence (opt3) from hemagglutinin__InfluenzaA__AEW11104

SEQ ID NO: 135920 - RNA, 1701 nt, Artificial Sequence; identical to SEQ ID NO: 130717
  derived and/or modified CDS sequence (opt3) from hemagglutinin__InfluenzaA__AEW11114

SEQ ID NO: 135921 - RNA, 1701 nt, Artificial Sequence
  derived and/or modified CDS sequence (opt3) from hemagglutinin__InfluenzaA__AEW11124
augaaggccauccuggugguccuccuuuacaccuucgcuacagcaaacgccgacacucugugcauuggcuaucacgcgaauaacagcacggauaccguugacacaguguuggagaaaaauguaacugugacccauuccgucaacuuacuggaagauaagcacaaugggaaacuauguaagcucagaggaguggcuccccugcaucuugguaaaugcaacauagccggcuggauccuggggaauccugagugugaaucuuugucaacagcaaguagcugguccuacauuguugagaccucuucgucagacaacggaacuugcuauccaggcgauuuuaucgacuacgaggagcucagggagcagcugagcaguguguccucuuucgaacgguuugagauuuucccgaagacaagcuccuggcccaaucacgauucaaacaagggugucaccgccgcuuguccucaugcaggggccaaaaguuuuuauaagaaucugaucuggcucgugaaaaagggaaacagcuacccaaaauuaucuaaguccuauauaaaugacaagggcaaagaaguacugguucuuuggggcauccaccaccccucaacgagcgcugaucaacagaguuuguaccagaacgccgacgcguacguguucgucgggucuucccgcuauagcaagaaauuuaagccugagauugcaauccgaccaaaagugcgugaucaggagggaagaaugaauuacuauuggacucugguggaacccggugacaagauuaccuucgaggccacaggcaaccuagucguuccuagguacgcuuuugccauggaacggaacgcagggucgggaaucauaauuucugauacuccagugcaugacugcaauaccacaugucaaaccccgaaaggcgcuaucaacacgucccuccccuuccagaauauucacccuaucacuaucgguaagugcccaaaguuuguaaaaucaacaaagcugcgccuugccaccgggcugagaaacgugcccaguauucagagcaggggauuguucggcgcgauagccggcuuuaucgaagggggauggacugguauggucgacggcugguauggguaccaucaccagaaugaacaaggauccggcuaugcagcugaucucaaaucuacacagaacgccauugacgagaucaccaauaaggugaacagcguuauagagaaaaugaauacgcaguucaccgcuguggguaaggaguucaaccaccuggaaaagcggauugaaaauuuaaacaaaaaggucgaugacggguuucuggauaucuggacauacaaugccgagcuccuugugcuguuggaaaacgagcgcacucuagacuaccaugauucaaauguaaagaaccuguaugagaagguucgaagucagcucaaaaacaaugcaaaggaaaucggcaacggauguuucgaguuuuaccacaagugcgacaauaccuguauggaauccgugaaaaacggcacauaugauuacccuaaguauagcgaggaagccaaacugaauagagaggagauugacggggucaaacuugaaucuacuaggaucuaccaaauucuggcuauauauucaaccguggcgaguagcuugguccucgugguuucccugggagcaaucucuuucuggaugugcucgaacgguagcuuacagugccggauuuguaucuga

SEQ ID NO: 135922 - RNA, 1701 nt, Artificial Sequence
  derived and/or modified CDS sequence (opt3) from hemagglutinin__InfluenzaA__AEW11134
augaaggccauccuggugguccuccuuuacaccuucgcuacagcaaacgccgacacucugugcauuggcuaucacgcgaauaacagcacggauaccguugacacaguguuggagaaaaauguaacugugacccauuccgucaacauauuagaagauaagcacaaugggaaacuguguaagcuaagaggaguggcuccccuccaucuggguaaaugcaacaucgccggcuggauucuugggaauccugagugugaaucucugucaacagcaaguagcugguccuacaucguugagaccucuucgucagacaacggaacuugcuauccaggcgauuuuauugacuacgaagaguugagggagcagcucagcaguguguccucuuucgaacgguuugagaucuucccgaagacaagcuccuggcccaaucacgauucaaacaagggugucaccgccgcuuguccucaugcaggggccaaaaguuuuuauaagaaucugauauggcuggugaaaaagggaaacagcuacccaaaacucucuaaguccuauaucaaugacaagggcaaagaaguauuaguucuguggggcauucaccaccccucaacgagcgcugaucaacagagucuuuaccagaacgccgacgcguacguguucgucgggucuucccgcuauagcaagaaauuuaagccugagaucgcaauucgaccaaaagugcgugaucaggagggaagaaugaauuacuauuggacuuugguggaacccggugacaagaucaccuucgaggccacaggcaaccuggucguuccuagguacgcuuuugccauggaacggaacgcagggucgggaauaauuaucucugauacuccagugcaugacugcaauaccacaugucaaaccccgaaaggcgcuauuaacacgucccuacccuuccagaauauccacccuaucacuauugguaagugcccaaaguauguaaaaucaacaaagcuccgccuggccaccgggcuuagaaacgugcccaguauacagagcaggggacuguuuggcgcgaucgccggcuucauugaagggggauggacugguauggucgacggcugguacggguaucaucaccagaaugaacaaggauccggcuacgcagcugauuugaaaucuacacagaacgccaucgacgagauaaccaauaaggugaacagcguuauugagaaaaugaauacgcaguuuaccgcuguggguaaggaguucaaccaccucgagaagcggaucgaaaaucugaacaaaaaggucgaugacggguucuuagauaucuggacauacaaugccgagcugcucgugcuucuggaaaacgagcgcacuuuggacuaucaugauucaaauguuaaaaaccuauacgagaagguacgaagucagcugaaaaacaaugcaaaggaaauuggcaacggauguuuugaguucuaucacaagugcgacaauaccuguauggaauccgugaaaaacggcacauacgauuauccuaaguacagcgaggaagccaaacucaauaaggaggagaucgacggggucaaacuggaaucuacuagaauuuaucaaauacuugcuaucuacucaaccguggcgaguagccuggucuuggugguuucccucggagcaauuucuuuuuggaugugcucgaacgguagccugcagugcaggaucuguaucuga

SEQ ID NO: 135923 - RNA, 1701 nt, Artificial Sequence; identical to SEQ ID NO: 130717
  derived and/or modified CDS sequence (opt3) from hemagglutinin__InfluenzaA__AEW11144

SEQ ID NO: 135924 - RNA, 1701 nt, Artificial Sequence; identical to SEQ ID NO: 130717
  derived and/or modified CDS sequence (opt3) from hemagglutinin__InfluenzaA__AEW11154

SEQ ID NO: 135925 - RNA, 1701 nt, Artificial Sequence; identical to SEQ ID NO: 135917
  derived and/or modified CDS sequence (opt3) from hemagglutinin__InfluenzaA__AEW11164

SEQ ID NO: 135926 - RNA, 1701 nt, Artificial Sequence; identical to SEQ ID NO: 135917
  derived and/or modified CDS sequence (opt3) from hemagglutinin__InfluenzaA__AEW11174

SEQ ID NO: 135927 - RNA, 1701 nt, Artificial Sequence; identical to SEQ ID NO: 130717
  derived and/or modified CDS sequence (opt3) from hemagglutinin__InfluenzaA__AEW11184

SEQ ID NO: 135928 - RNA, 1701 nt, Artificial Sequence; identical to SEQ ID NO: 130704
  derived and/or modified CDS sequence (opt3) from hemagglutinin__InfluenzaA__AEW11194

SEQ ID NO: 135929 - RNA, 1701 nt, Artificial Sequence; identical to SEQ ID NO: 130717
  derived and/or modified CDS sequence (opt3) from hemagglutinin__InfluenzaA__AEW11204

SEQ ID NO: 135930 - RNA, 1701 nt, Artificial Sequence; identical to SEQ ID NO: 130717
  derived and/or modified CDS sequence (opt3) from hemagglutinin__InfluenzaA__AEW11214

SEQ ID NO: 135931 - RNA, 1701 nt, Artificial Sequence; identical to SEQ ID NO: 130897
  derived and/or modified CDS sequence (opt3) from hemagglutinin__InfluenzaA__AEW11224

SEQ ID NO: 135932 - RNA, 1701 nt, Artificial Sequence; identical to SEQ ID NO: 130717
  derived and/or modified CDS sequence (opt3) from hemagglutinin__InfluenzaA__AEW11234

SEQ ID NO: 135933 - RNA, 1701 nt, Artificial Sequence; identical to SEQ ID NO: 130717
  derived and/or modified CDS sequence (opt3) from hemagglutinin__InfluenzaA__AEW11244

SEQ ID NO: 135934 - RNA, 1701 nt, Artificial Sequence
  derived and/or modified CDS sequence (opt3) from hemagglutinin__InfluenzaA__AEW11254
augaaggccauccuggugguccuccuuuacaccuucgcuacagcaaacgccgacacucugugcauuggcuaucacgcgaauaacagcacggauaccguugacacaguguuggagaaaaauguaacugugacccauuccgucaacuuacuggaagauaagcacaaugggaaacuauguaagcucagaggaguggcuccccugcaucuugguaaaugcaacauagccggcuggauccuggggaauccugagugugaaucuuugucaacagcaaguagcugguccuacauuguugagaccucuucgucagacaacggaacuugcuauccaggcgauuuuaucgacuacgaggagcucagggagcagcugagcaguguguccucuuucgaacgguuugagauuuucccgaagacaagcuccuggcccaaucacgauucaaacaagggugucaccgccgcuugucugcaugcaggggccaaaaguuuuuauaagaaucucaucugguuagugaaaaagggaaacagcuacccuaaacugucuaaguccuauauaaaugacaagggcaaagaaguacuuguuuuguggggcauccaccacccaucagcuagcgccgaucaacagagucuguaccagaacgcggacgcauacguguucgucgggucuucccgcuauagcaagaaagugaagcccgagauugccauccgaccuaaagugcgugaucaggagggaagaaugaauuacuauuggacgcuagucgaaccaggugacaagauuacuuuugaggcuaccggcaaccucguugugcccagguacgccuucgcaauggaacggaacgcugggucgggaaucauaauuucugauacaccuguacaugacugcaauacuaccugucaaacaccaaaaggcgccaucaacaccucccugccguuucagaauauucaccccaucacgaucgguaagugcccuaaguaugugaaaucaacuaaacuucgccuggcgacaggguugagaaacgucccaaguauucagagcaggggacucuucggcgccauagcaggcuuuaucgaagggggauggaccgguaugguggacggcugguacggguaucaucaccagaaugaacaaggauccggcuacgcugccgaucugaagucuacucagaacgcuauugacgagaucacaaauaagguuaacagcgugauagagaaaaugaauacccaguucacggccgucgguaaggaauuuaaccacuuagagaagcggauugaaaaucugaacaaaaagguggaugacggguuccucgauaucuggaccuacaaugcagagcuucugguauugcuagaaaacgagcgcacacuggacuaucaugauucaaauguuaaaaaccucuacgagaaggugcgaagucagcugaaaaacaaugccaaggaaaucggcaacggauguuucgaguuuuaucacaagugcgacaauacuuguauggaauccgucaaaaacggcaccuacgauuaucccaaguacagcgaggaagcuaaacuuaauagagaggagauugacggggugaagcuggaaucuacaaggaucuaucaaauuuuggcgauauacucaacugucgcaaguagccucgugcugguuguguccuuaggagccaucucuuucuggaugugcucgaacgguagccugcagugccggauuuguaucuga

SEQ ID NO: 135935 - RNA, 1701 nt, Artificial Sequence; identical to SEQ ID NO: 130704
  derived and/or modified CDS sequence (opt3) from hemagglutinin__InfluenzaA__AEW11263

SEQ ID NO: 135936 - RNA, 1701 nt, Artificial Sequence; identical to SEQ ID NO: 130704
  derived and/or modified CDS sequence (opt3) from hemagglutinin__InfluenzaA__AEW11273

SEQ ID NO: 135937 - RNA, 1701 nt, Artificial Sequence; identical to SEQ ID NO: 130704
  derived and/or modified CDS sequence (opt3) from hemagglutinin__InfluenzaA__AEW11283

SEQ ID NO: 135938 - RNA, 1701 nt, Artificial Sequence; identical to SEQ ID NO: 130704
  derived and/or modified CDS sequence (opt3) from hemagglutinin__InfluenzaA__AEW11293

SEQ ID NO: 135939 - RNA, 1701 nt, Artificial Sequence
  derived and/or modified CDS sequence (opt3) from hemagglutinin__InfluenzaA__AEW11303
augaaggccauccuggugguccuccuuuacaccuucgcuacagcaaacgccgacacucugugcauuggcuaucacgcgaauaacagcacggauaccguugacacaguguuggagaaaaauguaacugugacccauuccgucaacuuacuggaagauaagcacaaugggaaacuauguaagcucagaggaguggcuccccugcaucuugguaaaugcaacauagccggcuggauccuggggaauccugagugugaaucuuugucaacagcaaguagcugguccuacauuguugagaccucuucgucagacaacggaacuugcuauccaggcgauuuuaucgacuacgaggagcucagggagcagcugagcaguguguccucuuucgaacgguuugagauuuucccgaagacaagcuccuggcccaaucacgauucaaacaagggugucaccacggccuguccucaugcuggggcaaaaaguuuuuauaagaaucugaucuggcucgugaaaaagggaaacagcuacccaaaauuaucuaaguccuauauaaaugacaagggcaaagaaguacugguucuuuggggcauccaccaccccucaacuagcgccgaucaacagaguuuguaccagaacgcugacgccuacguguucgucgggaccucucgcuauuccaagaaauuuaagccugagauugcgauccgaccaaaagugcgugaucaggagggaagaaugaauuacuauuggacacugguggaacccggugacaagauuacuuucgaggcaaccggcaaccuagucguuccuagguacgccuuugcuauggaacggaacgccgggagcggaaucauaauuucggauacaccagugcaugacugcaauaccacgugucaaacuccgaaaggcgcaaucaacacaucucuccccuuccagaauauucacccuaucaccaucgguaagugcccaaaguauguaaaauccacuaagcugcgccuugcuacagggcugagaaacgugcccucaauucagaguaggggauuguuuggcgccauagcgggcuucaucgaagggggauggaccgguauggucgacggcugguacggguaucaucaccagaaugaacaaggaagcggcuacgccgcagaucucaaauccacgcagaacgcuauugacgagaucaccaauaaggugaacucuguuauagagaaaaugaauacacaguuuacugccguggguaaggaguucaaccaccuggaaaagcggauugaaaauuuaaacaaaaaggucgaugacggguuccuggauaucuggaccuacaaugcugagcuccuugugcuguuggaaaacgagcgcacacuagacuaucaugauagcaauguaaagaaccuguacgagaagguucgaucacagcucaaaaacaaugccaaggaaaucggcaacggauguuuugaguucuaucacaagugcgacaauacuuguauggaaagugugaaaaacggcaccuacgauuauccuaaguacuccgaggaagcaaaacugaauagagaggagauugacggggucaaacuugaaagcacaaggaucuaucaaauucuggccauauacucuaccguggcuucaaguuugguccucgugguuagccugggagcgaucuccuuuuggaugugcucuaacgguucguuacagugccggguguguauuuga

SEQ ID NO: 135940 - RNA, 1701 nt, Artificial Sequence; identical to SEQ ID NO: 130704
  derived and/or modified CDS sequence (opt3) from hemagglutinin__InfluenzaA__AEW11313

SEQ ID NO: 135941 - RNA, 1701 nt, Artificial Sequence
  derived and/or modified CDS sequence (opt3) from hemagglutinin__InfluenzaA__AEW11323
augaaggccauccuggugguccuccuuuacaccuucgcuacagcaaacgccgacacucugugcauuggcuaucacgcgaauaacagcacggauaccguugacacaguguuggagaagaauguaacugugacccauuccgucaacuuacuggaagauaagcacaaugggaaacuauguaagcucagaggaguggcuccccugcaucuugguaaaugcaacauagccggcuggauccuggggaauccugagugugaaucuuugucaacagcaaguagcugguccuacauuguugagaccucuucgucagacaacggaacuugcuauccaggcgauuuuaucgacuacgaagaacucagggagcagcugagcaguguguccucuuucgaacgguuugagauuuucccgaagacaagcuccuggcccaaucacgauucaaacaagggugucaccgccgcuuguccucaugcaggggccaaaaguuuuuauaagaaucugaucuggcucgugaaaaagggaaacagcuacccaaaauuaucuaaguccuauauaaaugacaagggcaaagaaguacugguucuuuggggcauccaccaccccucaacgagcgcugaucaacagaguuuguaccagaacgccgacgcguacguguucgucgggacuucucgcuauuccaagaaauuuaagccugagauugcaauccgaccaaaagugcguggacaggaggguagaaugaauuacuauuggacccugguggaacccggcgauaagauuacauucgaggccacugggaaccuagucguuccuagguacgcuuuugccauggaacggaacgcaggaagcggcaucauaauuucggacaccccagugcaugauugcaauacaaccugucaaacgccgaaaggugcuguaaacacuucucuccccuuccagaauauccacccuauuacaaucgggaagugcccaaaguaugugaaauccaccaagcugcgccuugccacuggacugagaaacguccccucaauccagaguaggggcuuguuuggcgcgauugccggguucauagagggagguuggacaggcaugguggacgggugguacggauaucaucaccagaaugaacaaggcagcgguuacgcagcugaccucaaauccacccagaacgccaucgaugagauuacgaauaagguuaacucugugaucgagaaaaugaauacccaguuuacagcugucgggaaggaguucaaccaccuggagaagcggauagaaaauuuaaacaaaaagguggacgauggcuuccuggacauuuggacuuacaaugccgagcuccuuguacuguuggaaaacgagcgcacccuagauuaucaugacagcaauguuaaaaaccuguacgagaaggugcgaucacagcucaaaaacaaugcaaaggaaaucggaaacggcuguuuugaguucuaucacaagugcgauaauacauguauggaaagugucaaaaacgggacuuacgacuauccuaaguacuccgaggaagccaaacugaauagagaggagaucgauggagugaaacuugaaagcaccaggauuuaucaaauccuggcuauuuacucuacagucgcgucaaguuuggugcucguugugagccugggugcaauauccuuuuggaugugcucuaacggcucguuacagugccggaucuguauuuga

SEQ ID NO: 135942 - RNA, 1701 nt, Artificial Sequence
  derived and/or modified CDS sequence (opt3) from hemagglutinin__InfluenzaA__AEW22712
augaaggccauccuggugguccuccuuuacaccuucgcuacagcaaacgccgacacucugugcauuggcuaucacgcgaauaacagcacggauaccauagacacaguuuuggagaagaaugugacuguaacccauuccgugaacuuacuggaagauaagcacaaugggaaacuauguaagcucagaggagucgcuccccugcaucuugguaaaugcaacaucgccggcuggauucuggggaauccugagugugaaucuuugucaacagcaaguagcugguccuacaucguggagaccucuucgucagacaacggaacuugcuauccaggcgauuuuauugacuacgaggaacucagggagcagcugagcaguguuuccucuuucgaacgguuugagaucuucccgaagacaagcuccuggcccaaucacgauucaaacaagggugugaccgccgcuuguccucaugcaggggccaaaggauuuuauaagaaucugauauggcucgucaaaaagggcaacaguuacccaaaauuaagcaagucuuauaucaaugacaagggcaaagaagugcugguacuuugggggauucaccaccccuccacgacugcugaucaacagucauuguaccagaacgccgacaccuacguuuucgugggaacaagccgcuauaguaagaaauuuaagccugagaucgcgauucgaccaaaaguccgugaucaggaggguagaaugaauuacuauuggacucuggugaagcccggcgacaaaaucaccuucgaagcaacagggaaccuaguggucccuagguacgccuuugcuauggagcggaacgccggaucuggcauaauuaucuccgauaccccaguucaugacugcaauacgacuugucaaacaccgaagggugcaauuaacaccagccuccccuuccagaauauccacccuaucacuauugggaagugcccaaaauaugugaagucgacaaaacugcgccuugcuaccggacugagaaacguacccucuauacaguccaggggcuuguuuggcgccaucgcgggguucauugaaggagguuggacgggcaugguggacgggugguacggauaucaucaccagaaugagcaaggcucagguuacgccgcagaucucaagaguacccagaacgcuaucgacaaaauaacaaauaaggucaacagcgugauugaaaagaugaauacucaguuuaccgccguugggaaagaguucaaccaccuggagaagcggaucgaaaauuuaaacaaaaagguggaugacggcuuccuggauaucuggacauacaaugcugagcuccuuguccuguuggaaaacgagcgcacucuagacuaucaugauuccaaugugaaaaaccuguacgaaaagguacgaaaccagcucaagaauaacgccaaagagauuggaaauggcuguuuugaguucuaucacaagugcgacaacaccuguauggaaucuguuaaaaaugggacauacgauuauccuaaguacagcgaggaagcaaaacugaacagagaggaaaucgacggagugaaacuugagucaaccaggauuuaucaaauacuggccaucuacaguacugucgcuuccagcuuggugcucgucgugucucugggugcgauuucauuuuggaugugcaguaauggcagcuuacagugccggaucuguaucuga

SEQ ID NO: 135943 - RNA, 1701 nt, Artificial Sequence
  derived and/or modified CDS sequence (opt3) from hemagglutinin__InfluenzaA__AEW22718
augaaggccauccuggugguccuccuuuacaccuucgcuacagcaaacgccgacacucugugcauuggcuaucacgcgaauaacagcacggauaccguugacacaguguuggagaaaaauguaacugugacccauuccgucaacuuacuggaagauaagcacaaugggaaacuauguaagcucagaggaguggcuccccugcaucuugguaaaugcaacauagccggcuggauccuggggaauccugagugugaaucuuugucaacagcaaguagcugguccuacauuguugagaccucuucgucagacaacggaacuugcuauccaggcgauuuuaucgacuacgaggaacucagggagcagcugagcaguguguccucuuucgaacgguuugagauuuucccgaagacaagcuccuggcccaaucacgauucaaacaagggugucaccgccgcuuguccucaugcaggggccaaaggauuuuauaagaaucugaucuggcucgugaaaaagggcaacaguuacccaaaauuaagcaagucuuauauaaaugacaagggcaaagaaguacugguucuuugggggauccaccaccccuccacgacugcugaucaacagucauuguaccagaacgccgacaccuacguguucgucggaacaagccgcuauaguaagaaauuuaagccugagauugcgauccgaccaaaagugcgugaucaggaggguagaaugaauuacuauuggacucuggugaagcccggcgacaaaauuaccuucgaagcaacagggaaccuagucguuccuagguacgccuuugcuauggagcggaacgccggaucuggcaucauaauuuccgauaccccagugcaugacugcaauacgacuugucaaacaccgaagggugcaaucaacaccagccuccccuuccagaauauucacccuaucacuaucgggaagugcccaaaauauguaaagucgacaaaacugcgccuugcuaccggacugagaaacgugcccucuauucaguccaggggcuuguuuggcgccauagcgggguucaucgaaggagguuggacgggcauggucgacgggugguacggauaucaucaccagaaugagcaaggcucagguuacgccgcagaucucaagaguacccagaacgcuauugacaaaaucacaaauaaggugaacagcguuauagaaaagaugaauacucaguuuaccgccguggggaaagaguucaaccaccuggagaagcggauugaaaauuuaaacaaaaaggucgaugacggcuuccuggauaucuggacauacaaugcugagcuccuugugcuguuggaaaacgagcgcacucuagacuaucaugauuccaauguaaagaaccuguacgaaaagguucgaaaccagcucaagaauaacgccaaagagaucggaaauggcuguuuugaguucuaucacaagugcgacaacaccuguauggaaucugugaaaaaugggacauacgauuauccuaaguacagcgaggaagcaaaacugaacagagaggaaauugacggagucaaacuugagucaaccaggaucuaucaaauucuggccauauacaguacuguggcuuccagcuugguccucgugguuucucugggugcgaucucauuuuggaugugcaguaauggcagcuuacagugccggauuuguaucuga

SEQ ID NO: 135944 - RNA, 1701 nt, Artificial Sequence; identical to SEQ ID NO: 134502
  derived and/or modified CDS sequence (opt3) from hemagglutinin__InfluenzaA__AEW22720

SEQ ID NO: 135945 - RNA, 1701 nt, Artificial Sequence; identical to SEQ ID NO: 134502
  derived and/or modified CDS sequence (opt3) from hemagglutinin__InfluenzaA__AEW22722

SEQ ID NO: 135946 - RNA, 1701 nt, Artificial Sequence
  derived and/or modified CDS sequence (opt3) from hemagglutinin__InfluenzaA__AEW22724
augaaggccauccuggugguccuccuuuacaccuucgcuacagcaaacgccgacacucugugcauuggcuaucacgcgaauaacagcacggauaccguugacacaguguuggagaagaauguaacugugacccauuccgucaacuuacuggaagauaagcacaaugggaaacuauguaagcucagaggaguggcuccccugcaucuugguaaaugcaacauagccggcuggauccuggggaauccugagugugaaucuuugucaacagcaaguagcugguccuacauuguugagaccucuucgucagacaacggaacuugcuauccaggcgauuuuaucgacuacgaagaacucagggagcagcugagcaguguguccucuuucgaacgguuugagauuuucccgaagacaagcuccuggcccaaucacgauucaaacaagggugucaccgccgcuuguccucaugcaggggccaaaggauuuuauaagaaucugaucuggcucgugaaaaagggcaacaguuacccaaaauuaagcaagucuuauauaaaugacaagggcaaagaaguacugguucuuugggggauccaccaccccuccacgacugcugaucaacagucauuguaccagaacgccgacaccuacguguucgucggaacaagccgcuauaguaagaaauuuaagccugagauugcgauccgaccaaaagugcgugaucaggaggguagaaugaauuacuauuggacucugguggaacccggcgacaagauuaccuucgaggcaacagggaaccuagucguuccuagguacgccuuugcuauggaacggaacgccggaucuggcaucauaauuuccgauaccccagugcaugacugcaauacgacuugucaaacaccgaaaggugcaaucaacaccagccuccccuuccagaauauucacccuaucacuaucgggaagugcccaaaguauguaaaaucgacaaagcugcgccuugcuaccggacugagaaacgugcccucuauucaguccaggggcuuguuuggcgccauagcgggguucaucgagggagguuggacgggcauggucgacgggugguacggauaucaucaccagaaugaacaaggcucagguuacgccgcagaucucaaaaguacccagaacgcuauugacaagaucacaaauaaagugaacagcguuauagagaagaugaauacucaguuuaccgccguggggaaggaguucaaccaccuggaaaaacggauugagaauuuaaacaagaaagucgaugacggcuuccuggauaucuggacauacaaugcugaacuccuugugcuguuggagaacgaacgcacucuagacuaucaugauuccaauguaaagaaccuguacgagaaaguucgaaaccagcucaagaauaacgccagagagaucggaaauggcuguuuugaguucuaucacaagugcgacaacaccuguauggagucugugaaaaaugggacauacgauuauccuaaguacagcgaagaggcaaaacugaacagggaagagauugacggagucaaacuugagucaacccggaucuaucaaauucuggccauauacaguacuguggcuuccagcuugguccucgugguuucucugggugcgaucucauuuuggaugugcaguaauggcagcuuacagugccguauuuguaucuga

SEQ ID NO: 135947 - RNA, 1701 nt, Artificial Sequence
  derived and/or modified CDS sequence (opt3) from hemagglutinin__InfluenzaA__AEW25297
augaaggccauccuggugguccuccuuuacaccuucgcuacagcaaacgccgacacucugugcauuggcuaucacgcgaauaacagcacggauaccguugacacaguguuggagaaaaauguaacugugacccauuccgucaacuuacuggaagauaagcacaaugggaaacuauguaagcucagaggaguggcuccccugcaucuugguaaaugcaacauagccggcuggaucccugggaauccagagugugaaucucugucaacagcaaguagcugguccuacauuguugagaccucuucgucagacaacggaacuugcuauccgggcgauuuuaucgacuacgaagaguugagggagcagcucagcaguguguccucuuucgaacgguuugagauuuuccccaagacaagcuccuggccuaaucacgauccaaacaagggugucaccgccgcuuguccccaugcaggggccaaaucauuuuauaagaaucugaucuggcuggugaaaaagggaaacaguuacccuaaacucagcaagucuuauauaaaugacaagggcaaagaaguauuaguucuguggggcauccaccacccauccacgucagcugaucaacagagccuuuaccagaacgccgacgcguacguguucgucgggacuagccgcuauucuaagaaauuuaagcccgagauugcaauccgaccuaaagugcgugaucaggagggaagaaugaauuacuauuggaccuugguggaaccaggugacaagauuacauucgaggccacuggcaaccuggucguuccgagguacgcuuuugccauggaacggaacgcaggguccggaaucauaauuagcgauacccccgugcaugacugcaauacaaccugucaaacgccucgcggcgcuaucaacacuucgcuaccauuccagaauauucaccccaucacaaucgguaaaugcccuaaguauguaaagucuaccaaacucagacuggccacugggcuuaggaacgugccauccauucagucacggggacuguuuggcgcgauagccggcuucaucgaagggggauggacagguauggucgacggcugguacggguaucaucaccagaaugaacaaggaaguggcuacgcagcugauuugaagaguacccagaacgccauugacgagaucacgaauaaagugaacuccguuauagagaagaugaauacccaguuuacagcuguggguaaagaguucaaccaccucgagaagcgcauugaaaaucugaacaagaaagucgaugacggguucuuagauaucuggacuuacaaugccgagcugcucgugcuucuggaaaacgagcgaaccuuggacuaucaugauucuaauguaaagaaccuauacgagaaaguuagaagccagcugaagaacaaugcaaaagaaaucggcaacggauguuuugaguucuaucacaagugcgacaauacauguauggaaucagugaagaacggcacuuacgauuaucccaaauacagugaggaagccaagcucaauagggaggagauugacggggucaaacuggaauccacccggaucuaucaaauucuugcuauauacagcacaguggcgucuucacuggucuuggugguuagucucggagcaaucagcuuuuggaugugcuccaacgguucucugcagugccguauuuguaucuga

SEQ ID NO: 135948 - RNA, 1701 nt, Artificial Sequence; identical to SEQ ID NO: 131515
  derived and/or modified CDS sequence (opt3) from hemagglutinin__InfluenzaA__AEW25306

SEQ ID NO: 135949 - RNA, 1701 nt, Artificial Sequence
  derived and/or modified CDS sequence (opt3) from hemagglutinin__InfluenzaA__AEW25315
augaaggccauccuggugguccuccuuuacaccuucgcuacagcaaacgccgacacucugugcauuggcuaucacgcgaauaacagcacggauaccguugacacaguguuggagaaaaauguaacugugacccauuccgucaacuuacuggaagauaagcacaaugggaaacuauguaagcucagaggaguggcuccccugcaucuugguaaaugcaacauagccggcuggauccuggggaauccugagugugaaucuuugucaacagcaaguagcugguccuacauuguugagaccucuucgucagacaacggaacuugcuauccaggcgauuuuaucgacuacgaggagcucagggagcagcugagcaguguguccucuuucgaacgguuugagauuuucccgaagacaagcuccuggcccaaucacgauccuaacaagggugucaccgccgcuuguccacaugcaggggccaaaucauuuuauaagaaucugaucuggcucgugaaaaagggaaacaguuaccccaaauuaagcaagucuuauauaaaugacaagggcaaagaaguacugguucuuuggggcauccaccacccuuccacgucagcugaucaacagagcuuguaccagaacgccgacgcguacguguucgucgggaccagucgcuauucuaagaaauuuaagccagagauugcaauccgacccaaagugcgugaucaggagggaagaaugaauuacuauuggacucugguggaaccuggugacaagauuacauucgaggccacuggcaaccuagucguuccaagguacgcuuuugccauggaacggaacgcaggguccggaaucauaauuagcgauaccccggugcaugacugcaauacaaccugucaaacgcccaaaggcgcuaucaacacuucgcucccuuuccagaauauucacccaaucacaaucgguaagugccccaaguauguaaaaucuaccaagcugcgccuugccacugggcugagaaacgugccuuccauucagucaaggggauuguuuggcgcgauagccggcuucaucgaagggggauggacagguauggucgacggcugguacggguaucaucaccagaaugaacaaggaaguggcuacgcagcugaucucaaaagcacccagaacgccauugacgagaucacgaauaaggugaacuccguuauagagaaaaugaauacccaguuuacagcuguggguaaggaguucaaccaccuggaaaagcggauugaaaauuuaaacaaaaaggucgaugacggguuccuggauaucuggacuuacaaugccgagcuccuugugcuguuggaaaacgagcgcacccuagacuaucaugauucuaauguaaagaaccuguacgagaagguucgaagccagcucaaaaacaaugcaaaggaaaucggcaacggauguuuugaguucuaucacaagugcgacaauacauguauggaaucagugaaaaacggcacuuacgauuauccaaaguacagugaggaagccaaacugaauagagaggagauugacggggucaaacuugaauccaccaggaucuaucaaauucuggcuauauacagcacaguggcgucuucauugguccucgugguuagucugggagcaaucagcuuuugggugugcuccaacgguucuuuacagugccggauuuguaucuga

SEQ ID NO: 135950 - RNA, 1701 nt, Artificial Sequence
  derived and/or modified CDS sequence (opt3) from hemagglutinin__InfluenzaA__AEW25331
augaaggccauccuggugguccuccuuuacaccuucgcuacagcaaacgccgacacucugugcauuggcuaucacgcgaauaacagcacggauaccguugacacaguguuggagaaaaauguaacugugacccauuccgucaacuuacuggaagauaagcacaaugggaaacuauguaagcucagaggaguggcuccccugcaucuugguaaaugcaacauagccggcuggauccuggggaauccugagugugaaucuuuuucaacaaguagcuccuggucuuacauuguugagaccucgucaagcgacaacggaacuugcuauccaggcgauuucaucgacuacgaagaguugagggagcagcucaguuccgugucuagcuuugaacgguucgagauuuuuccgaagacauccucauggcccaaucacgauaguaacaagggugucaccgcagccuguccucaugcuggggcaaagagcuucuauaaaaaucugaucuggcuggugaaaaagggaaacucuuacccaaaacucuccaagucauauauaaaugacaagggcaaagaaguauuaguucuguggggcauccaccaccccagcacgagugccgaucaacagucucuuuaccagaacgcugacgccuacguguuugucgggacuucccgcuauagcaagaaauucaagccugagauugcgauccgaccaaaagugcgugaucaggagggaagaaugaauuacuauuggaccuugguggaacccggugacaagauuacauuugaggcaacuggcaaccuggucguuccuagguacgccuucgcuauggaacggaacgccgggucgggaaucauaauuucugauaccccagugcaugacugcaauacaaccugucaaacgccgaaaggcgcaaucaacacuucccuacccuuucagaauauuccuccaaucacaaucgguaagugccccaaguauguaaaaucaaccaagcuccgccuggcuacugggcuuagaaacgugccuaguauucagagcaggggacuguucggcgccauagcgggcuuuaucgaagggggauggacagguauggucgacggcugguacggguaucaccaucagaaugaacaaggauccggcuacgccgcagauuugaaaucuacccagaacgcuauugacgagaucacgaauaaggugaacagcguuauagagaaaaugaauacccaguucacagccguggguaaggaguucaaccaccucgagaagcggauugaaaaucugaacaaaaaggucgaugacggguuuuuagauaucuggacuuacaaugcugagcugcucgugcuucuggaaaacgagcgcaccuuggacuaucacgauucaaauguuaaaaaccuauacgagaagguacgaagucagcugaaaaacaaugccaaggaaaucggcaacggauguuucgaguuuuaucauaagugcgacaauacauguauggaauccgugaaaaacggcacuuacgauuauccaaaguacagcgaggaagcaaaacucaauagagaggagauugacggggucaagcuggaaucuaccaggaucuaucaaauucuugccauauacucaacaguggcuaguagccuggucuuggugguuucccucggagcgaucucuuucuggaugugcucgaacgguagccugcagugccggauuuguaucuga

SEQ ID NO: 135951 - RNA, 1701 nt, Artificial Sequence
  derived and/or modified CDS sequence (opt3) from hemagglutinin__InfluenzaA__AEW25349
augaaggccauccuggugguccuccuuuacaccuucgcuacagcaaacgccgacacucugugcauuggcuaucacgcgaauaacagcacggauaccguugacacaguguuggagaaaaauguaacugugacccauuccgucaacuuacuggaagauaagcacaaugggaaacuauguaagcucagaggaguggcuccccugcaucuugguaaaugcaacauagccggcuggauccuggggaauccugagugugaaucuuuuucaacaaguagcuccuggucuuacauuguugagaccucgucaagcgacaacggaacuugcuauccaggcgauuucaucgacuacgaagaguugagggagcagcucaguuccgugucuagcuuugaacgguucgagauuuuuccgaagacauccucauggcccaaucacgauaguaacaagggugucaccgcagccuguccucaugcuggggcaaagagcuucuauaaaaaucugaucuggcuggugaaaaagggaaacucuuacccaaaacucuccaagucauauauaaaugacaagggcaaagaaguauuaguucuguggggcauccaccaccccagcacgagugccgaucaacagucucuuuaccagaacgcugacgccuacguguuugucgggacuucccgcuauagcaagaaauucaagccugagauugcgauccgaccaaaagugcgugaucaggagggaagaaugaauuacuauuggaccuugguggaacccggugacaagauuacauuugaggcaacuggcaaccuggucguuccuagguacgccuucgcuauggaacggaacgccgggucgggaaucauaauuucugauaccccagugcaugacugcaauacaaccugucaaacgccgaaaggcgcaaucaacacuucccuacccuuucagaauauucacccuaucacaaucgguaagugcccaaaguauguaaaaucaaccaagcuccgccuggcuacugggcuuagaaacgugcccaguauucagagcaggggacuguucggcgccauagcgggcuuuaucgaagggggauggacagguauggucgacggcugguacggguaucaucaccagaaugaacaaggauccggcuacgccgcagauuugaaaucuacccagaacgcuauugacgagaucacgaauaaggugaacagcguuauagagaaaaugaauacccaguucacagccguggguaaggaguucaaccaccucgagaagcggauugaaaaucugaacaaaaaggucgaugacggguuuuuagauaucuggacuuacaaugcugagcugcucgugcuucuggaaaacgagcgcaccuuggacuaucaugauucaaauguuaaaaaccuauacgagaagguacgaagucagcugaaaaacaaugccaaggaaaucggcaacggauguuucgaguuuuaucacaagugcgacaauacauguauggaauccgugaaaaacggcacuuacgauuauccuaaguacagcgaggaagcaaaacucaauagagaggagauugacggggucaagcuggaaucuaccaggaucuaucaaauucuugccauauacucaacaguggcuaguagccuggucuuggugguuucccucggagcgaucucuuucuggaugugcucgaacgguagccugcagugccggauuuguaucuga

SEQ ID NO: 135952 - RNA, 1701 nt, Artificial Sequence
  derived and/or modified CDS sequence (opt3) from hemagglutinin__InfluenzaA__AEW25367
augaaggccauccuggugguccuccuuuacaccuucgcuacagcaaacgccgacacucugugcauuggcuaucacgcgaauaacagcacggauaccguugacacaguguuggagaaaaauguaacugugacccauuccgucaacuuacuggaagauaagcacaaugggaaacuauguaagcucagaggaguggcuccccugcaucuugguaaaugcaacauagccggcuggauccuggggaauccugagugugaaucuuuuucaacaaguagcuccuggucuuacauuguugagaccucgucaagcgacaacggaacuugcuauccaggcgauuucaucgacuacgaagaguugagggagcagcucaguuccgugucuagcuuugaacgguucgagauuuuuccgaagacauccucauggcccaaucacgauaguaacaagggugucaccgcagccuguccucaugcuggggcaaagagcuucuauaaaaaucugaucuggcuggugaaaaagggaaacucuuacccaaaacucuccaagucauauauaaaugacaagggcaaagaaguauuaguucuguggggcauccaccaccccagcacgagugccgaucaacagcgccuuuaccagaacgcugacgccuacguguuugucgggacuucucgauauuccaagaaauucaagccugagauugcgauccguccaaaagugagagaucaggagggaaggaugaauuacuauuggaccuugguggaacccggugacaagauuacauuugaggcaacuggcaaccuggucguuccucgguacgccuucgcuauggaacgcaacgccgggagcggaaucauaauuucggauaccccagugcaugacugcaauacaaccugucaaacgccgaaaggcgcaaucaacacuucucuacccuuucagaauauucacccuaucacaaucgguaagugcccaaaguauguaaaauccaccaagcucagacuggcuacugggcuuaggaacgugcccucaauucagagucggggacuguucggcgccauagcgggcuuuaucgaagggggauggacagguauggucgacggcugguacggguaucaucaccagaaugaacaaggaagcggcuacaccgccgauuugaaauccacgcagaacgcaauugacgagaucaccaauaaggugaacucuguuauagagaaaaugaauacacaguucacugcuguggguaaggaguucaaccaccucgagaagcgcauugaaaaucugaacaaaaaggucgaugacggguuuuuagauaucuggaccuacaaugccgagcugcucgugcuucuggaaaacgagcgaacauuggacuaucaugauagcaauguuaaaaaccuauacgagaagguaagaucacagcugaaaaacaaugcuaaggaaaucggcaacggauguuucgaguuuuaucacaagugcgacaauacuuguauggaaagugugaaaaacggcaccuacgauuauccuaaguacuccgaggaagccaaacucaauagggaggagauugacggggucaagcuggaaagcacacggaucuaucaaauucuugcaauauacucuaccguggccucaagucuggucuuggugguuagccucggagcuaucuccuucuggaugugcucuaacgguucgcugcagugccguauuuguaucuga

SEQ ID NO: 135953 - RNA, 1701 nt, Artificial Sequence
  derived and/or modified CDS sequence (opt3) from hemagglutinin__InfluenzaA__AEW25377
augaaggccauccuggugguccuccuuuacaccuucgcuacagcaaacgccgacacucugugcauuggcuaucacgcgaauaacagcacggauaccguugacacaguguuggagaaaaauguaacugugacccauuccgucaacuuacuggaagauaagcacaaugggaaacuauguaagcucagaggaguggcuccccugcaucuugguaaaugcaacauagccggcuggauccuggggaauccugagugugaaucuuugucaacagcaaguagcugguccuacauuguugagaccucuucgucagacaacggaacuugcuauccaggcgauuuuaucgacuacgaggagcucagggagcagcugagcaguguguccucuuucgaacgguuugagauuuucccgaagacaagcuccuggcccaaucacgauucaaacaagggugucaccacggccuguccucaugcuggggcaaaaaguuuuuauaagaaucugaucuggcucgugaaaaagggaaacagcuacccaaaauuaucuaaguccuauauaaaugacaagggcaaagaaguacugguucuuuggggcauccaccaccccucaacuagcgccgaucaacagaguuuguaccagaacgcugacgccuacguguucgucgggaccucucgcuauuccaagaaauuuaagccugagauugcgauccgaccaaaagugcgugaucaggagggaagaaugaauuacuauuggacacugguggaacccggugacaagauuacuuucgaggcaaccggcaaccuagucguuccuagguacgccuuugcuauggaacggaacgccgggagcggaaucauaauuucggauacaccagugcaugacugcaauaccacgugucaaacuccgaaaggcgcaaucaacacaucucuccccuuccagaauauucacccuaucaccaucgguaagugcccaaaguauguaaaauccacuaagcugcgccuugcuacagggcugagaaacgugcccucaauucagaguaggggauuguuuggcgccauagcgggcuucaucgaagggggauggaccgguauggucgacggcugguacggguaucaucaccagaaugaacaaggaagcggcuacgccgcagaucucaaauccacgcagaacgcuauugacgagaucaccaauaaggugaacucuguuauagagaaaaugaauacacaguuuacugccguggguaaggaguucaaccaccuggaaaagcggauugaaaauuuaaacaaaaaggucgaugacggguuccuggauaucuggaccuacaaugcugagcuccuugugcuguuggaaaacgagcgcacacuagacuaucaugauagcaauguuaaaaaccuguacgagaagguaaaaucacagcucaagaacaaugccaaggaaaucggcaacggauguuuugaguucuaucacaaaugcgacaaugcauguauggaaagugugaagaacggcacuuacgauuauccuaaauacuccgaggaagccaagcugaaucgagaggagauugacggggucaaacuugaaagcaccagaaucuaucaaauucuggcuauauacucuacaguggcgucaaguuugguccucgugguuagccugggagcaaucuccuuuuggaugugcucuaacgguucguuacagugcaggauuuguaucuga

SEQ ID NO: 135954 - RNA, 1701 nt, Artificial Sequence
  derived and/or modified CDS sequence (opt3) from hemagglutinin__InfluenzaA__AEW25385
augaaggccauccuggugguccuccuuuacaccuucgcuacagcaaacgccgacacucugugcauuggcuaucacgcgaauaacagcacggauaccguugacacaguguuggagaaaaauguaacugugacccauuccgucaacuuacuggaagauaagcacaaugggaaacuauguaagcucagaggaguggcuccccugcaucuugguaaaugcaacauagccggcuggauccuggggaauccugagugugaaucuuugucaacagcaaguagcugguccuacauuguugagaccucuucgucagacaacggaacuugcuauccaggcgauuuuaucgacuacgaggagcucagggagcagcugagcagugugccguccuucgaacgguuugagauuuuccccaagacaucuagcuggccuaaucacgauuccaacaagggugucaccgccgcuuguccacaugcaggggccaaaucauuuuauaagaaucugaucuggcucgugaaaaagggaaacaguuaccccaaauuaagcaagucuuauauaaaugacaagggcaaagaaguacugguucuuuggggcauccaccacccuuccacgucagcugaucaacagagcuuguaccagaacgccgacgcguacguguucgucgggaccagucgcuauucuaagaaauuuaagccagagauugcaauccgacccaaagugcgugaucaggagggaagaaugaauuacuauuggacucugguggaaccuggugacaagauuacauucgaggccacuggcaaccuagucguuccaagguacgcuuuugccauggaacggaacgcaggguccggaaucauaauuagcgauaccccggugcaugacugcaauacaaccugucaaacgcccaaaggcgcuaucaacacuucgcucccuuuccagaauauucacccaaucacaaucgguaagugccccaaguauguaaaaucuaccaagcugcgccuugccacugggcugagaaacgugccuuccauucagucaaggggauuguuuggcgcgauagccggcuucaucgaagggggauggacagguauggucgacggcugguacggguaucaucaccagaaugaacaaggaaguggcuacgcagcugaucucaaaagcacccagaacgccauugacaagaucacgaauaaagugaacuccguuauagagaagaugaauacccaguuuacagcuguggguaaggaguucaaccaccuggaaaaacggauugagaauuuaaacaagaaagucgaugacggguuccuggauaucuggacuuacaaugccgaacuccuugugcuguuggagaacgaacgcacccuagacuaucaugauucuaauguaaagaaccuguacgagaaaguucgaagccagcucaagaacaaugcaaaggagaucggcaacggauguuuugaguucuaucacaaaugcgacaauacauguauggaaucagugaagaacggcacuuacgauuauccaaaauacagugaagaggccaagcugaauagagaagagauugacggggucaaacuugaguccaccaggaucuaucaaauucuggcuauauacagcacaguggcgucuucauugguccucgugguuagucugggagcaaucagcuuuuggaugugcuccaacgguucuuuacagugccggauuuguaucuga

SEQ ID NO: 135955 - RNA, 1701 nt, Artificial Sequence; identical to SEQ ID NO: 135951
  derived and/or modified CDS sequence (opt3) from hemagglutinin__InfluenzaA__AEW25416

SEQ ID NO: 135956 - RNA, 1701 nt, Artificial Sequence
  derived and/or modified CDS sequence (opt3) from hemagglutinin__InfluenzaA__AEW25446
augaaggccauccuggugguccuccuuuacaccuucgcuacagcaaacgccgacacucugugcauuggcuaucacgcgaauaacagcacggauaccguugacacaguguuggagaaaaauguaacugugacccauuccgucaacuuacuggaagauaagcacaaugggaaacuauguaagcucagaggaguggcuccccugcaucuugguaaaugcaacauagccggcuggauccuggggaauccugagugugaaucuuugucaacagcaaguagcugguccuacauuguugagaccucuucgucagacaacggaacuugcuauccaggcgauuuuaucgacuacgaggagcucagggagcagcugagcaguguguccucuuucgaacgguuugagauuuucccgaagacaagcuccuggcccaaucacgauccuaacaagggugucaccgccgcuuguccacaugcaggggccaaaucauuuuauaagaaucugaucuggcucgugaaaaagggaaacaguuaccccaaauuaagcaagucuuauauaaaugacaagggcaaagaaguacugguucuuuggggcauccaccacccuuccacgucagcugaucaacagagcuuguaccagaacgccgacgcguacguguucgucgggaccagucgcuauucuaagaaauuuaagccagagauugcaauccgacccaaagugcgugaucaggagggaagaaugaauuacuauuggacucugguggaaccuggugacaagauuacauucgaggccacuggcaaccuagucguuccaagguacgcuuuugccauggaacggaacgcaggguccggaaucauaauuagcgauaccccggugcaugacugcaauacaaccugucaaacgcccaaaggcgcuaucaacacuucgcucccuuuccagaauauucacccaaucacaaucgguaagugccccaaguauguaaaaucuaccaagcugcgccuugccacugggcugagaaacgugccuuccauucagucaaggggauuguuuggcgcgauagccggcuucaucgaagggggauggacagguauggucgacggcugguacggguaucaucaccagaaugaacaaggaaguggcuacgcagcugaucucaaaagcacccagaacgccauugacgagaucacgaauaaggugaacuccguuauagagaaaaugaauaagcaguuuaccgcuguggguaaggaguucaaccaccuggaaaaacggauugaaaauuuaaacaagaaagucgaugacggguuccuggauaucuggacauacaaugccgagcuccuugugcuguuggaaaacgagcgcacucuagacuaucaugauucuaauguaaagaaccuguacgagaaaguucgaagccagcucaagaacaaugcaaaggaaaucggcaacggauguuuugaguucuaucacaaaugcgacaauaccuguauggaaucagugaagaacggcacauacgauuauccaaaauacagugaggaagccaagcugaauagagaggagauugacggggucaaacuugaauccacuaggaucuaucaaauucuggcuauauacagcaccguggcgucuucauugguccucgugguuagucugggagcaaucagcuuuuggaugugcuccaacgguucuuuacagugccggauuuguaucuga

SEQ ID NO: 135957 - RNA, 1701 nt, Artificial Sequence; identical to SEQ ID NO: 135951
  derived and/or modified CDS sequence (opt3) from hemagglutinin__InfluenzaA__AEW25454

SEQ ID NO: 135958 - RNA, 1701 nt, Artificial Sequence
  derived and/or modified CDS sequence (opt3) from hemagglutinin__InfluenzaA__AEW25462
augaaggccauccuggugguccuccuuuacaccuucgcuacagcaaacgccgacacucugugcauuggcuaucacgcgaauaacagcacggauaccguugacacaguguuggagaaaaauguaacugugacccauuccgucaacuuacuggaagauaagcacaaugggaaacuauguaagcucagaggaguggcuccccugcaucuugguaaaugcaacauagccggcuggauccuggggaauccugagugugaaucuuugucaacagcaaguagcugguccuacauuguugagaccucuucgucagacaacggaacuugcuauccaggcgauuuuaucgacuacgaggagcucagggagcagcugagcaguguguccucuuucgaacgguuugagauuuucccgaagacaagcuccuggcccaaucacgauccuaacaagggugucaccgccgcuuguccacaugcaggggccaaaucauuuuauaagaaucugaucuggcucgugaaaaagggaaacaguuaccccaaauuaagcaagccuuauacgaaugacaagggcaaagaaguacugguucuuuggggcauacaccacccaucuacuuccgcugaucaacagucauuguaccagaacgccgacgcguacguguucgucgggaccagccgcuauaguaagaaauuuaagcccgagaucgcaauucgaccuaaagugcgugaucaggagggaagaaugaauuacuauuggacacugguggaaccaggugacaagaucacuuucgaggccaccggcaaccuagucguuccgagguacgcuuuugccauggaacggaacgcagggucuggaauuaucauauccgauacacccgugcaugacugcaauaccacgugucaaacuccuaaaggcgcuauuaacacaagccucccauuccagaauauccaccccauuaccaucgguaagugcccuaaguauguaaaaucgacuaagcugcgccuugccacagggcugagaaacgugccaucuauccaguccaggggauuguuuggcgcgauugccggcuucauagaagggggauggaccgguauggucgacggcugguacggguaucaucaccagaaugaacaaggaucaggcuacgcagcugaucucaaaaguacgcagaacgccaucgacgagauuaccaauaaggugaacagcguuaucgagaaaaugaauacacaguuuacugcuguggguaaggaguucaaccaccuggaaaagcggauagaaaauuuaaacaaaaaggucgaugacggguuccuggauauuuggaccuacaaugccgagcuccuugugcuguuggaaaacgagcgcacacuagacuaucaugauuccaauguaaagaaccuguacgagaagguucgaucucagcucaaaaacaaugcaaaggaaaucggcaacggauguuuugaguucuaucacaagugcgacaauacuuguauggaaagcgugaaaaacggcaccuacgauuaucccaaguacucagaggaagccaaacugaauagagaggagaucgacggggucaaacuugaaaguacaaggauuuaucaaauccuggcuauuuacuccaccguggcgagcucuuugguccucgugguuucacugggagcaauaaguuuuuggaugugcagcaacgguuccuuacagugccggaucuguauuuga

SEQ ID NO: 135959 - RNA, 1701 nt, Artificial Sequence; identical to SEQ ID NO: 131515
  derived and/or modified CDS sequence (opt3) from hemagglutinin__InfluenzaA__AEW25472

SEQ ID NO: 135960 - RNA, 1701 nt, Artificial Sequence
  derived and/or modified CDS sequence (opt3) from hemagglutinin__InfluenzaA__AEW25482
augaaggccauccuggugguccuccuuuacaccuucgcuacagcaaacgccgacacucugugcauuggcuaucacgcgaauaacagcacggauaccguugacacaguguuggagaaaaagguaacugugacccauuccgucaauuuacuggaagauaaacacaacgggaagcuauguaaacucagaggaguggcuccccugcaucuugguaagugcaauauagccggcuggauccuggggaacccugagugugaaucuuugucaacagcaaguagcugguccuacauuguugagaccucuaauucggacaacggaacuugcuauccaggcgauuuuaucgacuacgaggaacucagggagcagcugucaagcgugaguuccuucgaacgguuugagauuuucccgaagacaucuagcuggcccaaucacgauccuaacaaaggugucaccgccgcuuguccacaugcaggggccaaguccuuuuauaaaaaucugaucuggcucgugaagaaaggaaacucauaccccaaguuaaguaagagcuauauaaaugacaaaggcaaggaaguacugguucuuuggggcauccaccacccuucuacguccgcugaucaacagucauuguaccagaacgccgacgcguacguguucgucgggacuagccgcuauaguaaaaaguuuaaaccagagauugcaauccgacccaaggugcgugaucagggagguagaaugaauuacuauuggacccugguggagccuggcgacaaaauuacauucgaagccacugggaaccuagucguuccaagguacgcuuuugccauggagcggaacgcaggaucuggcaucauaauuuccgauaccccggugcaugacugcaauacaaccugucaaacgcccaagggugcuaucaacacuagccucccuuuccagaauauucacccaaucacaaucgggaagugccccaaauauguaaagucgaccaaacugcgccuugccacuggacugagaaacgugccuucuauucaguccaggggcuuguuuggcgcgauagccggguucaucgaaggagguuggacaggcauggucgacgggugguacggauaucaucaccagaaugagcaaggcucagguuacgcagcugaucucaagaguacccagaacgccauugacgaaaucacgaauaaagugaacagcguuauagagaagaugaauacccaguuuacagcuguggggaaggaguucaaccaccuggaaaaacggauugagaauuuaaacaagaaagucgaugacggcuuccuggauaucuggacuuacaaugccgaacuccuugugcuguuggagaacgaacgcacccuagacuaucaugauuccaauguaaagaaccuguacgagaaaguucgaucucagcucaagaacaaugcaaaggagaucggaaacggcuguuuugaacuguaucacaaaugcgacaauacauguauggagagcgugaagaacgggacuuacgauuauccaaaauacucagaagaggccaaacuuaauagagaagagauugacggagucaagcuggagaguaccaggaucuaucaaauuuuggcuauauacuccacaguggcgagcucucucguccuggugguuucauuaggugcaaucaguuucuggaugugcagcaacggcucccugcagugccggauuuguaucuga

SEQ ID NO: 135961 - RNA, 1701 nt, Artificial Sequence
  derived and/or modified CDS sequence (opt3) from hemagglutinin__InfluenzaA__AEW25492
augaaggccauccuggugguccuccuuuacaccuucgcuacagcaaacgccgacacucugugcauuggcuaucacgcgaauaacagcacggauaccguugacacaguguuggagaagaauguaacugugacccauuccgucaacuuacuggaagauaagcacaaugggaaacuauguaagcucagaggaguggcuccccugcaucuugguaaaugcaacauagccggcuggauccuggggaauccugagugugaaucuuugucaacagcaaguagcugguccuacauuguugagaccucuucgucagacaacggaacuugcuauccaggcgauuuuaucgacuacgaggagcucagggagcagcugagcaguguguccucuuucgaacgguuugagauuuucccgaagacaagcuccuggcccaaucacgauccuaacaagggugucaccgccgcuuguccacaugcaggggccaaaucauuuuauaagaaucugaucuggcucgugaaaaagggaaacaguuaccccaaauuaagcaagucuuauauaaaugacaagggcaaagaaguacugguucuuuggggcauccaccacccuuccacgucagcugaucaacagagcuuguaccagaacgccgacgcguacauuuucguggggaccagucgcuauucuaagaaauuuaagccagagaucgcaauucgacccaaaguccgugaucaggagggaagaaugaauuacuauuggacucugguggaaccuggugacaagaucacauucgaggccacuggcaaccuaguggucccaagguacgcuuuugccauggaacggaacgcaggguccggaauaauuaucagcgauaccccgguucaugacugcaauacaaccugucaaacgcccaaaggcgcuauuaacacuucgcucccuuuccagaauauccacccaaucacaauugguaagugccccaaguaugugaaaucuaccaagcugcgccuugccacugggcugagaaacguaccuuccauacagucaaggggauuguuuggcgcgaucgccggcuucauugaagggggauggacagguaugguggacggcugguacggguaucaucaccagaaugaacaaggaaguggcuacgcagcugaucucaaaagcacccagaacgccaucgacgagauaacgaauaaggucaacuccgugauugagaaaaugaauacccaguuuacagcuguugguaaggaguucaaccaccuggaaaagcggaucgaaaauuuaaacaaaaagguggaugacggguuccuggauaucuggacuuacaaugccgagcuccuuguccuguuggaaaacgagcgcacccuagacuaucaugauucuaaugugaaaaaccuguacgagaagguacgaagccagcucaaaaacaaugcaaaggaaauuggcaacggauguuuugaguucuaucacaagugcgacaauacauguauggaaucaguuaaaaacggcacuuacgauuauccaaaguacagugaggaagccaaacugaauagagaggagaucgacggggugaaacuugaauccaccaggauuuaucaaauacuggcuaucuacagcacagucgcgucuucauuggugcucgucgugagucugggagcaauuagcuuuuggaugugcuccaacgguucuuuacagugccggaucuguaucuga

SEQ ID NO: 135962 - RNA, 1701 nt, Artificial Sequence
  derived and/or modified CDS sequence (opt3) from hemagglutinin__InfluenzaA__AEW25501
augaaggccauccuggugguccuccuuuacaccuucgcuacagcaaacgccgacacucugugcauuggcuaucacgcgaauaacagcacggauaccguugacacaguguuggagaaaaauguaacugugacccauuccgucaacuuacuggaagauaagcacaaugggaaacuauguaagcucagaggaguggcuccccugcaucuugguaaaugcaacauagccggcuggauccuggggaauccugagugugaaucuuugucaacagcaaguagcugguccuacauuguugagaccucuucgucagacaacggaacuugcuauccaggcgauuuuaucgacuacgaggagcucagggagcagcugagcaguguguccucuuucgaaaaguuugagauuuucccgaagacaagcuccuggcccaaucacgauucaaacaaaggugucaccgccgcuuguccucaugcaggggccaagaguuuuuauaaaaaucugaucugccucgugaagaaaggaaacagcuacccaaaguuaucuaaguccuauauaaaugacaaaggcaaggaaguacugguucuuuggggcauccaccaccccucaacgagcgcugaucaacagaguuuguaccagaacgccgacgcguacguguucgucgggacuucucgguauuccaaaaaguuuaaaccugagauugcaauccgcccaaaggugcgagaucaggagggacguaugaauuacuauuggacccugguggaacccggugacaaaauuacauucgaggccacuggcaaccuagucguuccuagauacgcuuuugccauggaaaggaacgcagggagcggaaucauaauuucggauaccccagugcaugacuguaauacaaccugccaaacgccgaagggcgcuaucaacacuucucuccccuuccagaauauucacccuaucacaaucgguaaguguccaaaauauguaaaguccaccaaacugcggcuugccacugggcugcgcaacgugcccucaauucagaguagaggauuguuuggcgcgauagccggcuucaucgaagggggauggacagguauggucgacggcugguacggguaucaucaccagaaugaacaaggaagcggcuacgcagcugaucucaaguccacccagaacgccauugacaaaaucacgaauaaggugaacucuguuauagagaagaugaauacccaguuuacagcuguggguaaagaguucaaccaccuggaaaagaggauugagaauuuaaacaaaaaggucgaugacggguuccuggauaucuggacuuacaaugccgaacuccuugugcuguuggagaacgaacggacccuagacuaucaugauagcaauguaaagaaccuguacgagaagguucgcucacagcucaagaacaaugcaaaagagaucggcaacggaugcuuugaguucuaucacaagugugacaauacaugcauggaaagugugaaaaacggcacuuacgauuauccuaaguacuccgaagaggccaaacugaaucgagaagagauugacggggucaaacuugagagcaccagaaucuaucaaauucuggcuauauacucuacaguggcgucaaguuugguccucgugguuagccugggagcaaucuccuuuuggaugugcucuaacgguucguuacaguguaggauuugcaucuga

SEQ ID NO: 135963 - RNA, 1701 nt, Artificial Sequence; identical to SEQ ID NO: 135951
  derived and/or modified CDS sequence (opt3) from hemagglutinin__InfluenzaA__AEW25509

SEQ ID NO: 135964 - RNA, 1701 nt, Artificial Sequence
  derived and/or modified CDS sequence (opt3) from hemagglutinin__InfluenzaA__AEW25519
augaaggccauccuggugguccuccuuuacaccuucgcuacagcaaacgccgacacucugugcauuggcuaucacgcgaauaacagcacggauaccguugacacaguguuggagaaaaauguaacugugacccauuccgucaacuuacuggaagauaagcacaaugggaaacuauguaagcucagaggaguggcuccccugcaucuugguaaaugcaacauagccggcuggauccuggggaauccugagugugaaucuuugucaacagcaaguagcugguccuacauuguugagaccucuucgucagacaacggaacuugcuauccaggcgauuuuaucgacuacgaggagcucagggagcagcugagcaguguguccucuuucgaacgguuugagauuuucccgaagacaagcuccuggcccaaucacgauccuaacaagggugucaccgccgcuuguccacauacgggggcaaaaucauuuuauaagaaucugaucuggcucgugaaaaagggaaacaguuaccccaaauuaagcaagucuuauauaaaugacaagggcaaagaaguacugguucuuuggggcauccaccacccuuccacuucagccgaucaacagagcuuguaccagaacgcugacgccuacguguucgucgggaccagucgcuauucuaagaaauuuaagccagagauugcgauccgacccaaagugcgugaucaggagggaagaaugaauuacuauuggacacugguggaaccuggugacaagauuacuuucgaggcaaccggcaaccuagucguuccaagguacgccuuugcuauggaacggaacgccggguccggaaucauaauuagcgauacaccggugcaugacugcaauaccacgugucaaacucccaaaggcgcaaucaacacaucgcucccuuuccagaauauucacccaaucaccaucgguaagugccccaaguauguaaaaucuacuaagcugcgccuugcuacagggcugagaaacgugccuuccauucagucaaggggauuguuuggcgccauagcgggcuucaucgaagggggauggaccgguauggucgacggcugguacggguaucaucaccagaaugaacaaggaaguggcuacgccgcagaucucaaaagcacgcagaacgcuauugacgagaucaccaauaaggugaacuccguuauagagaaaaugaauacacaguuuacugccguggguaaggaguucaaccaccuggaaaagcggauugaaaauuuaaacaaaaaggucgaugacggguuccuggauaucuggaccuacaaugcugagcuccuugugcuguuggaaaacgagcgcacacuagacuaucaugauucuaauguuaaaaaccuguacgagaagguacgaagccagcucaaaaacaaugccaaggaaaucggcaacggauguuuugaguucuaucacaagugcgacaauacuuguauggaaucagugaaaaacggcaccuacgauuauccaaaguacagugaggaagcaaaacugaauagagagaagauugacggggucaaacuugaguccacaaggaucuaucaaauucuggccauauacagcaccguggcuucuucauugguccucgugguuagucugggagcgaucagcuuuuggaugugcuccaacgguucuuuacagugccggauuuguaucuga

SEQ ID NO: 135965 - RNA, 1701 nt, Artificial Sequence
  derived and/or modified CDS sequence (opt3) from hemagglutinin__InfluenzaA__AEW25528
augaaggccauccuggugguccuccuuuacaccuucgcuacagcaaacgccgacacucugugcauuggcuaucacgcgaauaacagcacggauaccguugacacaguguuggagaaaaauguaacugugacccauuccgucaacuuacuggaagauaagcacaaugggaaacuauguaagcucagaggaguggcuccccugcaucuugguaaaugcaacauagccggcuggauccuggggaauccugagugugaaucuuuuucaacaaguagcuccuggucuuacauuguugagaccucgucaagcgacaacggaacuugcuauccaggcgauuucaucgacuacgaagaguugagggagcagcucaguuccgugucuagcuuugaacgguucgagauuuuuccgaagacauccucauggcccaaucacgauaguaacaagggugucaccgcagccuguccucaugcuggggcaaagagcuucuauaaaaaucugaucuggcuggugaaaaagggaaacucuuacccaaaacucuccaagucauauauaaaugacaagggcaaagaaguauuaguucuguggggcauccaccaccccagcacgagugccgaucaacagucucuuuaccagaacgcugacgccuacguguuugucgggacuucccgcuauagcaagaaauucaagccugagauugcgauccgaccaaaagugcgugaucaggagagaaggaugaauuacuauuggaccuugguggaacccggagacaagauuacauuugaggcaacugguaaccuggucguuccucgguacgccuucgcuauggaacgcaacgccggcucggggaucauaauuucugauaccccagugcaugacugcaauacaaccugucaaacgccgaaaggagcaaucaacacuucccuacccuuucagaauauucacccuaucacaaucggcaagugcccaaaguauguaaaaucaaccaagcucagacuggcuacuggucuuaggaacgugcccaguauucagagccgggggcuguucggagccauagcgggcuuuaucgagggcggguggacaggaauggucgacgguugguacggcuaucaucaccagaaugaacaaggguccggauacgccgcagauuugaaaucuacccagaacgcuauugacgagaucacgaauaaggugaacagcguuauagagaaaaugaauacccaguucacagccgugggcaaggaauuuaaccaccucgagaagcgcauugaaaaucugaacaaaaaggucgaugacgguuucuuagauaucuggacuuacaaugcugagcugcucgugcuucuggaaaacgagcgaaccuuggacuaucaugauucaaauguuaaaaaccuauacgagaagguaagaagucagcugaaaaacaaugccaaggaaaucgggaacggcuguuucgaguuuuaucacaagugcgacaauacauguauggaauccgugaaaaacggaacuuacgauuauccuaaguacagcgaggaagcaaaacucaauagggaggagauugacggcgucaagcuggaaucuacccggaucuaucaaauucuugccauauacucaacaguggcuaguagccuggucuuggugguuucccucggggcgaucucuuucuggaugugcucgaacggaagccugcagugccguauuuguaucuga

SEQ ID NO: 135966 - RNA, 1701 nt, Artificial Sequence
  derived and/or modified CDS sequence (opt3) from hemagglutinin__InfluenzaA__AEW25545
augaaggccauccuggugguccuccuuuacaccuucgcuacagcaaacgccgacacucugugcauuggcuaucacgcgaauaacagcacggauaccguugacacaguguuggagaaaaauguaacugugacccauuccgucaacuuacuggaagauaagcacaaugggaaacuauguaagcucagaggaguggcuccccugcaucuugguaaaugcaacauagccggcuggauccuggggaauccugagugugaaucuuugucaacagcaaguagcugguccuacauuguugagaccucuucgucagacaacggaacuugcuauccaggcgauuuuaucgacuacgaggagcucagggagcagcugagcaguguguccucuuucgaacgguuugagauuuucccgaagacaagcuccuggcccaaucacgauccuaacaagggugucaccgccgcuuguccacaugcaggggccaaaucauuuuauaagaaucugaucuggcucgugaaaaagggaaacaguuaccccaaauuaagcaagucuuauauaaaugacaagggcaaagaaguacugguucuuuggggcauccaccacccuuccacgucagcugaucaacagagcuuguaccagaacgccgacgcguacguguucgucgggaccagucgcuauucuaagaaauuuaagccagagauugcaauccgacccaaagugcgugaucaggagggaagaaugaauuacuauuggacucugguggaaccuggugacaagauuacauucgaggccacuggcaaccuagucguuccaagguacgcuuuugccauggaacggaacgcaggguccggaaucauaauuagcgauaccccggugcaugacugcaauacaaccugucaaacgcccaaaggcgcuaucaacacuucgcucccuuuccagaauauucacccaaucacaaucgguaagugccccaaguauguaaaaucuaccaagcugcgccuugccacugggcugagaaacgugccuuccauucagucaaggggauuguuuggcgcgauagccggcuucaucgaagggggauggacagguauggucgacggcugguacggguaucaucaccagaaugaacaaggaaguggcuacgcagcugaucucaaaagcacccagaacgccauugacaagaucacgaauaaagugaacuccguuauagagaagaugaauacccaguuuacagcuguggguaaggaguucaaccaccuggaaaaacggauugagaauuuaaacaagaaagucgaugacggguuccuggauaucuggacuuacaaugccgaacuccuugugcuguuggagaacgaacgcacccuagacuaucaugauucuaauguaaagaaccuguacgagaaaguucgaagccagcucaagaacaaugcaaaggagaucggcaacggauguuuugaguucuaucacaaaugcgacaauacauguauggaaucagugaagaacggcaguuacgauuauccaaaauacuccgaagaggccaagcugaauagagaagagauugacggggucaaacuugagagcacuaggaucuaucaaauucuggcuauauacucuaccguggcgucaaguuuggucauggugguuagccucggagcaaucuccuuuuggaugugcucuaacgguucgcugcagugccggauuuguaucuga

SEQ ID NO: 135967 - RNA, 1701 nt, Artificial Sequence
  derived and/or modified CDS sequence (opt3) from hemagglutinin__InfluenzaA__AEW25555
augaaggccauccuggugguccuccuuuacaccuucgcuacagcaaacgccgacacucugugcauuggcuaucacgcgaauaacagcacggauaccguugacacaguguuggagaaaaauguaacugugacccauuccgucaacuuacuggaagauaagcacaaugggaaacuauguaagcucagaggaguggcuccccugcaucuugguaaaugcaacauagccggcuggauccuggggaauccugagugugaaucuuugucaacagcaaguagcugguccuacauuguugagaccucuucgucagacaacggaacuugcuauccaggcgauuuuaucgacuacgaggagcucagggagcagcugagcaguguguccucuuucgaacgguuugagauuuucccgaagacaagcuccuggcccaaucacgauccuaacaagggugucaccgccgcuuguccacaugcaggggccaaaucauuuuauaagaaucugaucuggcucgugaaaaagggaaacaguuaccccaaauuaagcaagucuuauauaaaugacaagggcaaagaaguacugguucuuuggggcauccaccacccuuccacgucagcugaucaacagagcuuguaccagaacgccgacgcguacguguucgucgggaccagucgcuauucuaagaaauuuaagccagagauugcaauccgacccaaagugcgugaucaggagggaagaaugaauuacuauuggacucugguggaaccuggugacaagauuacauucgaggccacuggcaaccuagucguuccaagguacgcuuuugccauggaacggaacgcaggguccggaaucauaauuagcgauaccccggugcauuauugcaauacaaccugucaaacgcccaaaggcgcuaucaacacuucgcucccuuuccagaauauucacccaaucacaaucgguaagugccccaaguacguaaaaucuaccaagcugcgccuugccacugggcugagaaacgugccuuccauucagucaaggggauuguuuggcgcgauagccggcuucaucgaagggggauggacagguauggucgacggcugguauggguaccaucaccagaaugaacaaggaaguggcuacgcagcugaccucaaaagcacccagaacgccauugaugagaucacgaauaaggugaacuccguuauagagaaaaugaauacccaguuuacagcuguggguaaggaguucaaccaccuggaaaagcggauugaaaauuuaaacaaaaaggucgacgauggguuccuggacaucuggacuuauaaugccgagcuccuugugcuguuggaaaacgagcgcacccuagauuaccaugacucuaauguaaagaaccuguaugagaagguucgaagccagcucaaaaacaaugcaaaggaaaucggcaacggauguuuugaguucuaccacaagugcgauaauacauguauggaaucagugaaaaacggcacuuaugacuacccaaaguauagugaggaagccaaacugaauagagaggagauugauggggucaaacuugaauccaccaggaucuaccaaauucuggcuauauacagcacaguggcgucuucauugguccucgugguuagucugggagcaaucagcuuuuggaugugcuccaacgguucuuuacagugccggauuuguaucuga

SEQ ID NO: 135968 - RNA, 1701 nt, Artificial Sequence
  derived and/or modified CDS sequence (opt3) from hemagglutinin__InfluenzaA__AEW25564
augaaggccauccuggugguccuccuuuacaccuucgcuacagcaaacgccgacacucugugcauuggcuaucacgcgaauaacagcacggauaccguugacacaguguuggagaaaaauguaacugugacccauuccgucaacuuacuggaagauaagcacaaugggaaacuauguaagcucagaggaguggcuccccugcaucuugguaaaugcaacauagccggcuggauccuggggaauccugagugugaaucuuugucaacagcaaguagcugguccuacauuguugagaccucuucgucagacaacggaacuugcuauccaggcgauuuuaucgacuacgaggagcucagggagcagcugagcaguguguccucuuucgaacgguuugagauuuucccgaagacaagcuccuggcccaaucacgauucaaacaagggugucaccgccgcuuguccucaugcaggggccaaaaguuuuuauaagaaucugaucuggcucgugaaaaagggaaacagcuacccaaaauuaucuaaguccuauauaaaugacaagggcaaagaaguacugguucuuuggggcauccaccaccccucaacgagcgcugaucaacagaguuuguaccagaacgccgacgcguacguguucgucgggacuucucgcuauuccaagaaauuuaagccugagauugcaauccgaccaaaagugcgugaucaggagggaagaaugaauuacuauuggacccugguggaacccggugacaagauuacauucgaggccacuggcaaccuagucguuccuagguacgcuuuugccauggaacggaacgcagggagcggaaucauaauuucggauaccccagugcaugacugcaauacaaccugucaaacgccgaaaggcgcucucaacacuucucugcccuuccagaauauccacccuauuacaaucgguaagugcccaaaguauguaaaauccaccaaacuucgccuggccacuggguugagaaacgugcccucaauccagaguaggggacucuuuggcgcgauugccggcuucauagaagggggauggacagguauggucgacggcugguacggguaucaucaccagaaugaacaaggaagcggcuacgcagcugaucugaaguccacccagaacgccaucgacgagauuacgaauaaggugaacucuguuaucgagaaaaugaauacccaguuuacagcuguggguaaggaguucaaccacuuagaaaagcggauagaaaaucugaaccgcaaagucgaugacggguuccucgauauuuggacuuacaaugccgagcuucugguguugcuagaaaacgagcgaacccuggacuaucaugauagcaauguaaagaaccucuacgagaaaguuagaucacagcugaagaacaaugcaaaagaaaucggcaacggauguuuugaguucuaucacaagugcgacaauacauguauggaaagugugaagaacggcacuuacgauuauccuaaauacuccgaggaagccaaacuuaauagggaggagaucgacggggucaagcuggaaagcaccggaauuuaucaaaucuuggcuauuuacucuacaguggcgucaagucucguccuggugguuagcuuaggugcaauauccuuuuggaugugcucuaacggcucgcugcagugccggaucuguauuuga

SEQ ID NO: 135969 - RNA, 1701 nt, Artificial Sequence; identical to SEQ ID NO: 131515
  derived and/or modified CDS sequence (opt3) from hemagglutinin__InfluenzaA__AEW25573

SEQ ID NO: 135970 - RNA, 1701 nt, Artificial Sequence
  derived and/or modified CDS sequence (opt3) from hemagglutinin__InfluenzaA__AEW25582
augaaggccauccuggugguccuccuuuacaccuucgcuacagcaaacgccgacacucugugcauuggcuaucacgcgaauaacagcacggauaccguugacacaguguuggagaaaaauguaacugugacccauuccgucaacuuacuggaagauaagcacaaugggaaacuauguaagcucagaggaguggcuccccugcaucuugguaaaugcaacauagccggcuggauccuggggaauccugagugugaaucuuugucaacagcaaguagcugguccuacauuguugagaccucuucgucagacaacggaacuugcuauccaggcgauuuuaucgacuacgaggagcucagggagcagcugagcaguguguccucuuucgaacgguuugagauuuucccgaagacaagcuccuggcccaaucacgauucaaacaagggugucaccgccgcuuguccucaugcaggggccaaaaguuuuuauaagaaucugaucuggcucgugaaaaagggaaacagcuacccaaaauuaucuaaguccuauauaaaugacaagggcaaagaaguacugguucuuuggggcauccaccaccccucaacgagcgcugaucaacagaguuuguaccagaacgccgacgcguacguguucgucgggacuucucgcuauuccaagaaauuuaagccugagauugcaauccgaccaaaagugcgugaucaggagggaagaaugaauuacuauuggacccugguggaacccggugacaagauuacauucgaggccacuggcaaccuagucguuccuagguacgcuuuugccauggaacggaacgcagggagcggaaucauacucucggauaccccagugcaugacugcaauacaaccugucaaacgccgaaaggcgcuauuaacacuucucugcccuuccagaauauccacccuauuacaaucgguaagugcccaaaguauguaaaauccaccaaacuucgccuggccacuggguugagaaacgugcccucaauccagaguaggggacucuuuggcgcgauugccggcuucauagaagggggauggacagguauggucgacggcugguacggguaucaucaccagaauggacaaggcagcgguuacgcagcugaucugaaguccacccagaacgccaucgacaagauuacgaauaaagugaacucuguuaucgaaaagaugaauacccaguuuacagcuguggggaaggaguucaaccacuuagagaaacggauagaaaaucugaacaagaaagucgaugacggcuuccucgauauuuggacuuacaaugccgagcuucugguguugcuagaaaacgagcgcacccuggacuaucaugauagcaauguaaagaaccucuacgaaaaaguucgaucacagcugaagaacaaugcaaaggagaucggaaacggcuguuuugaguucuaucacaaaugcgacaauacauguauggaaagugugaagaacgggacuuacgauuauccuaaauacuccgaggaagccaaacuuaauagagaggaaaucgacggagucaagcuggagagcaccaggauuuaucaaaucuuggcuauuuacucuacaguggcgucaagucucguccuggugguuagcuuaggugcaauauccuuuuggaugugcucuaacggcucgcugcagugccggaucuguauuuga

SEQ ID NO: 135971 - RNA, 1701 nt, Artificial Sequence
  derived and/or modified CDS sequence (opt3) from hemagglutinin__InfluenzaA__AEW25590
augaaggccauccuggugguccuccuuuacaccuucgcuacagcaaacgccgacacucugugcauuggcuaucacgcgaauaacagcacggauaccguugacacaguguuggagaagaauguaacugugacccaguccgucaacuuacuggaagauaagcauaaugggaaacuauguaagcucagaggaguggcuccccugcaccuugguaaaugcaacauagccggcuggauccuggggaauccugagugugaaucuuugucaacagcaaguagcugguccuacauuguugagaccucuucgucagacaacggaacuugcuauccaggcgauuuuaucgacuacgaagaacucagggagcaacugagcaguguguccucuuucgaacgguuugagauuuucccgaagacaagcuccuggcccaaucaugauucaaacaagggugucaccgccgcuuguccucacgcaggggccaaaaguuuuuauaagaaucugaucuggcucgugaaaaagggaaacagcuacccaaaauuaucuaaguccuauauaaaugacaagggcaaagaaguacugguucuuuggggcauccaucaccccucaacgagcgcugaucagcagaguuuguaccagaacgccgacgcguacguguucgucgggacuucucgcuauuccaagaaauuuaagccugagauugcaauccgaccaaaagugcgugaucaagaggccagaaugaauuacuauuggacccugguggaacccggagacaagauuacauucgaggcuacugguaaccuagucguuccuagguacgccuuugcaauggaacgggaugcuggcagcgggaucauaauuucggacaccccagugcacgacugcaacacaaccugucagacgccgaaaggagccaucaauacuucucuccccuuccagaacauucauccuaucacaaucggcaagugcccaaaguauguaaaauccaccaagcugcgccuugcgacuggucugagaaaugugcccucaauucagaguaggggguuguuuggagccauagcaggcuucaucgagggcggguggacaggaauggucgaugguugguacggcuaucaccaucaaaacgaacaggggagcggauacgcugccgaccucaaauccacccagaaugcuauugaugagaucacgaacaagguaaauucuguuauagagaaaaugaacacccaguuuacagccgugggcaaggaguucaaucaccuggagaagcggauugaaaacuuaaauaaaaaggucgacgaugguuuccuggacaucuggacuuacaacgcagagcuccuugugcuguuggaaaaugagcgcacccuagauuaucacgacagcaacgugaaaaaucugcaugagaagguucgaucacaacucaaaaacaacgccaaggaaaucgggaauggcuguuuugaguucuaccacaagugcgauaacacauguauggaaagugugaaaaauggaacuuaugacuacccuaaguauuccgaggaagcuaaacugaacagagaggagauugauggcgucaaacuugaaagcaccaggaucuaccagauucuggcgauauauucuacaguggcaucaaguuugguccucgugguuagccugggggccaucuccuuuuggaugugcucuaauggaucguuacagugccggauuuguaucuga

SEQ ID NO: 135972 - RNA, 1701 nt, Artificial Sequence; identical to SEQ ID NO: 131515
  derived and/or modified CDS sequence (opt3) from hemagglutinin__InfluenzaA__AEW25600

SEQ ID NO: 135973 - RNA, 1701 nt, Artificial Sequence; identical to SEQ ID NO: 131515
  derived and/or modified CDS sequence (opt3) from hemagglutinin__InfluenzaA__AEW25620

SEQ ID NO: 135974 - RNA, 1701 nt, Artificial Sequence
  derived and/or modified CDS sequence (opt3) from hemagglutinin__InfluenzaA__AEW25629
augaaggccauccuggugguccuccuuuacaccuucgcuacagcaaacgccgacacucugugcauuggcuaucacgcgaauaacagcacggauaccguugacacaguguuggagaaaaauguaacugugacccauuccgucaacuuacuggaagauaagcacaaugggaaacuauguaagcucagaggaguggcuccccugcaucuugguaaaugcaacauagccggcuggauccuggggaauccugagugugaaucuuugucaacagcaaguagcugguccuacauuguugagaccucuucgucagacaacggaacuugcuauccaggcgauuuuaucgacuacgaagaacucagggagcagcugagcaguguguccucuuucgaacgguuugagauuuucccgaagacaagcuccuggcccaaucacgauccuaacaagggugucaccgccgcuuguccacaugcagaagccaaaucauuuuauaagaaucugaucuggcucgugaaaaaggggaacaguuaccccaaauuaagcaagucuuauauaaaugacaagggaaaagagguacugguucuuuggggcauccaccacccuuccacgucagcugaucaacagagcuuguaccagaacgccgacgcguacguguucgucggcaccagucgcuauucuaagaaauuuaagccagagauugcaauccgacccaaagugcgugaucaggaagggagaaugaauuacuauuggacucugguggagccuggagacaagauuacauucgaagccacugguaaccuagucguuccaagguacgcuuuugccauggagcggaacgcaggcuccgggaucauaauuagcgauaccccggugcaugacugcaauacaaccugucaaacgcccaaaggagcuaucaacacuucgcucccuuuccagaauauucacccaaucacaaucggcaagugccccaaguauguaaaaucuaccaagcugcgccuugccacuggucugagaaacgugccuuccauucagucaaggggguuguuuggagcgauagccggcuucaucgaaggcggguggacaggaauggucgacgguugguacggcuaucaucaccagaaugagcaagggaguggauacgcagcugaucucaaaagcacccagaacgccauugacgagaucacgaauaaggugaacuccguuauagaaaagaugaauacccaguuuacagcugugggcaaggaguucaaccaccuggaaaagcggauugagaauuuaaacaaaaaggucgaugacgguuuccuggauaucuggacuuacaaugccgaacuccuugugcuguuggagaacgagcgcacccuagacuaucaugauucuaauguuaaaaaccuguacgaaaagguacgaagccagcucaaaaacaaugcaaaggagaucgggaacggcuguuuugaguucuaucacaagugcgacaauauguguauggagucagugaaaaacggaacauacgauuauccaaaguacagugaagaggccaaacugaauagagaggaaauugacggcgucaaacuugaguccacuaggaucuaucaaauucuggcuauauacagcaccguggcgucuucauugguccucgugguuagucugggggcaaucagcuuuuggaugugcuccaacggaucuuuacagugccggauuuguaucuga

SEQ ID NO: 135975 - RNA, 1701 nt, Artificial Sequence; identical to SEQ ID NO: 130717
  derived and/or modified CDS sequence (opt3) from hemagglutinin__InfluenzaA__AEW25637

SEQ ID NO: 135976 - RNA, 1701 nt, Artificial Sequence
  derived and/or modified CDS sequence (opt3) from hemagglutinin__InfluenzaA__AEW25646
augaaggccauccuggugguccuccuuuacaccuucgcuacagcaaacgccgacacucugugcauuggcuaucacgcgaauaacagcacggauaccguugacacaguguuggagaaaaauguaacugugacccauuccgucaacuuacuggaagauaagcacaaugggaaacuauguaagcucagaggaguggcuccccugcaucuugguaaaugcaacauagccggcuggauccuggggaauccugagugugaaucuuugucaacagcaaguagcugguccuacauuguugagaccucuucgucagacaacggaacuugcuauccaggcgauuuuaucgacuacgaggagcucagggagcagcugagcaguguguccucuuucgaacgguuugagauuuucccgaagacaagcuccuggcccaaucacgauccuaacaagggugucaccgccgcuuguccacaugcaggggccaaaucauuuuauaagaaucugaucuggcucgugaaaaagggaaacaguuaccccaaauuaagcaagucuuauauaaaugacaagggcaaagaaguacugguucuuuggggcauccaccacccuuccacgucagcugaucaacagagcuuguaccagaacgccgacgcguacguguucgucgggaccagucgcuauucuaagaaauuuaagccagagauugcaauccgacccaaagugcgugaucaggagggaagaaugaauuacuauuggacucugguggaaccuggugacaagauuacauucgaggccacuggcaaccuagucguuccaagguacgcuuuugccauggaacggaacgcaggguccggaaucauaauuagcgauaccccggugcaugacugcaauacaaccugucaaacgcccaaaggcgcuaucaacacuucgcucccuuuccagaauauucacccaaucacaaucgguaagugccccaaguauguaaaaucuaccaagcugcgccuugccacugggcugagaaacgugccuuccauucagucaaggggauuguuuggcgcgauagccggcuucaucgaagggggauggacagguauggucgacggcugguacggguaucaucaccagaaugaacaaggaaguggcuacgcagcugaucucaaaagcacccagaacgccauugacaagaucacgaauaaagugaacuccguuauagagaagaugaauacccaguuuacagcuguggguaaggaguucaaccaccuggaaaaacggauugagaauuuaaacaagaaagucgaugacggguuccuggauaucuggacuuacaaugccgaacuccuugugcuguuggagaacgaacgcacccuagacuaucaugauucuaauguaaagaaccuguacgagaaaguucgaagccagcucaagaacaaugcaaaggagaucggcaacggauguuuugaguucuaucacaaaugcgacaauacauguauggaaucagugaagaacggcacuuacgauuauccaaaauacagugaagaggccaagcugaauagagaagagauugacggggucaaacuugaguccaccaggaucuaucaaauucuggcuauauacagcacaguggcgucuucauugguccucgugguuagucugggagcaaucagcuuuuggaugugcuccaacgguucuuuacagugccggauuuguaucuga

SEQ ID NO: 135977 - RNA, 1701 nt, Artificial Sequence
  derived and/or modified CDS sequence (opt3) from hemagglutinin__InfluenzaA__AEW25654
augaaggccauccuggugguccuccuuuacaccuucgcuacagcaaacgccgacacucugugcauuggcuaucacgcgaauaacagcacggauaccguugacacaguguuggagaaaaauguaacugugacccauuccgucaacuuacuggaagauaagcacaaugggaaacuauguaagcucagaggaguggcuccccugcaucuugguaaaugcaacauagccggcuggauccuggggaauccugagugugaaucuuugucaacagcaaguagcugguccuacauuguugagaccucuucgucagacaacggaacuugcuauccaggcgauuuuaucgacuacgaggagcucagggagcagcugagcaguguguccucuuucgaacgguuugagauuuucccgaagacaagcuccuggcccaaucacgauucaaacaagggugucaccgccgcuuguccucaugcaggggccaaaaguuuuuauaagaaucugaucuggcucgugaaaaagggaaacagcuacccaaaauuaucuaaguccuauauaaaugacaagggcaaagaaguacugguucuuuggggcauccaccaccccucaacgagcgcugaucaacagaguuuguaccagaacgccgacgcguacguguucgucgggacuucucgcuauuccaagaaauuuaagccugagauugcaauccgaccaaaagugcgugaucaggagggaagaaugaauuacuauuggacccugguggaacccggugacaagauuacauucgaggccacuggcaaccuagucguuccuagguacgcuuuugccauggaacggaacgcagggagcggaaucauaauuucggauaccccagugcaugacugcaauacaaccugucaaacgccgaaaggcgcuaucaacacuucucccccuuuccagaauauucacccaaucacaaucgguaagugccccaaguauguaaaauccaccaagcuccgccuggccacugggcuuagaaacauuccuucaauacagaguaggggacuguuuggcgcgaucgccggcuucauugaagggggauggacagguaugguggacggcugguacggguaucaucaccagaaugaacaaggaagcggcuacgcagcugauuugaaauccacccagaacgccaucgacgagauaacgaauaaggucaacucugugauugagaaaaugaauacccaguuuacagcuguugguaaggaguucaaccaccucgaaaagcggaucgaaaaucugaacaaaaagguggaugacggguucuuagauaucuggacuuacaaugccgagcugcucguccuucuggaaaacgagcgcaccuuggacuaucaugauagcaaugugaaaaaccuauacgagaagguacgaucacagcugaaaaacaaugcaaaggaaauuggcaacggauguuuugaguucuaucacaagugcgacaauacauguauggaaaguguuaaaaacggcacuuacgauuauccaaaguacuccgaggaagccaaacucaauagagaggagaucgacggggugaagcuggaaagcaccaggauuuaucaaauacuugcuaucuacucuacagucgcgucaagucugguguuggucgugagccucggagcaauuuccuuuuggaugugcucuaacgguucgcugcagugccggaucuguaucuga

SEQ ID NO: 135978 - RNA, 1701 nt, Artificial Sequence
  derived and/or modified CDS sequence (opt3) from hemagglutinin__InfluenzaA__AEW25662
augaaggccauccuggugguccuccuuuacaccuucgcuacagcaaacgccgacacucugugcauuggcuaucacgcgaauaacagcacggauaccguugacacaguguuggagaagaauguaacugugacccauuccgucaacuuacuggaagauaagcacaaugggaaacuauguaagcucagaggaguggcuccccugcaucuugguaaaugcaacauagccggcuggauccuggggaauccugagugugaaucuuugucaacagcaaguagcugguccuacauuguugagaccucuucgucagacaacggaacuugcuauccaggcgauuuuaucgacuacgaggagcucagggagcagcugagcaguguguccucuuucgaacgguuugagauuuucccgaagacaagcuccuggcccaaucacgauccuaacaaggguaucaccgccgcuuguccacaugcaggggccaaaucauuuuauaagaaucugauauggcucgucaaaaagggaaacaguuaccccaaauuaagcaagucuuauaucaaugacaagggcaaagaagugcugguacuuuggggcauucaccacccuuccacgucagcugaucaacagagcuuguaccagaacgccgacgcguacguuuucguggggaccagucgcuauucuaagaaauuuaagccagagaucgcaauucgacccaaaguccgugaucaggagggaagaaugaauuacuauuggacucugguggaaccuggugacaagaucacauucgaggccacuggcaaccuaguggucccaagguacgcuuuugccauggaacggaacgcaggguccggaauaauuaucagcgauaccccgguucaugacugcaauacaaccugucaaacgcccaaaggcgcuauuaacacuucgcucccuuuccagaauauccacccaaucacaauugguaagugccccaaguaugugaaaucuaccaagcugcgccuugccacugggcugagaaacguaccuuccauacagucaaggggauuguuuggcgcgaucgccggcuucauugaagggggauggacagguaugguggacggcugguacggguaucaucaccagaaugaacaaggaaguggcuacgcagcugaucucaaaagcacccagaacgccaucgacgagauaacgaauaaggucaacuccgugauugagaaaaugaauacccaguuuacagcuguugguaaggaguucaaccaccuggaaaagcggaucgaaaauuuaaacaaaaagguggaugacggguuccuggauaucuggacuuacaaugccgagcuccuuguccuguuggaaaacgagcgcacccuagacuaucaugauucuaaugugaaaaaccuguacgagaagguacgaagccagcucaaaaacaaugcaaaggaaauuggcaacggauguuuugaguucuaucacaagugcgacaauacauguauggaaucaguuaaaaacggcacuuacgauuauccaaaguacagugaggaagccaaacugaauagagaggagaucgacggggugaaacuugaauccaccaggauuuaucaaauacuggcuaucuacagcacagucgcgucuucauuggugcucgucgugagucugggagcaauuagcuuuuggaugugcuccaacgguucuuuacagugccggaucuguaucuga

SEQ ID NO: 135979 - RNA, 1701 nt, Artificial Sequence
  derived and/or modified CDS sequence (opt3) from hemagglutinin__InfluenzaA__AEW25669
augaaggccauccuggugguccuccuuuacaccuucgcuacagcaaacgccgacacucugugcauuggcuaucacgcgaauaacagcacggauaccguugacacaguguuggagaaaaauguaacugugacccauuccgucaacuuacuggaagauaagcacaaugggaaacuauguaagcucagaggaguggcuccccugcaucuugguaaaugcaacauagccggcuggauccuggggaauccugagugugaaucuuugucaacagcaaguagcugguccuacauuguugagaccucuucgucagacaacggaacuugcuauccaggcgauuuuaucgacuacgaagaacucagggagcagcugagcaguguguccucuuucgaacgguuugagauuuucccgaagacaagcuccuggcccaaucacgauccuaacaagggugucaccgccgcuuguccacaugcaggggccaaaucauuuuauaagaaucugaucuggcucgugaaaaagggaaacaguuaccccaaauuaagcaagucuuauauaaaugacaagggcaaagaaguacugguucuuuggggcauccaccacccuuccacgucagcugaucaacagagcuuguaccagaacgccgacgcguacguguucgucgggaccagucgcuauucuaagaaauuuaagccagagauugcaauccgacccaaagugcgugaucaggagggaagaaugaauuacuauuggacucugguggaaccuggugacaagauuacauucgaggccacuggcaaccuagucguuccaagguacgcuuuugccauggaacggaacgcaggguccggaaucauaauuagcgauaccccggugcaugacugcaauacaaccugucaaacgcccaaaggcgcuaucaacacuucgcucccuuuccagaauauucacccaaucacaaucgguaagugccccaaguauguaaaaucuaccaagcugcgccuugccacugggcugagaaacgugccuuccauucagucaaggggauuguuuggcgcgauagccggcuucaucgaagggggauggacagguauggucgaaggcugguacggguaucaucaccagaaugagcaaggaaguggcuacgcagcugaccucaaaagcacccagaacgccauugaugagaucacgaauaaggugaacuccguuauagagaaaaugaauacccaguuuacagcuguggguaaggaguucaaccaccuggaaaagcggauugagaauuuaaacaaaaaggucgacgauggguuccuggacaucuggacuuacaaugccgaacuccuugugcuguuggagaacgagcgcacccuagauuaucaugacucuaauguaaagaaccuguacgaaaagguucgaagccagcucaaaaacaaugcaaaggagaucggcaacggauguuuugaguucuaucacaagugcgauaauacauguauggagucagugaaaaacggcacuuacgacuauccaaaguacagugaagaggccaaacugaauagagaggaaauugauggggucaaacuugaguccaccaggaucuaucaaauucuggcuauauacagcacaguggcgucuucauugguccucgugguuagucugggagcaaucagcuuuuggaugugcuccaacgguucuuuacagugccggauuuguaucuga

SEQ ID NO: 135980 - RNA, 1701 nt, Artificial Sequence
  derived and/or modified CDS sequence (opt3) from hemagglutinin__InfluenzaA__AEW25678
augaaggccauccuggugguccuccuuuacaccuucgcuacagcaaacgccgacacucugugcauuggcuaucacgcgaauaacagcacggauaccguugacacaguguuggagaaaaauguaacugugacccauuccgucaacuuacuggaagauaagcacaaugggaaacuauguaagcucagaggaguggcuccccugcaucuugguaaaugcaacauagccggcuggauccuggggaauccugagugugaaucuuugucaacagcaaguagcugguccuacauuguugagaccucuucgucagacaacggaacuugcuauccaggcgauuuuaucgacuacgaggagcucagggagcagcugagcaguguguccucuuucgaaaaguuugagauuuucccgaagacaagcuccuggcccaaucacgauucaaacaaaggugucaccgccgcuuguccucaugcaggggccaagaguuuuuauaaaaaucugaucuggcucgugaagaaaggaaacagcuacccaaaguuaucuaaguccuauauaaaugacaaaggcaaggaaguacugguucuuuggggcauccaccaccccucaacgagcgcugaucaacagaguuuguaccagaacgccgacgcguacguguucgucgggacuucucgguauuccaaaaaguuuaaaccugagauugcaauccgcccaaaggugcgagaucaggagggacguaugaauuacuauuggacccugguggaacccggugacaaaauuacauucgaggccacuggcaaccuagucguuccuagauacgcuuuugccauggaaaggaacgcagggagcggaaucauaauuucggauaccccagugcaugacugcaauacaaccugucaaacgccgaagggcgcuaucaacacuucucuccccuuccagaauauucacccuaucacaaucgguaagugcccaaaauauguaaaguccaccaaacugcggcuugccacugggcugcgcaacgugcccucaauucagaguagaggauuguuuggcgcgauagccggcuucaucgaagggggauggacagguauggucgacggcugguacggguaucaucaccagaaugaacaaggaagcggcuacgcagcugaucucaaguccacccagaacgccauugacgagaucacgaauaaagugaacucuguuauagagaagaugaauacccaguuuacagcuguggguaaggaauuuaaccaccuggagaaaaggauugaaaauuuaaacaagaaagucgaugacggguuccuggauaucuggacuuacaaugccgagcuccuugugcuguuggaaaacgagcggacccuagacuaucaugauagcaauguaaagaaccuguacgagaaaguucgcucacagcucaagaacaaugcaaaggaaaucggcaacggauguuucgaguucuaucacaaaugcgacaauacauguauggaaagugugaagaacggcacuuacgauuauccuaaauacuccgaggaagccaagcugaaucgagaggagauugacggggucaaacuugaaagcaccagaaucuaucaaauucuggcuauauacucuacaguggcgucaaguuugguccucgugguuagccugagggcaaucuccuuuuggaugugcucuaacggaucguuacagugccggauuuguaucuga

SEQ ID NO: 135981 - RNA, 1701 nt, Artificial Sequence
  derived and/or modified CDS sequence (opt3) from hemagglutinin__InfluenzaA__AEW25687
augaaggccauccuggugguccuccuuuacaccuucgcuacagcaaacgccgacacucugugcauuggcuaucacgcgaauaacagcacggauaccguugacacaguguuggagaaaaauguaacugugacccauuccgucaacuuacuggaagauaagcacaaugggaaacuauguaagcucagaggaguggcuccccugcaucuugguaaaugcaacauagccggcuggauccuggggaauccugagugugaaucuuugucaacagcaaguagcugguccuacauuguugagaccucuucgucagacaacggaacuugcuauccaggcgauuuuaucgacuacgaggagcucagggagcagcugagcaguguguccucuuucgaacgguuugagauuuucccgaagacaagcuccuggcccaaucacgauccuaacaagggugucaccgccgcuuguccauaugcaggggccaaaucauuuuacaagaaucugaucuggcucgugaaaaagggaaacaguuaucccaaauuaagcaagucuuacauaaaugacaagggcaaagaaguacugguucuuuggggcauccaucacccuuccacgucagcugaucaacagagcuuguaccagaacgccgacgcguauguguucgucgggaccagucgcuacucuaagaaauuuaagccagagauugcaauccgacccaaagugcgugaucaggagggaagaaugaauuauuacuggacucugguggaaccuggugacaagauuacauucgaggccacuggcaaccuagucguuccaagguaugcuuuugccauggaacggaacgcaggguccggaaucauaauuagcgauaccccggugcacgacugcaauacaaccugucaaacgcccaaaggcgcuaucaacacuucgcucccuuuccagaauauucauccaaucacaaucgguaagugccccaaguacguaaaaucuaccaagcugcgccuugccacugggcugagaaacgugccuuccauucagucaaggggauuguuuggcgcgauagccggcuucaucgaagggggauggacagguauggucgacggcugguauggguaccaccaucagaaugaacaaggaaguggcuacgcagcugaucucaaaagcacccagaacgccauugacaagaucacgaauaaagugaacuccguuauagagaagaugaauacccaguuuacagcuguggguaaggaguucaaccaccuggaaaaacggauugagaauuuaaacaagaaagucgaugacggguuccuggauaucuggacuuauaaugccgaacuccuugugcuguuggagaacgaacgcacccuagacuaccacgauucuaauguaaagaaccuguaugagaaaguucgaagccagcucaagaacaaugcaaaggagaucggcaacggauguuuugaguucuaccauaaaugcgacaauacauguauggaaucagugaagaacggcacuuaugauuacccaaaauauagugaagaggccaagcugaauagagaagagauugacggggucaaacuugaguccaccaggaucuaccaaauucuggcuauauacagcacaguggcgucuucauugguccucgugguuagucugggagcaaucagcuuuuggaugugcuccaacgguucuuuacagugccggauuuguaucuga

SEQ ID NO: 135982 - RNA, 1701 nt, Artificial Sequence; identical to SEQ ID NO: 135951
  derived and/or modified CDS sequence (opt3) from hemagglutinin__InfluenzaA__AEW25696

SEQ ID NO: 135983 - RNA, 1701 nt, Artificial Sequence; identical to SEQ ID NO: 131515
  derived and/or modified CDS sequence (opt3) from hemagglutinin__InfluenzaA__AEW25706

SEQ ID NO: 135984 - RNA, 1695 nt, Artificial Sequence
  derived and/or modified CDS sequence (opt3) from hemagglutinin__InfluenzaA__AEW91908
auggagaagaucgugcuucucuucgccaccauuagccuugucaaauccgaccacauaugcaucggcuaccaugcuaacaauucuacagaacagguugauacuauuauggagaagaacgugacgguaacccacgcacaagacauccuggaaaagacacauaaugggaaguugugugauuuaaacggagugaaaccccugauucuaaaggacugcucagucgccgguuggcuccugggcaauccuaugugugaugaguuuaucaacgugccagaauggaguuauauaguugagaaggcgaauccggcuaacgaccuuugcuaccccgggaauuucaacgauuaugaggaacugaaacacuugcucagcagaaucaaucauuuugagaagauucagaucauuccuaaaaacuccuggucugaccacgaagccucgcugggagugucagcagccuguccauaccagggcaagagcaguuucuuuaggaaugucguguggcugaucaaaaaggauaacgcuuaucccacuauaaagaaagguuacaauaacaccaaccaggaggaccucuuaguacugugggggauucaccauccuaaugaugaggcagaacaaacacggcuuuaucagaacccaaccacuuacaucuccauuggaacaucuaccuugaaucagcgccugguucccaagaucgccacgcgaagcaaaaucaacggccaguccggccguauugacuucuuuuggacuauacuaaagccuaaugaugcuauccacuucgagucaaacgggaauuuuauugccccagaauacgcguauaaaaucgugaagaaaggagacaguaccauaaugaaaagcgaggucgaauacgguaacugcaauacaagaugucaaacuccgauuggcgcaaucaacucuuccaugcccuuccauaauauccacccucucaccauuggggagugcccaaaguaugugaaaucaaacaagcuggugcuugccacaggacugaggaauagcccccagggcgagacccgggguuuguuuggggcuaucgccggauucauugaaggcggcuggcaggggauggucgacggaugguacgguuaucaccauaguaacgagcagggcucuggguacgcagcugauaaagaauccacgcaaaaggccauagacggaguuacuaauaaagugaacagcaucauugauaagaugaacacacaguuugaggcgguaggccgcgaguucaauaaccucgaaagaaggaucgagaaucugaacaagaaaauggaagacgguuucuuagauguguggaccuauaaugccgagcugcucguccuuauggaaaacgagcggacucuggacuuucacgauucgaaugugcgcaacuuguacgacaagguucgacuacagcugaaagauaaugcaaaggaacucgggaacggcuguuucgaguuuuaccauaaaugcgacaaugaguguauggaaucugugagaaacggaacauaugauuacccucaauauuccgaggaagcuaggcugaagcgggaggagaucucaggcgucaagcuggaaaguauugggauauaccagauccugagcauuuauuccaccguggccucuagcuugguacucgcuaucaugauggccggacugucauuauggaugugcaguaaugguucccugcagugccguauuuguaucuga

SEQ ID NO: 135985 - RNA, 1701 nt, Artificial Sequence
  derived and/or modified CDS sequence (opt3) from hemagglutinin__InfluenzaA__AEX09175
augaaggccauccuggugguccuccuuuacaccuucgcuacagcaaacgccgacacucugugcauuggcuaucacgcgaauaacagcacggauaccguugacacaguguuggagaaaaauguagcugugacucauuccgucaacuuacuggaagauaagcacaaugggaaacuauguaagcucagaggaguggcaccccugcaucuugguaaaugcaacauagccggcuggauccuggggaauccugagugugaaucuuugucaaccgccaguagcugguccuacauuguugagacaucuucgucagacaacggaaccugcuauccaggcgauuuuaucgacuacgaggagcucagggagcagcugagcaguguguccucuuucgaacgguuugagauuuucccgaagacuagcuccuggcccaaucacgauucaaacaagggugucacagcugcauguccucaugccggggcuaaaaguuuuuauaagaaucugaucuggcucgugaaaaagggaaacagcuacccaaaauuaucuaaguccuauauaaaugacaagggcaaagaaguacugguucuuuggggcauccaccaccccucaaccagcgccgaucaacagaguuuguaccagaacgcggacgcauacguguucgucgggacgucucgcuauuccaagaaauuuaagccugagauugccauccgaccaaaagugcgugauagagagggaaggaugaauuacuauuggacucugguggaacccggugacaagauuaccuucgaggcuacaggcaaccuagucguuccucgguacgccuuugcaauggaacgcaacgcugggagcggaaucauaauuucggauacuccagugcaugacugcaauaccacaugucagaccccgaaaggcgccaucaacacgucucuccccuuccaaaauauucacccuaucacuaucgguaagugcccaaaguauguaaaauccacaaagcugagacuugcgaccgggcugaggaacgugcccucaauucagagucggggauuguuuggcgccauagcaggcuucaucgaagggggauggacugguauggucgacggcugguacggguaucaucaccagaaugaacagggaagcggcuacgcugccgaucucaaauccacacaaaacgcuauugacgagaucaccaauaaggugaacucuguuauagagaaaaugaauacgcaguuuaccgccguggguaaggaguucaaccaccuggaaaagcgcauugaaaauuuaaacaaaaaggucgaugacggguuccuggauaucuggacauacaaugcagagcuccuugugcuguuggaaaacgagcgaacucuagacuaucaugauagcaauguaaagaaccuguacgagaagguuagaucacagcucaaaaacaaugccaaggaaaucggcaacggauguuuugaguucuaucacaagugcgacaauaccuguauggaaagugugaaaaacggcacauacgauuauccuaaguacuccgaggaagcuaaacugaauagggaggagauugacggggucaaacuugaaagcacucggaucuaucagauucuggcgauauacucuaccguggcaucaaguuugguccucgugguuagccugggagccaucuccuuuuggaugugcucuaacgguucguuacaaugccguauuuguaucuga

SEQ ID NO: 135986 - RNA, 1701 nt, Artificial Sequence; identical to SEQ ID NO: 130717
  derived and/or modified CDS sequence (opt3) from hemagglutinin__InfluenzaA__AEX25795

SEQ ID NO: 135987 - RNA, 1701 nt, Artificial Sequence
  derived and/or modified CDS sequence (opt3) from hemagglutinin__InfluenzaA__AEX25797
auggaggccauccuggugguccuccuuuacaccuucgcuacagcaaacgccgacacucugugcauuggcuaucacgcgaauaacagcacggauaccguugacacaguguuggaaaagaauguaacugugacccauuccgucaacuuacuggaggauaaacacaaugggaagcuauguaaacucagaggaguggcuccccugcaucuugguaagugcaacauagccggcuggauccuggggaauccugaaugugagucuuugucaacagcaaguagcugguccuacauuguugaaaccucuaacucggacaauggaacuugcuauccaggcgauuuuaucgacuacgaggagcucagggaacagcugucaagcgugaguuccuucgagcgguuugaaauuuucccgaaaacaucuagcuggcccaaccacgauuccaauaagggugucaccgccgcuuguccucaugcaggggccaagucauuuuauaaaaaccugaucuggcucgugaagaaaggaaauaguuacccaaaguuaagcaaaucuuauauaaacgacaagggcaaggagguacugguucuuuggggcauccaccaccccuccacgucagcugaucaacagagcuuguaccagaaugccgacgcguacguguucgucgggaguucucgcuauuccaaaaaguuuaaaccugagauugcaauccgaccaaaggugcgugaucaggaaggaagaaugaacuacuauuggacucugguggagcccggugacaaaauuaccuucgaagccacaggcaaccuagucguuccuagguacgcuuuugccauggagcggaaugcagggagcggaaucauaauuucggauacuccagugcaugacugcaacaccacaugucaaaccccgaagggcgcuaucaauacgucucuccccuuccacaacauucauccuaucacuaucgguaaaugcccaaaguauguaaaguccacaaaacugcgccuugccaccgggcugagaaaugugcccucaauucagaguaggggauuguuuggcgcgauagccggcuucaucgaagggggauggacugguauggucgacggcugguacggguaucaccaccagaacgagcagggaagcggcuacgcagcugaucucaaguccacacaaaaugccauugacgagaucaccaacaaaguuaauucugugauagaaaagaugaacacgcaguuuaccgcuguggguaaagaguucaaucaucuggaaaagcggauugagaacuuaaauaagaaagucgaugacggguuccuggauaucuggacauacaacgccgaacuccuugugcuguuggagaaugagcgcacucuagacuaucacgauagcaacguaaagaaccuguacgaaaaaguucgaucacagcucaagaauaacgcaaaagagaucggcaauggauguuuugaguucuaucauaagugcgacaacaccuguauggaaagugugaagaauggcacauacgauuauccuaaauacuccgaagaggccaagcugaacagagaggaaauugacggggucaaacuugagagcacuaggaucuaucagauucuggcuauauacucuaccguggcgucaaguuugguccucgugguuagccugggagcaaucuccuuuuggaugugcucuaaugguucguuacaaugccggauuuguaucuga

SEQ ID NO: 135988 - RNA, 1701 nt, Artificial Sequence
  derived and/or modified CDS sequence (opt3) from hemagglutinin__InfluenzaA__AEX25798
augaaggccauccuggugguccuccuuuacaccuucgcuacagcaaacgccgacacucugugcauuggcuaucacgcgaauaacagcacggauaccguugacacaguguuggagaagaauguaacugugacccauuccgucaacuuacuggaagauaagcacaaugggaaacuauguaagcucagaggaguggcuccccugcaucuugguaaaugcaacauagccggcuggauccuggggaauccugagugugaaucuuugucaacagcaaguagcugguccuacauuguugagaccucuucgucagacaacggaacuugcuauccaggcgauuuuaucaauuacgaggagcucagggagcagcugagcaguguguccucuuucgaacgguuugagauuuucccgaagacaagcuccuggcccaaccacgacucaaauaagggugucaccgccgcuuguccucaugcaggggccaaaaguuuuuauaagaaccugaucuggcucgugaaaaagggaaauagcuacccaaaauuaucuaaguccuauauaaacgauaagggcaaagaaguacugguucuuuggggcauccaccaccccucaacgagcgcugaccaacagaguuuguaccagaaugccgaugcguacguguucgucgggacuucucgcuauuccaagaaauuuaagccugagauugcaauccgaccaaaagugcgugaccaggagggaagaaugaacuacuauuggacccugguggaacccggugauaagauuacauucgaggccacuggcaaccuagucguuccuagguacgcuuuugccauggaacggaaugcagggagcggaaucauaauuucggacaccccagugcaugauugcaacacaaccugucaaacgccgaaaggcgcuaucaauacuucucuccccuuccacaacauucauccuaucacaaucgguaagugcccaaaguauguaaaauccaccaagcugcgccuugccacugggcugagaaaugugcccucaauucagaguaggggauuguuuggcgcgauagccggcuucaucgaagggggauggacagguauggucgacggcugguacggguaucaccaccagaacgaacagggaagcggcuacgcagcugaccucaaauccacccaaaaugccauugaugagaucacgaacaagguaaauucuguuauagagaaaaugaacacccaguuuacagcuguggguaaggaguucaaucaucuggaaaagcggauugaaaacuuaaauaaaaaggucgacgauggguuccuggacaucuggacuuacaacgccgagcuccuugugcuguuggaaaaugagcgcacccuagauuaucacgacagcaacgugaaaaaccuguacgagaagguucgaucacagcucaaaaauaacgcaaaggaaaucggcaauggauguuuugaguucuaucauaagugcgauaacacauguauggaaagugugaaaaauggcacuuacgacuauccuaaguacuccgaggaagccaaacugaacagagaggagauugauggggucaaacuugaaagcaccaggaucuaucagauucuggcuauauacucuacaguggcgucaaguuugguccucgugguuagccugggagcaaucuccuuuuggaugugcucuaaugguucguuacaaugccggauuuguaucuga

SEQ ID NO: 135989 - RNA, 1701 nt, Artificial Sequence; identical to SEQ ID NO: 130717
  derived and/or modified CDS sequence (opt3) from hemagglutinin__InfluenzaA__AEX25800

SEQ ID NO: 135990 - RNA, 1701 nt, Artificial Sequence; identical to SEQ ID NO: 130717
  derived and/or modified CDS sequence (opt3) from hemagglutinin__InfluenzaA__AEX25803

SEQ ID NO: 135991 - RNA, 1701 nt, Artificial Sequence; identical to SEQ ID NO: 130959
  derived and/or modified CDS sequence (opt3) from hemagglutinin__InfluenzaA__AEX25808

SEQ ID NO: 135992 - RNA, 1701 nt, Artificial Sequence; identical to SEQ ID NO: 133687
  derived and/or modified CDS sequence (opt3) from hemagglutinin__InfluenzaA__AEX25810

SEQ ID NO: 135993 - RNA, 1701 nt, Artificial Sequence
  derived and/or modified CDS sequence (opt3) from hemagglutinin__InfluenzaA__AEX25811
auggaggccauccuggugguccuccuuuacaccuucgcuacagcaaacgccgacacucugugcauuggcuaucacgcgaauaacagcacggauaccguugacacaguguuggaaaagaauguaacugugacccauuccgucaacuuacuggaggauaaacacaaugggaagcuauguaaacucagaggaguggcuccccugcaucuugguaagugcaacauagccggcuggauccuggggaauccugaaugugagucuuuguuuacagcaucaaguuggagcuacauuguugaaaccuccucuucggacaacggaacuugcuauccaggcgauuucaucgacuacgaggagcucagggaacagcugucaagcgugaguuccuuugagcgguucgaaauuuuuccgaaaacaucuagcuggcccaaucacgauuccaacaagggugucaccgccgcuuguccucaugcaggggccaagucauucuauaaaaaucugaucuggcucgugaagaaaggaaacaguuacccaaaguuaagcaaaucuuauauaaaugacaagggcaaggagguacugguucuuuggggcauccaccaccccuccacgucagcugaucaacagagcuuguaccagaacgccgacgcguacguguuugucgggaguucucgcuauuccaaaaaguucaaaccugagauugcaauccgaccaaaggugcgugaucaggaaggaagaaugaauuacuauuggacucugguggagcccggugacaaaauuaccuuugaagccacaggcaaccuagucguuccuagguacgcuuucgccauggagcggaaggcagggagcggaaucauaauuucggauacuccagugcaugacugcaacaccacaugucaaaccccgaaaggcgcuaucaauacgucucuccccuuucacaacauucauccuaucacuaucgguaagugcccaaaguauguaaaauccacaaagcugcgccuugccaccgggcugagaaaugugcccucaauucagaguaggggauuguucggcgcgauagccggcuuuaucgaagggggauggacugguauggucgacggcugguacggguaucaccaccagaacgagcagggaagcggcuacgcagcugaucucaaauccacacaaaaugccauugacgagaucaccaacaagguaaauucuguuauagaaaagaugaacacgcaguucaccgcuguggguaaggaguucaaucaucuggaaaagcggauugagaacuuaaauaaaaaggucgaugacggguuucuggauaucuggacauacaacgccgaacuccuugugcuguuggagaaugagcgcacucuagacuaucacgauagcaacgugaaaaaucuguacgaaaagguucgaucacagcucaaaaacaacgcaaaggagaucggcaauggauguuucgaauuuuaucauaagugcgacaacaccuguauggagagugugaaaaauggcacauacgauuauccuaaguacuccgaagaggccaaacugaacagagaggaaauugacggggucaaacuugagagcacuaggaucuaucagauucuggcuauauacucuaccguggcgucaaguuugguccucgugguuagccugggagcaaucuccuucuggaugugcucuaaugguucguuacaaugccggauuuguaucuga

SEQ ID NO: 135994 - RNA, 1701 nt, Artificial Sequence; identical to SEQ ID NO: 133687
  derived and/or modified CDS sequence (opt3) from hemagglutinin__InfluenzaA__AEX25814

SEQ ID NO: 135995 - RNA, 1701 nt, Artificial Sequence
  derived and/or modified CDS sequence (opt3) from hemagglutinin__InfluenzaA__AEX25816
augaaggccauccuggugguccuccuuuacaccuucgcuacagcaaacgccgacacucugugcauuggcuaucacgcgaauaacagcacggauaccguugacacaguguuggagaaaaauguaacugugacccauuccgucaacuuacuggaagauaagcacaaugggaaacuauguaagcucagaggaguggcuccccugcaucuugguaaaugcaacauagccggcuggauccuggggaauccugagugugaaucuuugucaacagcaaacaguuggagcuacauuguugagaccuccucuucggacaauggaacuugcuauccaggcgauuuuaucaacuacgaggagcucagggagcagcugucaagcgugaguuccuucgaacgguuugagauuuucccgaagacaucuagcuggcccaaucacgacuccaacaagggugucaccgccgcuuguccucaugcaggggccaaaucauuuuauaagaaucugaucuggcucgugaaaaagggaaacaguuacccaaaauuaagcaagucuuauauaaaugauaagggcaaagaaguacugguucuuuggggcauccaccaccccuccacgucagcugaccaacagagcuuguaccagaacgccgaugcguacguguucgucgggaccagucgcuauucuaagaaauuuaagccugagauugcaauccgaccaaaagugcgugaccaggagggaagaaugaacuacuauuggacucugguggaacccggugauaagauuacauucgaggccacuggcaaucuagucguuccuagguacgcuuuugccauggaacggaacgcaggguccggaaucauaauuagcgacaccccagugcaugauugcaauacaaccugucaaacgccgaaaggcgcuaucaacacuucgcuccccuuccagaauauucacccuaucacaaucgguaagugcccaaaguauguaaaaucuaccaagcugcgccuugccacugggcugagaaacgugcccuccauucagucaaggggauuguuuggcgcgauagccggcuucaucgaagggggauggacagguauggucgacggcugguacggguaucaucaccagaaugaacaaggaaguggcuacgcagcugaccucaaaagcacccagaacgccauugaugagaucacgaauaaggugaacuccguuauagagaaaaugaauacccaguuuacagcuguggguaaggaguucaaccaccuggaaaagcggauugaaaauuuaaacaaaaaggucgacgauggguuccuggacaucuggacuuacaaugccgagcuccuugugcuguuggaaaacgagcgcacccuagauuaucaugacucuaacguaaagaaucuguacgagaagguucgaagccagcucaaaaacaaugcaaaggaaaucggcaacggauguuuugaguucuaucacaagugcgauaauacauguauggaaucagugaaaaacggcacuuacgacuauccuaaguacagugaggaagccaaacugaauagagaggagauugauggggucaaacuugaauccaccaggaucuaucaaauucuggcuauauacagcacaguggcgucuucauugguccucgugguuagucugggagcaaucagcuuuuggaugugcuccaacgguucuuuacagugccggauuuguaucuga

SEQ ID NO: 135996 - RNA, 1701 nt, Artificial Sequence
  derived and/or modified CDS sequence (opt3) from hemagglutinin__InfluenzaA__AEX25818
auggaggccauccuggugguccuccuuuacaccuucgcuacagcaaacgccgacacucugugcauuggcuaucacgcgaauaacagcacggauaccguugacacaguguuggaaaagaauguaacugugacccauuccgucaacuuacuggaggauaaacacaaugggaagcuauguaaacucagaggaguggcuccccugcaucuugguaagugcaacauagccggcuggauccuggggaauccugaaugugagucuuugucaacagcaaguagcugguccuacauuguugaaaccucuaacucggacaauggaacuugcuauccaggcgauuuuaucgacuacgaggagcucagggaacagcugucaagcgugaguuccuucgagcgguuugaaauuuucccgaaaacaucuagcuggcccaaccacgauuccaauaagggugucaccgccgcuuguccucaugcaggggccaagucauuuuauaaaaaccugaucuggcucgugaagaaaggaaauaguuacccaaaguuaagcaaaucuuauauaaacgacaagggcaaggagguacugguucuuuggggcauccaccaccaauccacgucagcugaucagcagagcuuguaccagaaugccgacgcguacguguucgucgggaguucucgcuauuccaaaaaguuuaaacccgagauugcaauccgaccuaaggugcgugaucaagaaggaagaaugaacuacuauuggacucugguggagccaggugacaaaauuaccuucgaagccacaggcaaccuagucguucccagguacgcuuuugccauggagcggaaugcagggagcggaaucauaauuucggauacuccugugcaugacugcaacaccacaugucagaccccaaagggcgcuaucaauacgucucucccguuccacaacauucaucccaucacuaucgguaaaugcccuaaguauguaaaguccacaaaacugcgccuugccaccgggcugagaaaugugccaucaauucagaguaggggauuguuuggcgcgauagccggcuucaucgaagggggauggacugguauggucgacggcugguacggguaucaccaccagaacgagcaaggaagcggcuacgcagcugaucucaaguccacacagaaugccauugacgagaucaccaacaaaguuaauucugugauagaaaagaugaacacgcaguuuaccgcuguggguaaagaguucaaucaucuggaaaagcggauugagaacuuaaauaagaaagucgaugacggguuccuggauaucuggacauacaacgccgaacuccuugugcuguuggagaaugagcgcacucuagacuaucacgauagcaacguaaagaaccuguacgaaaaaguucgaucacagcucaagaauaacgcaaaagagaucggcaauggauguuuugaguucuaucauaagugcgacaacaccuguauggaaagugugaagaauggcacauacgauuaucccaaauacuccgaagaggccaagcugaacagagaggaaauugacggggucaaacuugagagcacuaggaucuaucaaauucuggcuauauacucuaccguggcgucaaguuugguccucgugguuagccugggagcaaucuccuuuuggaugugcucuaaugguucguuacagugccggauuuguaucuga

SEQ ID NO: 135997 - RNA, 1701 nt, Artificial Sequence
  derived and/or modified CDS sequence (opt3) from hemagglutinin__InfluenzaA__AEX25824
augaaggccauccuggugguccuccuuuacaccuucgcuacagcaaacgccgacacucugugcauuggcuaucacgcgaauaacagcacggauaccguugacacaguguuggagaaaaauguaacugugacccauuccgucaacuuacuggaagauaagcacaaugggaaacuauguaagcucagaggaguggcuccccugcaucuugguaaaugcaacauagccggcuggauccuggggaauccugagugugaaucuuugucaacagcaaguagcugguccuacauuguugagaccucuucgucagacaacggaacuugcuauccaggcgauuuuaucgacuacgaagaacucagggagcagcugagcaguguguccucuuucgaacgguuugagauuuucccgaagacaagcuccuggcccaaucacgauucaaacaagggugucaccgccgcuuguccucaugcaggggccaaaaguuuuuauaagaaucugaucuggcucgugaaaaagggaaacagcuacccaaaauuaucuaaguccuauauaaaugacaagggcaaagaaguacugguucuuuggggcauccaccaccccucaacgagcgcugaucaacagaguuuguaccagaacgccgacgcguacguguucgucgggacuucucgcuauuccaagaaauuuaagccugagauugcaauccgaccaaaagugcgugaucaggagggaagaaugaauuacuauuggacccugguggaacccggugacaagauuacauucgaggccacuggcaaccuagucguuccuagguacgcuuuugccauggaacggaacgcagggagcggaaucauaauuucggauaccccagugcaugacugcaauacaaccugucaaacgccgaaaggcgcuaucaacacuucucuccccuuccagaauauucacccuaucacaaucgguaagugcccaaaguauguagaguccaccaaacugcgccuugccacugggcugagaaacgugcccucaauucagaguaggggauuguuuggcgcgauagccggcuucaucgaagggggauggacagguauggucgacggcugguacggguaucaucaccagaaugagcaaggaagcggcuacgcagcugaucucaaguccacccagaacgccauugacgagaucacgaauaaagugaacucuguuauagaaaagaugaauacccaguuuacagcuguggguaaagaguucaaccaccuggaaaagcggauugagaauuuaaacaagaaagucgaugacggguuccuggauaucuggacuuacaaugccgaacuccuugugcuguuggagaacgagcgcacccuagacuaucaugauagcaauguaaagaaccuguacgaaaaaguucgaucacagcucaagaacaaugcaaaagagaucggcaacggauguuuugaguucuaucacaagugcgacaauacauguauggagagugugaagaacggcacuuacgauuauccuaaauacuccgaagaggccaagcugaauagagaggaaauugacggggucaaacuugagagcaccaggaucuaucaaauucuggcuauauacucuacaguggcgucaaguuugguccucgugguuagccugggagcaaucuccuuuuggaugugcucuaacgguucguuacagugccggauuuguaucuga

SEQ ID NO: 135998 - RNA, 1698 nt, Artificial Sequence
  derived and/or modified CDS sequence (opt3) from hemagglutinin__InfluenzaA__AEX33420
augaaggugaaacugcucguccuucugugcaucuucaccgccacauacgcugacacuauuuguauaggcuaucacgcaaacaauagcacggauaccguugacacaguguuggagaagaacguaacugugacccauuccgucaauuuacuggaagauucucacaacgggaaacuaugccuccugaagggaaucgcgccccuucagcuggguaauuguucaguggccggcuggauuuuggggaacccugagugcgaacuccugaucaguaaagagagcugguccuacauuguugaaacaccaaauccggagaacggaaccuguuaucccggcuacuuugcugacuaugaggaacugagagagcaacucucuucggugagcucauucgaaagguuugagaucuucccuaaggagaguuccuggccaaaucauacugucacaggugugucugccagcugcucccacaacgggaagucaaguuuuuaccggaauuuacuguggcuuaccggaaaaagcggcuuguaucccaaccugucuaaguccuacgcaaauaacaaagaaaaggagguacuuguucucuggggcgugcaucacccuccaaauauaggggaucagcgcgcccuguaccacacggaaaacgcuuaugucucaguggugagcagucauuacucucgacguuucacucccgagaucgcaaaaagaccuaaggucagggaccaggaaggacggauuaacuauuacuggacccuucuggagccaggugauacaaucauuuuugaggccaauggcaacuugaucgcuccgcgcuaugccuucgcgcucuccagaggguuuggaagcggcauaauuacuucgaaugcacccauggacgaaugugaugccaagugccagaccccucaaggugcuaucaacucuucccugccauuccagaauguucaccccgugacaauuggggaguguccuaaauacguaaagucagccaaauuaaggauggugaccggacugcggaacaucccaaguauccagagccgcggccucuuuggcgcaauugcuggguucauagaaggagguuggacgggcauggucgacgggugguauggauaccaucaccagaaugagcaaggcuccgguuacgccgcggaucagaagucuacucagaacgccaucaaugggauuacaaacaaagugaauagcguuaucgaaaagaugaacacccaguuuacugcagugggcaaagaguucaauaagcuagagcgaagaauggaaaaccugaauaagaaagucgacgauggauucuuggacauauggacauauaacgcugagcuacuggugcuccuggaaaacgagaggacccuugacuuucacgauucaaauguaaagaaccuguacgaaaaaguuaagagucaauugaaaaauaacgccaaggagauuggcaaugggugcuucgaguuuuaucauaaguguaacgacgaaugcauggaguccgugaaaaauggaacguacgauuaucccaaguacagcgaagagucuaaacucaaccgggagaagaucgacggugucaaacuggaaucaaugggcguguaucagaucuuagcuauuuacaguaccgucgccagcucccuggugcuacucguuucucugggggcaaucucguucuggaugugcagcaauggaucccuucagugucguauuugcauauga

SEQ ID NO: 135999 - RNA, 1701 nt, Artificial Sequence
  derived and/or modified CDS sequence (opt3) from hemagglutinin__InfluenzaA__AEX33453
augaagaccaucauugcccugagcuacauacucugccuuguguucgcucagaaacugcccggcaacgacaauuccacagcaacuuuguguuuagggcaccaugccgucccuaacggaacgaucguuaagaccauuacaaaugaucaaaucgaggugacuaacgcgaccgaacugguacagucuucaaguacagguggcauuugcgacagcccacaccagauccuagauggggagaauuguacccucauagacgcucugcuuggagauccgcagugcgacggcuuucaaaacaaaaagugggaucuguucguggaaagauccaaagccuauucuaauuguuaccccuaugacgucccugauuacgcaucguugaggucacucguggccagcagugguacucuggaguuuaacaaugaauccuucaacuggacagggguuacccagaauggaacgucuagcgcuugcaagcggcgcuccgacaagucauuuuucagucgacugaacuggcucacucauuuaaaauauaaguacccagcacugaaugugaccaugcccaacaaugagaaauuugauaaacuuuauaucuggggcguccaccauccuggcacagacagcgaucagauuucuuuguacgcccaggcuuccgggcguaucacugugucaaccaagagaagccaacagacaguaauuccaaacaucggaaguaggccccggguucgcgacgugucuuccagaauaagcauuuacuggaccaucgucaagccuggugacauucugcuaaucaacucgacgggcaaucucaucgccccaaggggguauuucaagauucggucuggaaaauccucaauaaugcgcagugaugcgccgaucggcaaguguaacagcgagugcauuacucccaaugguuccaucccuaacgacaaaccauuucagaaugugaaccgaauaacauacggggcaugucccagauaugugaagcagaauacccugaaacuugccacuggaaugaggaacgucccugaaaagcaaacacggggcauuuucggcgcuaucgccggguuuaucgagaauggaugggaagguaugguugauggcugguacggguuccgucaccagaacucugagggaaccggccaggcagcugaccugaaaagcacgcaagccgcgauuaaucagaucaacgguaaguugaaucgccucauugggaagaccaacgagaaauuucaccagauagaaaaggaguucucagaaguggagggcagaauccaggaucuggaaaaauauguagaggacacaaagauugauuuauggaguuacaaugccgagcugcucguggcacuugaaaaccaacauacuaucgaccugaccgauuccgagaugaacaaauuguucgaaaggacaaagaagcagcuacgggagaaugcugaagacaugggaaacggcugcuuuaaaaucuaucacaagugugauaaugccugcauugggagcauacgaaacggaacuuacgaccaugacgucuaccgcgaugaggcucugaauaacagauuccagaucaaagguguggagcucaagucuggcuauaaagacuggauucuguggaucucauuugccauuaguugcuuccuucuguguguugcauugcucggguuuaucaugugggccugccagaagggaaauauaagguguaacaucugcauuuga

SEQ ID NO: 136000 - RNA, 1701 nt, Artificial Sequence; identical to SEQ ID NO: 129843
  derived and/or modified CDS sequence (opt3) from hemagglutinin__InfluenzaA__AEX33464

SEQ ID NO: 136001 - RNA, 1701 nt, Artificial Sequence; identical to SEQ ID NO: 129843
  derived and/or modified CDS sequence (opt3) from hemagglutinin__InfluenzaA__AEX33475

SEQ ID NO: 136002 - RNA, 1701 nt, Artificial Sequence; identical to SEQ ID NO: 129843
  derived and/or modified CDS sequence (opt3) from hemagglutinin__InfluenzaA__AEX33486

SEQ ID NO: 136003 - RNA, 1701 nt, Artificial Sequence; identical to SEQ ID NO: 129843
  derived and/or modified CDS sequence (opt3) from hemagglutinin__InfluenzaA__AEX33497

SEQ ID NO: 136004 - RNA, 1701 nt, Artificial Sequence; identical to SEQ ID NO: 129843
  derived and/or modified CDS sequence (opt3) from hemagglutinin__InfluenzaA__AEX33508

SEQ ID NO: 136005 - RNA, 1701 nt, Artificial Sequence; identical to SEQ ID NO: 129843
  derived and/or modified CDS sequence (opt3) from hemagglutinin__InfluenzaA__AEX33519

SEQ ID NO: 136006 - RNA, 1701 nt, Artificial Sequence
  derived and/or modified CDS sequence (opt3) from hemagglutinin__InfluenzaA__AEX33541
augaagaccaucauugcccugagcuacauacucugccuuguguucgcucagaaacugcccggcaacgacaauuccacagcaacuuuguguuuagggcaccaugccgucccuaacggaacgaucguuaagaccauuacaaaugaucaaaucgaggugacuaacgcgaccgaacugguacagauuucuucaacagguggcaucugcgacaguccacaccagauacuagauggggagaauuguacccucaucgacgcucugcuuggagauccgcagugcgacggcuuucaaaacaaaaagugggaucuguucguggaaagaagcaaagccuauuccaauuguuaccccuaugacgucccugauuacgcaucuuugaggucgcucguggccucaagcgguacucuggaguuuaacaaugaaaguuucgacuggacagggguuacccagaacggaacguccucuagcugcaagcggcgcuccaauaagucauuuuucagucgacugaacuggcucacucauuuaaaauauaaguacccagcucugaaugugaccaugcccaacaaugagaaauuugauaaacuuuauauuuggggcguccaccauccuggcacagacagcgaucagaucucuuuguacgcacaggccuccgggcguauuacugugucaaccaagagaagccaacagacaguaaucccaaacauaggaaguaggccccggguucgcgacgugucuuccagaauuagcaucuacuggaccauugucaagccuggugacauccugcuaaucaacucgacgggcaaucucauugcuccaaggggguauuucaagauacggucuggaaaauccucaaucaugcgcagugaugccccgauuggcaaguguaacagcgagugcaucacucccaaugguuccauaccuaacgacaaaccauuucagaaugugaaccgaauuacauacggggcgugucccagauaugugaagcagaauacccugaaacuugcaacuggaaugaggaacgucccugaaaagcaaacacggggcaucuucggcgccaucgcuggguuuauugagaauggaugggaagguaugguugauggcugguacggguuccgucaccagaacucugagggaaccggccaggccgcagaccugaaaagcacgcaagcugccaucaaucagauuaacgguaaguugaaucgccucauagggaagaccaacgagaaauuucaccagaucgaaaaggaguucucagaaguggagggcaggauucaggaucuggaaaaauauguagaggacacaaagaucgauuuauggaguuacaaugcggagcugcucguggcccuugaaaaccaacauacuaucgaccugaccgauuccgagaugaacaaauuguucgaaagaacaaagaagcagcuacgggagaaugcagaagacaugggaaacggcugcuuuaaaauuuaucacaagugugauaaugcuugcauagggagcauccgaaacggaacuuacgaccaugacgucuaccgcgaugaggcccugaauaacagauuccagauuaaagguguggagcucaagucuggcuauaaagacuggauccuguggauuucauuugcuaucaguugcuuccuucuguguguugccuugcucggguuuauaaugugggcaugccagaagggaaauaucagguguaacauuugcaucuga

SEQ ID NO: 136007 - RNA, 1701 nt, Artificial Sequence
  derived and/or modified CDS sequence (opt3) from hemagglutinin__InfluenzaA__AEX33574
augaagaccaucauugcccugagcuacauacucugccuuguguucgcucagaaacugcccggcaacgacaauuccacagcaacuuuguguuuagggcaccaugccgucccuaacggaacgaucguuaagaccauuacaaaugaucaaaucgaggugacuaacgcgaccgaacugguacagucuucaaguacagguggcauuugcgacagcccacaccagauccuagauggggagaauuguacccucauagacgcucugcuuggagauccgcagugcgacggcuuucaaaacaaaaagugggaucuguucguggaaagauccaaagccuauucuaauuguuaccccuaugacgucccugauuacgcaucguugaggucacucguggccagcagugguacucuggaguuuaacaaugaauccuucaacuggacagggguuacccagaauggaacgucuagcgcuugcaagcggcgcuccaacaagucauuuuucagucgacugaauuggcucacucauuuaaaauuuaaguauccagcacugaacgugaccaugcccaauaacgagaaauucgacaaacuuuacaucuggggcguccaccauccuggcacagauaacgaccagauuagcuuguaugcccaggcuucugggcguaucacuguguccaccaagagaucacaacagacaguaauuccaaauaucggaagcaggccccggguucgcgaugugccuaguagaauaucuauuuacuggaccaucgucaagccaggugacauucugcuaaucaacuccacgggcaaucucaucgccccgaggggguacuuuaagauucggagcggaaaaucgucuauaaugcgcuccgacgcgcccaucggcaaguguaacucagagugcauuacuccuaaugguaguaucccaaacgauaaacccuuccagaaugugaaccgaauaacauauggggcauguccuagauacgugaagcagaauacccugaaacuugccacuggaaugaggaacgucccagaaaagcaaacacggggcauuuuuggcgcuaucgccggguucaucgagaauggaugggaagguaugguugacggcugguauggguuucgucaccagaacagcgagggaaccggccaggcagcugaucugaaauccacgcaagccgcgauuaaucagaucaacgguaaguugaaucgccucauugggaagaccaacgagaaauuccaccagauagaaaaggaguucucugaaguggagggcagaauccaggaccuggaaaaauacguagaggauacaaagauugacuuauggagcuauaacgccgagcugcucguggcacuugaaaaucaacauacuaucgaucugaccgacucagagaugaacaaauuguuugaaaggacaaagaagcagcuacgggagaaugcugaagauaugggaaacggcugcuucaaaaucuaccacaagugugacaaugauugcauugggaguauacgaaacggaacuuaugaccaugacgucuaccgcgaugaggcccugaauaacagauuucagaucaaagguguggagcucaaguccggcuacaaagacuggauucuguggaucagcuucgcuauuucuugcuuucuucuguguguugccuugcucggguucaucaugugggcaugccagaagggaaauauaagguguaacaucugcauuuga

SEQ ID NO: 136008 - RNA, 1701 nt, Artificial Sequence; identical to SEQ ID NO: 129843
  derived and/or modified CDS sequence (opt3) from hemagglutinin__InfluenzaA__AEX33585

SEQ ID NO: 136009 - RNA, 1701 nt, Artificial Sequence
  derived and/or modified CDS sequence (opt3) from hemagglutinin__InfluenzaA__AEX33596
augaagaccaucauugcccugagcuacauacucugccuuguguucgcucagaaacugcccggcaacgacaauuccacagcaacuuuguguuuagggcaccaugccgucccuaacggaacgaucguuaagaccauuacaaaugaucaaaucgaggugacuaacgcgaccgaacugguacagucuucaaguacagguggcauuugcgacagcccacaccagauccuagauggggagaauuguacccucauagacgcucugcuuggagauccgcagugcgacggcuuucaaaacaaaaagugggaucuguucguggaaagauccaaagccuauucuaauuguuaccccuaugacgucccugauuacgcaucguugaggucacucguggccagcagugguacucuggaguuuaacaaugaauccuucaacuggacagggguuacccagaauggaacgucuagcgcuugcaagcggcgcuccaacaagucauuuuucagucgacugaauuggcucacucauuuaaaauuuaaguauccagcacugaacgugaccaugcccaauaacgagaaauucgacaaacuuuacaucuggggcguccaccauccuggcacagauaacgaccagauuagcuuguaugcccaggcuucugggcguaucacuguguccaccaagagaucacaacagacaguaauuccaaauaucggaagcaggccccggguucgcgauauaccuaguagaauuucuaucuacuggaccauugugaagccaggugacauccugcuaaucaacuccacgggcaaucucauugccccgaggggguacuuuaagauacggagcggaaaaucgucuaucaugcgcuccgacgcgcccauuggcaaguguaacucagagugcaucacuccuaaugguaguauaccaaacgauaaacccuuccagaaugucaaccgaauuacauauggggcauguccuagauacgugaagcagaauacccugaaacuugccacuggaaugaggaacgugccagaaaagcaaacacggggcaucuuuggcgcuaucgccggguucauugagaauggaugggaagguauggucgacggcugguauggguuucgucaccagaacagcgagggaaccggccaggcagcugaucugaaauccacgcaagccgcgaucaaucagauuaacgguaaguugaaucgccucauagggaagaccaacgagaaauuccaccagaucgaaaaggaguucucugaaguugagggcaggauucaggaccuggaaaaauacguggaggauacaaagaucgacuuauggagcuauaacgccgagcugcucguagcacuugaaaaucaacauacuaucgaucugaccgacucagagaugaacaaauuguuugaaagaacaaagaagcagcuacgggagaaugcugaagauaugggaaacggcugcuucaaaauuuaccacaagugugacaaugccugcauagggaguauccgaaacggaacuuaugaucaugacguguaccgcgacgaggcucugaauaacagauuucagauuaaaggugucgagcucaaguccggcuacaaagauuggauccuguggauuagcuucgccaucucuugcuuucuucuguguguggcauugcucggguucauaaugugggccugccagaagggaaauaucagguguaacauuugcaucuga

SEQ ID NO: 136010 - RNA, 1701 nt, Artificial Sequence; identical to SEQ ID NO: 129843
  derived and/or modified CDS sequence (opt3) from hemagglutinin__InfluenzaA__AEX33618

SEQ ID NO: 136011 - RNA, 1701 nt, Artificial Sequence; identical to SEQ ID NO: 129843
  derived and/or modified CDS sequence (opt3) from hemagglutinin__InfluenzaA__AEX33629

SEQ ID NO: 136012 - RNA, 1701 nt, Artificial Sequence; identical to SEQ ID NO: 136009
  derived and/or modified CDS sequence (opt3) from hemagglutinin__InfluenzaA__AEX33640

SEQ ID NO: 136013 - RNA, 1701 nt, Artificial Sequence
  derived and/or modified CDS sequence (opt3) from hemagglutinin__InfluenzaA__AEX33836
augaagaccaucauugcccugagcuacauacucugccuuguguucgcucagaaacugcccggcaacgacaauuccacagcaacuuuguguuuagggcaccaugccgucccuaacggaacgaucguuaagaccauuacaaaugaucaaaucgaggugacuaacgcgaccgaacugguacagucuucaaguacagguggcauuugcgacagcccacaccagauccuagauggggagaauuguacccucauagacgcucugcuuggagauccgcagugcgacggcuuucaaaacaaaaagugggaucuguucguggaaagauccaaagccuauucuaauuguuaccccuaugacgucccugauuacgcaucguugaggucacucguggccagcagugguacucuggaguuuaacaaugaauccuucaacuggacagggguuacccagaauggaacgucuagcgcuugcaagcggcgcuccaacaauucauuuuucagucgacugaacuggcucacucauuuaaaguuuaaauauccagcacugaaugugaccaugcccaacaacgagaaguucgacaaacuuuacaucuggggcguccaccauccuggcacagauaaugaccagaucuuuuuguaugcccaggcuagcgggcguauuacugugucuaccaagagaucccaacagacaguaauuccaaacaucggaucaaggccccggguucgcaauauaccuagcagaauuaguaucuacuggaccauugugaaaccaggugauaucuuccugaucaacucuacgggcaaucuaauugccccgaggggguacuuuaagauacgguccggaaagagcucgaucaugcgcucugacgcgcccauuggcaaauguaacuccgagugcaucacuccuaaugguucaauaccaaacgacaagcccuuccagaaugucaaccgaauuacauauggggcauguccuagauacgugaaacagaauacccucaagcuggccacuggaaugaggaacgugccagaaaaacaaacacggggcaucuuuggcgcuaucgccggguucauugagaauggaugggaagguauggucgauggcugguauggguuccgucaccagaacagugagggaaucggccaggcagcugaccuuaagagcacccaagccgcgauuaaucagauaaacgguaaacugaaccgcuugaucgggaagacgaaugagaaguuucaccagauugaaaaagaguucuccgaaguugagggcagaauccaggaucucgaaaaguacguggaggacaccaaaaucgaucuguggucuuauaacgccgaguuacugguagcacucgaaaaucaacauacaauugaccuuacugauagcgagaugaacaagcuguuugaaaggaccaaaaagcaguugcgggagaaugcugaagacaugggaaacggcugcuucaagauauaccacaaaugugauaaugccugcaucgggucaauucgaaacggaacauaugaccaugauguguaccgcgacgaggcucuaaauaacagauuucagaucaagggugucgagcugaaaaguggcuacaaggacuggauucucuggaucuccuucgccauaagcugcuuucugcuuuguguggcacuguugggguucaucaugugggccugccagaaaggaaauauuagguguaacaucugcauuuga

SEQ ID NO: 136014 - RNA, 1701 nt, Artificial Sequence; identical to SEQ ID NO: 128678
  derived and/or modified CDS sequence (opt3) from hemagglutinin__InfluenzaA__AEX33880

SEQ ID NO: 136015 - RNA, 1698 nt, Artificial Sequence
  derived and/or modified CDS sequence (opt3) from hemagglutinin__InfluenzaA__AEX33913
augaaggugaaacugcucguccuucugugcaccuucacagccacuuacgcugacacgaucuguauuggcuaucacgcaaacaauagcaccgauacaguugacacuguguuggagaagaacguaaccgugacacauuccgucaauuuacuggaagauucucacaacgggaaacuaugccuccugaagggaauagcgccccuucagcuggguaauuguucaguggccggcuggaucuuggggaacccugagugcgaacuccugauuaguagagagagcugguccuacaucguugaaaaaccaaauccggagaacggaaccuguuaucccggccauuuugcugacuacgaggaacugagggagcaacucucuucggugagcucauucgaacgguuugagauuuucccuaaggagaauaguuggccaaaccacacuacaaccggugucuccgccucuugcagccauaauggggaauccucauuuuauaagaacuuacuguggcuuacgggcaaaaauggauuguaccccaaccugaguaagagcuaugcaaauaacaaaaagaaagaggugcuaguacucuggggcguucaccacccuccaaacaucgggaaucagcgcgcccuguaccauacugaaaacgcuuacgugucugucguguccucacacuauagccgaaaguucacccccgagauagcaaagcguccuaaagugagagaucaggaaggaaggaucaauuacuauuggacacuucuggagccaggugacacuauuaucuuugaggccaacggcaauuugauugcuccgcgguacgccuucgcgcucagucgcggguuuggaucuggcaucauaaacuccaaugcacccauggaugaaugugacgccaagugccagaccccucaaggugcuauuaacagcucgcugccauuccagaauguccaucccguuacaaucggggaguguccuaaauaugugagaucugccaaguuaaggaugguaaccggacugcggaacauuccauccauccagucacgcggccucuuuggcgcaaucgcuggguucauugaaggagguuggacgggcaugguggaugggugguacggauaucaccaccagaaugagcaaggcagugguuacgccgcggaccagaaaagcacucagaacgccauaaaugggaucacaaacaaggucaauuccgugauugaaaagaugaacacccaguuuacugcaguuggcaaggaguucaacaaacuugagcgaagaauggaaaaucugaacaaaaagguggaugacggauucaucgauauauggacauacaaugcugaguugcuaguccugcucgaaaacgagaggacccuggacuuucaugacucuaaugugaaaaaccuuuaugaaaagguaaaaagccaacugaagaauaacgccaaggagauuggcaaugggugcuucgaguuuuaccacaaauguaacgaugaaugcauggagucaguuaagaauggaacguaugacuaccccaaauauagugaagaguccaaguugaaccgggagaaaaucgauggugugaaguucgaaagcaugggcgucuaccagauccucgcuauuuauucuaccguggccucaagucuggucuuacuggugagccuaggggcaaucuccuuuuggaugugcucuaauggaucgcuccagugucguauuugcauauga

SEQ ID NO: 136016 - RNA, 1698 nt, Artificial Sequence
  derived and/or modified CDS sequence (opt3) from hemagglutinin__InfluenzaA__AEX33924
augaaggugaaacugcucguccuucugugcaccuucacagccacuuacgcugacacgaucuguauuggcuaucacgcaaacaauagcaccgauacaguugacacuguguuggagaagaacguaaccgugacacauuccgucaauuuacuggaagauucucacaacgggaaacuaugccuccugaagggaauagcgccccuucagcuggguaauuguucaguggccggcuggaucuuggggaacccugagugcgaaagucucauuagcagagaguccuggucuuacaucguugaaaaaccaucgccggagaauggaaccuguuaucccggccauuuugcugacuacgaggaacugagggagcaacugucaagcgugaguuccuucgaacgguuugagauuuucccuaaggagucuagcuggccaaaccacacugccacaggugucuccgcaucaugcagucauaauggaaagagcucuuuuuauaaaaaccucuuauggcugaccgggaagaauggccuuuaccccaacuuguccaaaucauaugccaauaacaaggaaaaagaggugcugguacuauggggcguucaccacccuccaaauaucggggaucagcgcgcucucuaccauacggaaaacgcauacgugagcgucgugaguucucacuauucccgaaaguucacucccgagauagccaagcguccuaaagugagagaccagaagggaaggaucaacuacuauuggacccugcuugaaccaggugauacaauuaucuuugaggcuaauggcaaccugauugccccgcgguacgcguucgcauugagccgcggguuuggaucgggcaucauaaauucuaacgcccccauggacgagugugaugcuaaaugccagacuccucaaggugccauuaauuccucacucccauuccagaacguccaucccguuaccaucggggaauguccuaaguaugugagaagugcaaaacugaggaugguaacaggauuacggaauauuccaagcauccagucccgcggccuguuuggcgcuaucgccggguucauugagggagguuggaccggcaugguggacgggugguacggauaucaccaccagaacgaacaaggcucugguuacgcggccgaucaaaagagcacgcagaaugcaauaaacgggaucacuaauaaagucaacucagugauugagaagaugaauacacaguuuaccgcuguuggcaaggaguucaacaaacucgaacgaagaauggagaaucuuaacaagaaaguggacgauggauucaucgacauauggacuuacaacgccgaacuguugguccuacuggagaaugaaaggacacucgacuuucaugauaguaacgugaagaaucuguaugagaaaguaaagucccagcuuaagaacaaugcuaaagaaauuggcaacgggugcuucgaguuuuaccacaaguguaaugacgagugcauggaaagcguuaaaaacggaaccuaugauuaccccaaguauucugaggaaucaaaacugaaucgggagaagaucgacggugugaaguuggagaguaugggcgucuaccagauccucgccauuuauagcacgguggcauccucucuggucuuacuggugucgcuaggggccaucagcuucuggaugugcuccaacggaucacuccagugucguauuugcauauga

SEQ ID NO: 136017 - RNA, 1701 nt, Artificial Sequence
  derived and/or modified CDS sequence (opt3) from hemagglutinin__InfluenzaA__AEX33957
augaagaccaucauugcccugagcuacauacucugccuuguguucgcucagaaacugcccggcaucgacaacuccacagcaacuuuguguuuagggcaccaugccgucccuaauggaacgauuguuaagaccaucacaaacgaucaaguggagguaacuaaugcgaccgaacuggugcagaacucuucaacagguggcauuugcgacaguccacaccagauccuagauggggagaauuguacccucauagacgcucugcuuggagauccgcagugcgacggcuuucaaaacaaaaagugggaucuguucgucgaaagaagcaaagccuauuccaauuguuaccccuaugacgugccugauuacgcaucuuugaggucgcucguugccucaagcgguacucuggaguuuaacaaugaaaguuucaacuggacaggggugacccagaauggaacguccucugcuugcaagcggggcagcaacaauuccuuuuucucacgccugaacuggcucacucauaguaaguuuaaauauccagcauuaaaugucaccaugcccaacaacgaggaguucgacaagcuguacaucuggggcgugcaccauccugggacagauaaugaccagauuuuucuuuaugcccaggcuagcggacgaaucacuguaucuaccaaacguucccaacagacaguuauuccaaacaucgguucaagacccagggugcggaauauaccuagccgcauuaguaucuacuggaccauugucaagccaggcgauaucuugcugaucaacucuacggggaaucuaauugccccgagaggauacuucaaaauaagguccggcaagagcucgaucaugcggucugacgcgcccauugguaaguguaacuccgaaugcaucacuccuaaugggucaauaccaaacgacaaacccuuucagaaugugaaccgcauuacauauggagcauguccucgauacgugaagcagaauacccucaaacuggccacuggcaugagaaacgucccagagaagcaaacaaggggcaucuucggggcuaucgccggauuuauugaaaaugguugggagggcaugguugaugggugguauggauuccggcaccagaacagugagggcaucggucaggcagcugaccuuaaaagcacccaagccgcgauugaucagauaaaugggaagcugaaccguuugaucggcaaaacgaacgaaaaguuccaccagauugagaaggaauuuuccgagguggaaggacgcauccaggaccucgagaaauacguagaggauaccaagaucgaccuguggucuuauaaugccgaauuacugguggcacucgagaaccaacauacaauugaucuuacugacagcgaaaugaauaaacuguucgagaagaccaaaaagcaguugagagaaaacgcugaggauaugggcaaugggugcuuuaagauauaccacaaaugugacaacgccugcaucggaucaauuaggaaugguacauaugaucaugacgucuaccgggacgaggcucuaaacaaucgauuccagaucaagggcguggaacugaaaaguggguacaaggauuggauucucuggaucuccuuugccauaagcugcuuccugcuuuguguugcacuguugggauuuaucaugugggccugccagaaaggcaacauucgcuguaauaucugcauuuga

SEQ ID NO: 136018 - RNA, 1701 nt, Artificial Sequence
  derived and/or modified CDS sequence (opt3) from hemagglutinin__InfluenzaA__AEX33968
augaagaccaucauugcccugagcuacauacucugccuuguguucgcucagaaacugcccggcaucgacaacuccacagcaacuuuguguuuagggcaccaugccgucccuaauggaacgauuguuaagaccaucacaaacgaucaaauugaggugacuaaugcgaccgaacugguacagaacucuucaacagguggcaucugcgacaguccacaccagauacuagauggggagaauuguacccucaucgacgcucugcuuggagauccgcagugcgacggcuuucaaaacaaaaagugggaucuguucguggaaagaagcaaagccuauuccaauuguuaccccuaugacgucccugauuacgcaucuuugaggucgcucguggccucaagcgguacucuggaguuuaacaaugaaaguuucaacuggacagggguuacccagaauggaacguccucugcuugcaagcggggcagcaacaauuccuuuuucucacgccugaacuggcucacucauaguaaguuuaaauauccagcauuaaaugugaccaugcccaacaacgaggaguucgacaagcuguacauuuggggcguccaccauccugggacagauaaugaccagaucuuucuucacgcccaggcuagcggacgaauuacugugucuaccaaacguucccaacagacaguaaucccaaacauagguucaagacccaggguucggaauauuccuagccgcaucaguauuuauuggaccaucgugaagccaggcgauaucuugcugauuaacucuacggggaaucuaauagccccgagaggauacuucaaaaucagguccggcaagagcucgauuaugcggucugacgcgcccaucgguaaguguaacuccgaaugcauaacuccuaaugggucaauuccaaacgacaaacccuuucagaaugucaaccgcaucacauacggagcauguccucgauaugugaagcagaauacccucaaacuggccacuggcaugagaaacgugccagagaagcaaacaaggggcaucuucggggcuauugccggauuuaucgaaaaugguugggagggcauggucgaugggugguacggauuccggcaccagaacagugagggcauuggucaggcagcugaccuuaaaagcacccaagccgcgauagaucagaucaaugggaagcugaaccguuugauuggcaaaacgaacgaaaaguuccaucagaucgagaaggaauuuuccgagguugaaggacgcauccaggaccucgagaaauauguggaggauaccaagauugaccuguggucuuacaaugccgaauuacugguagcacucgagaaccaacacacaauagaucuuacugacagcgaaaugaauaaacuguucgagaagaccaaaaagcaguugagagaaaacgcugaggauaugggcaaugggugcuuuaagaucuaucauaaaugugacaacgccugcauuggaucaaucaggaaugguacauacgaucacgacguguaucgggacgaggcucuaaacaaucgauuccagauuaagggcgucgaacugaaaaguggguacaaggauuggauccucuggauauccuuugccaucagcugcuuccugcuuuguguggcacuguugggauuuauuaugugggccugccagaaaggcaacauccgcuguaauauuugcaucuga

SEQ ID NO: 136019 - RNA, 1701 nt, Artificial Sequence
  derived and/or modified CDS sequence (opt3) from hemagglutinin__InfluenzaA__AEX33979
augaagaccaucauugcccugagcuacauacucugccuuguguucgcucagaaacugcccggcaacgacaauuccacagcaacuuuguguuuagggcaccaugccgucccuaacggaacgaucguuaagaccauuacaaaugaucaaaucgaggugacuaacgcgaccgaacugguacagucuucaaguacaggugagauuugcgacagcccacaccagauccuagauggcgaaaauuguacccucauagacgcucugcuuggggauccgcagugcgacggauuucaaaacaaaaagugggaucuguucguggagagauccaaagccuauucuaauuguuaccccuaugacgucccugauuacgcaucguugaggucacucguggccagcaguggcacucuggaauuuaacaaugaguccuucaacuggacagguguuacccagaaugggacgucuagcgcuugcauccggcgcuccaacaauucauuuuucagucgacugaacuggcucacucauuuaaaguuuaaguauccagcacugaaugugaccaugcccaacaacgagaaauucgacaaacuuuacauuuggggaguccaccauccuggcacagauaaugaccagaucuuuuuguaugcccaggcuagcggccguauuacugugucuaccaagagaucccaacagacaguaaucccaaacauagggucaaggccccggguucgcaauauuccuagcagaaucaguauuuacuggaccaucgugaagccaggagauauccugcuaauuaacucuacggguaaucucauagccccgaggggcuacuucaaaauccgguccggaaagagcucgauuaugcgcucugacgcgcccaucgggaaguguaacuccgaaugcauaacuccuaauggcucaauuccaaacgacaaacccuuucagaaugucaaccgaaucacauauggugcauguccuagauacgugaagcagaauacccugaaacuugccacugggaugaggaacgugccagagaagcaaacacggggaaucuucggcgcuauugccggcuuuaucgaaaaugggugggagggaauggucgaugguugguauggcuuccgucaccagaacagugaggggauuggacaggcagcugaccugaaaagcacccaagccgcgauagaucagaucaauggcaaguugaaccgccucauugguaaaacgaacgaaaaguuccaccagaucgagaaggaauuuuccgagguugaagggagaauccaggaccuggagaaauacguggaggauaccaagauugacuuauggucuuauaaugccgaacugcucguagcacuugagaaccaacauacaauagaucugacugacagcgaaaugaauaaauuguucgagaagaccaaaaagcagcuaagggaaaacgcugaggauaugggcaauggaugcuuuaagaucuaccacaaaugugacaacgccugcauuggcucaauccggaaugggacauaugaucaugacguguaccgagacgaggcucugaacaaucgcuuccagauuaacggagucgaacucaagagugguuacaaagauuggauccuguggauauccuuugccaucagcugcuuccuucuguguguggcauugcucggcuuuauuaugugggccugccagaaggggaauaucagauguaacauuugcaucuga

SEQ ID NO: 136020 - RNA, 1701 nt, Artificial Sequence
  derived and/or modified CDS sequence (opt3) from hemagglutinin__InfluenzaA__AEX33990
augaagaccaucauugcccugagcuacauacucuaucuuguguucgcucagaaacugcccggcaacgacaauuccacagcaacuuugugcuuagggcaccaugccgucccuaacggaacgaucguuaagaccauuacaaaugaucaaaucgaggugacuaacgcgaccgaacugguacagucuucaaguacaggugagauuugugacagcccacaccagauccuagauggcgaaaauugcacccucauagacgcucugcuuggggauccgcagugugacggauuucaaaacaaaaagugggaucuguucguggagagauccaaagccuacucuaauugcuaucccuacgacgucccugauuaugcaucguugaggucacucguggccagcaguggcacucuggaauuuaacaaugaguccuucaacuggacagguguuacccagaaugggacgucuagcgcuuguauccggcgcuccaacaauucauuuuucagucgacugaacuggcucacucauuuaaaguuuaaguacccagcacugaaugugaccaugcccaacaacgagaaauucgacaaacuuuauauuuggggaguccaccauccuggcacagauaaugaccagaucuuuuuguacgcccaggcuagcggccguauuacugugucuaccaagagaucccaacagacaguaaucccaaacauagggucaaggccccggguucgcaauauuccuagcagaaucaguauuuacuggaccaucgugaagccaggagauauccugcuaauuaacucuacggguaaucucauagccccgaggggcuauuucaaaauccaguccggaaagagcucgauuaugcggucugacgcgcccaucgggaagugcaacuccgaauguauaacuccuaauggcucaauuccaaacgacaaacccuuucagaaugucaaccgcaucacauacggugcaugcccucgauaugugaagcaagauacccugaaacuugccacugggaugagaaaugugccagagaagcagacaaggggaaucuucggcgcuauugccggcuuuaucgaaaacgggugggagggaauggucgacgguugguacggcuuccggcaccagaauagugaggggauuggacaagcagcugaucugaaaagcacccaggccgcgauagaccagaucaacggcaaguugaaucgucucauugguaaaacgaacgaaaaguuccaccagaucgagaaggaauuuuccgagguugaagggcgcauccaagaucuggagaaauauguggaggacaccaagauugauuuauggucuuacaacgccgaacugcucguagcacuugagaaucagcauacaauagaccugacugauagcgaaaugaacaaauuguucgagaagaccaaaaagcagcuaagagaaaaugcugaggacaugggcaacggauguuuuaagaucuaucacaaaugcgauaaugccuguauuggcucaaucaggaacgggacauacgaccaugacguguaccgggaugaggcucugaauaaccgauuccagauuaagagugucgaacucaaauccggauauaaggacuggauccuguggaucagcuuugccauaucuugcuuccuucugugcguggcauugcucgguuuuauuaugugggccugucaaaaaggcaauauccgcugcaacauuuguaucuga

SEQ ID NO: 136021 - RNA, 1701 nt, Artificial Sequence
  derived and/or modified CDS sequence (opt3) from hemagglutinin__InfluenzaA__AEX34001
augaagaccaucauugcccugagcuacauacucugccuuguguucgcucagaaacugcccggcaacgacaauuccacagcaacuuuguguuuagggcaccaugccgucccuaacggaacgaucguuaagaccauuacaaaugaucaaaucgaggugacuaacgcgaccgaacugguacagucuucaaguacagguggcauuugcgacagcccacaccagauccuagauggggagaauuguacccucauagacgcucugcuuggagauccgcagugcgacggcuuucaaaacaaaaagugggaucuguucguggaaagauccaaagccuauucuaauuguuaccccuaugacgucccugauuacgcaucguugaggucacucguggccagcagugguacucuggaguuuaacuccgaaucuuucaauuggacagggguuacccagaacggaacgagcuccgcuugcaagcggcgcucaaauaacagcuuuuucagccgacugaauuggcucacucauuuaaaguuuaaauauccagcacugaacgugaccaugcccaauaacgagaaguucgacaaacuuuacaucuggggcguccaccauccuggcacagauaacgaccagauuuuucuuuaugcccaggcuucugggcguaucacuguguccaccaagagaucacaacagacaguaauuccaaauaucggaagcaggccccggguucgcaacauaccuaguagaauuucuaucuacuggaccauugugaaaccaggugauauccugcuaaucaauuccacgggcaaccucauugccccgaggggguacuucaagauacggagcggaaagucgucuaucaugcgcuccgacgcgcccauuggcaaauguaauucagagugcaucacuccuaacgguaguauaccaaaugacaagcccuuucagaacgucaaucgaauuacauauggggcauguccuagauacgugaaacagaacacccugaaguuggccacuggaaugaggaaugugccagaaaaacaaacacggggcaucuucggcgcuaucgccggguuuauugagaacggaugggaagguauggucgauggcugguauggguuccgucaccagaaugcagagggaaucggccaggcugccgaccugaagaguacccaagcggccauuaaccagauaaaugguaaauugaaccgccucaucgggaagacgaacgagaaguuccaccagauugaaaaagaguuuuccgaaguugagggcagaauccaggaucuggaaaaguacguggaggacaccaaaaucgauuuauggucuuauaaugcagagcugcucguagcucuugaaaaccaacauacaauugaccugacugauagcgagaugaauaaguuguucgaaaggaccaaaaagcagcuacgggagaacgccgaagacaugggaaauggcugcuuuaagauauaccacaaaugugauaacgcuugcaucgggucaauucgaaauggaacauaugaccaugauguguaccgcgacgaggcccugaacaauagauuccagaucaagggugucgagcucaaaaguggcuacaaggacuggauucuguggaucuccuuugcaauaagcugcuuccuucuguguguggccuugcucggguuuaucaugugggcuugccagaaaggaaacauuagguguaauaucugcauuuga

SEQ ID NO: 136022 - RNA, 1701 nt, Artificial Sequence
  derived and/or modified CDS sequence (opt3) from hemagglutinin__InfluenzaA__AEX34012
augaagaccaucauugcccugagcuacauacucuaucuuguguucgcucagaaacugcccggcaacgacaauuccacagcaacuuugugcuuagggcaccaugccgucccuaacggaacgaucguuaagaccauuacaaaugaucaaaucgaggugacuaacgcgaccgaacugguacagucuucaaguacaggugagauuugugacagcccacaccagauccuagauggcgaaaauugcacccucauagacgcucugcuuggggauccgcagugugacggauuucaaaacaaaaagugggaucuguucguggagagauccaaagccuacucuaauugcuaucccuacgacgucccugauuaugcaucguugaggucacucguggccagcaguggcacucuggaauuuaacaaugaguccuucaacuggacagguguuacccagaaugggacgucuagcgcuuguauccggcgcuccaacaauucauuuuucagucgacugaacuggcucacucauuuaaaguuuaaguacccagcacugaaugugaccaugcccaacaacgagaaauucgacaaacuuuauauuuggggaguccaccauccuggcacagauaaugaccagaucuuuuuguacgcccaggcuagcggccguauuacugugucuaccaagagaucccaacagacaguaaucccaaacauagggucaaggccccggguucgcaauauuccuagcagaaucaguauuuacuggaccaucgugaagccaggagauauccugcuaauuaacucuacggguaaucucauagccccgaggggcuauuucaaaauccaguccggaaagagcucgauuaugcggucugacgcgcccaucgggaagugcaacuccgaauguauaacuccuaauggcucaauuccaaacgacaaacccuuucagaaugucaaccgcaucacauacggugcaugcccucgauaugugaagcaaaauacccugaaacuugccacugggaugagaaacgugccagagaagcagacaaggggaaucuucggcgcuauugccggcuuuaucgaaaaugggugggagggaauggucgaugguugguacggcuuccggcaccagaacagugaggggauuggacaagcagcugaccugaaaagcacccaggccgcgauagaucagaucaauggcaaguugaaccgucucauugguaaaacgaacgaaaaguuccaccagaucgagaaggaauuuuccgagguugaagggcgcauccaagaccuggagaaauauguggaggauaccaagauugacuuauggucuuacaaugccgaacugcucguagcacuugagaaccagcauacaauagaucugacugacagcgaaaugaauaaauuguucgagaagaccaaaaagcagcuaagagaaaacgcugaggauaugggcaauggauguuuuaagaucuaucacaaaugcgacaacgccuguauuggcucaaucaggaaugggacauacgaucaugacguguaccgggacgaggcucugaacaaucgauuccagauuaagggagucgaacucaaaagugguuauaaggauuggauccuguggauauccuuugccaucagcugcuuccuucugugcguggcauugcucggcuuuauuaugugggccugucaaaaagggaacauccgcugcaauauuuguaucuga

SEQ ID NO: 136023 - RNA, 1701 nt, Artificial Sequence; identical to SEQ ID NO: 130482
  derived and/or modified CDS sequence (opt3) from hemagglutinin__InfluenzaA__AEX34023

SEQ ID NO: 136024 - RNA, 1701 nt, Artificial Sequence
  derived and/or modified CDS sequence (opt3) from hemagglutinin__InfluenzaA__AEX34044
augaagaccaucauugccuucagcuacauacugugccucguguuugcucagaaacuucccggcaucgacaacuccacagcaacucuguguuuggggcaccaugccgucccuaauggaacgauuguuaagaccaucacaaacgaucaaauugaggugacuaaugcgaccgaauuaguacagucuucaaguacagguggcaucugcgacagcccacaccagauacuggauggggagaacuguacccuaaucgacgcucuccugggagauccgcagugcgacggcuuccaaaauaaaaagugggaucuuuuuguggaaagauccaaagccuauucuaacuguuaccccuaugacgucccugauuacgcaucgcugaggucauugguggccagcagugguacucucgaguucaauaacgaauccuuuaauuggacagggguuacccagaacggaacgucuagcgcuugcaagcggggcuccaauaacucauucuuuagucgccugaauuggcugacucauagcaaguucaaauauccagcacucaacgugaccaugcccaauaacgaggaguuugacaaguuauacauuuggggcguccaccauccugggacagauaacgaccagaucuuccuguaugcccaggcuucuggacgaauuacuguguccaccaaacguucacaacagacaguaaucccaaauauagguagcagacccaggguucggaacauuccuagucgcaucucuauuuacuggaccaucgugaagccaggcgauauccuuuugauuaauuccacggggaaccugauagccccgagaggauacuuuaaaaucaggagcggcaagucgucuauuaugcgguccgacgcgcccaucgguaaguguaauucagaaugcauaacuccuaacgggaguauuccaaaugacaaacccuuccagaacgucaaucgcaucacauauggagcauguccucgauacgugaagcagaacacccuaaaacucgccacuggcaugagaaaugugccagagaagcaaacaaggggcaucuuuggggcuauugccggauucaucgaaaacgguugggagggcauggucgaugggugguauggauuccggcaccagaauagcgagggcauuggucaggcagcugaccugaaauccacccaagccgcgauagaucagaucaacgggaaacuuaaucgucugauuggcaagacgaacgaaaaguuucaccagaucgagaaggaguucucugaaguugaaggacgcauccaggacuuggagaaauacguggaggauaccaagauugaccucuggagcuauaacgccgaacuguuaguagcacuggagaaucaacauacaauagaucucacugacucagaaaugaacaaacuuuuugagaagaccaaaaagcagcugagagaaaaugcugaggauaugggcaacgggugcuucaagaucuaccacaaaugugacaaugccugcauuggaaguaucaggaacgguacauaugaucaugacguguaccgggacgaggcuuugaauaaccgauuucagauuaagggcgucgaacuaaaauccggguacaaggauuggauccuguggaucagcuucgccauaucuugcuuucuccuguguguggcacuucugggauucauuaugugggccugccagaaaggcaauauccgcuguaacauuugcaucuga

SEQ ID NO: 136025 - RNA, 1701 nt, Artificial Sequence
  derived and/or modified CDS sequence (opt3) from hemagglutinin__InfluenzaA__AEX34089
augaagaccaucauugcccugagcuacauacucugccuuguguucgcucagaaacugcccggcaucgacaacuccacagcaacuuuguguuuagggcaccaugccgucccuaauggaacgauuguuaagaccaucacaaacgaucaaauugaggugacuaaugcgaccgaacugguacagaacucuucaacagguggcaucugcgacaguccacaccagauacuagauggggagaauuguacccucaucgacgcucugcuuggagauccgcagugcgacggcuuucaaaacaaaaagugggaucuguucguggaaagaagcaaagccuauuccaauuguuaccccuaugacgucccugauuacgcaucuuugaggucgcucguggccucaagcgguacucuggaguuuaacaaugaaaguuucaacuggacagggguuacccagaauggaacguccucugcuugcaagcggggcagcuccaacucauuuuucagucgccugaauuggcucacucauagcaaguuuaaauauccagcauuaaacgugaccaugcccaauaacgaggaguucgacaagcuguacauuuggggcguccaccauccugggacagauaacgaccagaucuuucuuuaugcccaggcuucuggacgaauuacuguguccaccaaacguucacaacagacaguaaucccaaauauagguagcagacccaggguucggaacauuccuagucgcaucucuauuuacuggaccaucgugaagccaggcgauaucuugcugauuaauuccacggggaaccuaauagccccgagaggauacuucaaaaucaggagcggcaagucgucuauuaugcgguccgacgcgcccaucgguaaguguaauucagaaugcauaacuccuaacgggaguauuccaaaugacaaacccuuucagaacgucaaucgcaucacauauggagcauguccucgauacgugaagcagaacacccucaaacuggccacuggcaugagaaaugugccagagaagcaaacaaggggcaucuucggggcuauugccggauuuaucgaaaacgguugggagggcauggucgaugggugguauggauuccggcaccagaauagcgagggcauuggucaggcagcugaccuuaaauccacccaagccgcgauagaucagaucaacgggaagcugaaucguuugauuggcaaaacgaacgaaaaguuccaccagaucgagaaggaauuuucugagguugaaggacgcauccaggaccucgagaaauacguggaggauaccaagauugaccuguggagcuauaacgccgaauuacugguagcacucgagaaucaacauacaauagaucuuacugacucagaaaugaacaaacuguucgagaagaccaaaaagcaguugagagaaaaugcugaggauaugggcaacgggugcuuuaagaucuaccacaaaugugacaaugccugcauuggaaguaucaggaacgguacauaugaucaugacguguaccgggacgaggcucuaaauaaccgauuccagauuaagggcgucgaacugaaauccggguacaaggauuggauccucuggaucagcuuugccauaucuugcuuccugcuuuguguggcacuguugggauuuauuaugugggccugccagaaaggcaauauccgcuguaacauuugcaucuga

SEQ ID NO: 136026 - RNA, 1701 nt, Artificial Sequence
  derived and/or modified CDS sequence (opt3) from hemagglutinin__InfluenzaA__AEX34123
augaagaccaucauugcccugagcuacauacucugccuuguguucgcucagaaacugcccggcaucgacaacuccacagcaacuuuguguuuagggcaccaugccgucccuaauggaacgauuguuaagaccaucacaaacgaucaaauugaggugacuaaugcgaccgaacugguacagaacucuucaacagguggcaucugcgacaguccacaccagauacuagauggggagaauuguacccucaucgacgcucugcuuggagauccgcagugcgacggcuuucaaaacaaaaagugggaucuguucguggaaagaagcaaagccuauuccaauuguuaccccuaugacgucccugauuacgcaucuuugaggucgcucguggccucaagcgguacucuggaguuuaacaaugaaaguuucaacuggacagggguuacccagaauggaacguccucugcuugcaagcggggcagcaacaauuccuuuuucucacgccugaacuggcucacucauaguaaguuuaaauauccagcauuaaaugugaccaugcccaacaacgaggaguucgacaagcuguacauuuggggcguccaccauccugggacagauaaugaccagaucuuucuuuaugcccaggcuagcggacgaauuacugugucuaccaaacguucccaacagacaguaaucccaaacauagguucaagacccaggguucggaauauuccuagccgcaucaguauuuacuggaccaucgugaagccaggcgauaucuugcugauuaacucuacggggaaucuaauagccccgagaggauacuucaaaaucagguccggcaagagcucgauuaugcggucugacgcgcccaucgguaaguguaacuccgaaugcauaacuccuaaugggucaauuccaaacgacaaacccuuucagaaugucaaccgcaucacauauggagcauguccucgauacgugaagcagaauacccucaaacuggccacuggcaugagaaacgugccagagaagcaaacaaggggcaucuucggggcuauugccggauuuaucgaaaaugguugggagggcauggucgaugggugguauggauuccggcaccagaacagugagggcauuggucaggcagcugaccuuaaaagcacccaagccgcgauagaucagaucaaugggaagcugaaccguuugauuggcaaaacgaacgaaaaguuccaccagaucgagaaggaauuuuccgagguugaaggacgcauccaggaccucgagaaauacguggaggauaccaagauugaccuguggucuuauaaugccgaauuacugguagcacucgagaaccaacauacaauagaucuuacugacagcgaaaugaauaaacuguucgagaagaccaaaaagcaguugagagaaaacgcugaggauaugggcaaugggugcuuuaagaucuaccacaaaugugacaacgccugcauuggaucaaucaggaaugguacauaugaucaugacguguaccgggacgaggcucuaaacaaucgauuccagauuaagggcgucgaacugaaaaguggguacaaggauuggauccucuggauauccuuugccaucagcugcuuccugcuuuguguggcacuguugggauuuauuaugugggccugccagaaaggcaacauccgcuguaauauuugcaucuga

SEQ ID NO: 136027 - RNA, 1701 nt, Artificial Sequence
  derived and/or modified CDS sequence (opt3) from hemagglutinin__InfluenzaA__AEX34134
augaagaccaucauugcccugagcuacauacucugccuuguguucgcucagaaacugcccggcaacgacaauuccauggcaacauuguguuuagggcaccaugccgucccuaacggaacuaucguuaagacgauuaccaaugaucaaaucgaggugacaaacgcgacugaacugguacagucuucaaguaccggugagauuugcgacagcccacaccagauccuagauggcgaaaauuguacacucauagacgcucugcuuggggauccgcagugcgacggauuucaaaacaaaaagugggaucuguucguggagagauccaaagccuauucuaauuguuaccccuaugacgucccugauuacgcaucguugaggucacucguggccagcaguggcacccuggaauuuaacaaugaguccuucaacuggacugguguuacacagaaugggaccucuagcgcuugcauccggcgcuccaacaauucauuuuucagucgacugaacuggcucacgcauuuaaaguuuaaguauccagcacugaaugugacuaugcccaacaacgagaaauucgacaaacuuuacauuuggggaguccaccauccuggcaccgauaaugaccagaucuuuuuguaugcccaggcuagcggccguauuacagugucuacuaagagaucccaacagaccguaaucccaaacauagggucaaggccccggguucgcaauauuccuagcagaaucaguauuuacuggacaaucgugaagccaggagauauccugcuaauuaacucuaccgguaaucucauagccccgaggggcuacuucaaaauccgguccggaaagagcucgauuaugcgcucugacgcgcccaucgggaaguguaacuccgaaugcauaacgccuaauggcucaauuccaaacgacaaacccuuucagaaugucaaccgaaucacuuauggugcauguccuagauacgugaagcagaauacacugaaacuugccaccgggaugaggaacgugccagagaagcaaacucggggaaucuucggcgcuauugccggcuuuaucgaaaaugggugggagggaauggucgaugguugguauggcuuccgucaccagaacagugaggggauuggacaggcagcugaccugaaaagcacacaagccgcgauagaucagaucaauggcaaguugaaccgccucauugguaaaaccaacgaaaaguuccaccagaucgagaaggaauuuuccgagguugaagggagaauccaggaccuggagaaauacguggaggauacgaagauugacuuauggucuuauaaugccgaacugcucguagcacuugagaaccaacauaccauagaucugacagacagcgaaaugaauaaauuguucgagaagacuaaaaagcagcuaagggaaaacgcugaggauaugggcaauggaugcuuuaagaucuaccacaaaugugacaacgccugcauuggcucaauccggaaugggaccuaugaucaugacguguaccgagacgaggcucugaacaaucgcuuccagauuaagggagucgaacucaaaagugguuacaaggauuggauccuguggauauccuuugccaucagcugcuuccuucuguguguggcauugcucggcuuuauuaugugggccugccagaaagggaacaucagauguaauauuugcaucuga

SEQ ID NO: 136028 - RNA, 1701 nt, Artificial Sequence; identical to SEQ ID NO: 136026
  derived and/or modified CDS sequence (opt3) from hemagglutinin__InfluenzaA__AEX34145

SEQ ID NO: 136029 - RNA, 1701 nt, Artificial Sequence
  derived and/or modified CDS sequence (opt3) from hemagglutinin__InfluenzaA__AEX34156
augaagaccaucauugcccugagcuacauacucugccuuguguucgcucagaaacugcccggcaacgacaauuccacagcaacuuuguguuuagggcaccaugccgucccuaacggaacgaucguuaagaccauuacaaaugaucaaaucgaggugacuaacgcgaccgaacugguacagucuucaaguacaggugagauuugcggcagcccacaccagauccuagacggggaaaauuguacccucauagaugcucugcuuggagacccgcagugcgauggcuuucaaaacaaaaagugggaccuguucguggagagauccaaagccuauucuaauuguuaccccuaugaugucccugacuacgcaucguugaggucacucguggccagcagugguacucuggaauuuaacaaugaguccuucaacuggacagggguuacccagaauggaacgucuagcgcuugcauccggcgcuccaacaauucauuuuucagucgacugaacuggcucacucauuuaaaguuuaaguauccagcacugaaugugaccaugcccaacaacgagaaauucgauaaacuuuacauuuggggcguccaccauccuggcacagacaaugaucagaucuuuuuguaugcccaggcuagcgggcguauuacugugucuaccaaaagaucccaacagacaguaaucccaaacauaggaucaaggccccggguucgcaauauuccuagcagaaucaguauuuacuggaccaucgugaagccaggugacauccugcuaauuaacucuacgggcaaucucauagccccgaggggguacuucaaaauccgguccggaaagagcucgauuaugcgcucugaugcgcccaucggcaaguguaacuccgaaugcauaacuccuaaugguucaauuccaaacgacaaacccuuucagaaugucaaccgaaucacauauggggcauguccuagauacgugaagcagaauacccugaaacuugccacuggaaugaggaacgugccagagaagcaaacacggggcaucuucggcgcuauugccggguuuaucgaaaauggaugggaggguauggucgacggcugguauggguuccgucaccagaacagugagggaaccggccaggcagcugaucugaaaagcacgcaagccgcgauugaccagauaaaugguaaguugaaccgccucaucgggaaaaccaacgaaaaguuccaccagauugagaaggaauuuuccgagguugaaggcagaauccaggaucuggagaaauacguggaggacacaaagaucgauuuauggucuuauaaugccgaacugcucguagcacuugagaaccaacauacuauugaccugaccgauagcgaaaugaauaaauuguucgagaagacaaagaagcagcuaagggaaaacgcugaggacaugggaaauggcugcuuuaagauauaccacaaaugugauaacgccugcaucgggucaauucggaauggaacuuaugaccaugauguguaccgagacgaggcucugaacaaucgcuuccagaucaagggugucgaacucaaaaguggcuacaaggacuggauucuguggaucuccuuugccauaagcugcuuccuucugugugugguuuugcucggguuuaucaugugggcaugccagaaaggaaacauuagauguaauaucugcauuuga

SEQ ID NO: 136030 - RNA, 1701 nt, Artificial Sequence; identical to SEQ ID NO: 129976
  derived and/or modified CDS sequence (opt3) from hemagglutinin__InfluenzaA__AEX34178

SEQ ID NO: 136031 - RNA, 1701 nt, Artificial Sequence
  derived and/or modified CDS sequence (opt3) from hemagglutinin__InfluenzaA__AEX34188
augaagaccaucauugcccugagcuacauacucugccuuguguucgcucagaaauuucccggcaacgacaauuccacagcaacucuguguuuggggcaccaugccgucccuaacggaacgaucguuaagaccauuacaaaugaucaaaucgaggugacuaacgcgaccgaauuaguacagucuucaaguacaggugagauuugcgacagcccacaccagauccuggauggcgaaaauuguacccuaauagacgcucuccugggggauccgcagugcgacggauuccaaaacaaaaauugggaucuuuuuguggagagauccaaggccuauucuaacuguuaccccuaugacgucccugauuacgcaucgcugaggucauugguggccagcaguggcacucucgaguucaauaacgaauccuuuaauuggacagguguuacccagaacgggacgucuagcgcuugcauccggcgcuccaauaacucauucuuuagucgacugaauuggcugacucaucucaaauucaaguauccagcauuaaacgugaccaugcccaacaaugagaacuuugacaagcuguacauuuggggaguccaccauccuggcacagauaaugaccagaucuuccuuuaugcccaggcuagcggccguauuacugugucuaccaaaagaucccaacagacaguaaucccaaacauagggucaaggccccggguucgcaauauuccuagcagaaucaguauuuacuggaccaucgugaagccaggagauaucuugcugauuaacucuacggguaaucuaauagccccgaggggcuacuuuaaaauccgguccggaaagagcucgauuaugcgcucugacgcgcccaucgggaaauguaacuccgaaugcauaacuccuaauggcucaauuccaaacgacaagcccuuccagaaugucaaccgaaucacauauggugcauguccuagauacgugaagcagaauacccucaaacuggccacugggaugaggaacgugccagagaagcaaacacggggaaucuuuggcgcuauugccggcuucaucgaaaaugggugggagggaauggucgaugguugguauggcuuccgucaccagaacagugaggggauuggacaggcagcugaccuuaaaagcacccaagccgcgauagaucagaucaacggcaagcugaaucgcuugauugguaaaacgaacgaaaaguuucaccagaucgagaaagaguucuccgaaguugaagggagaauccaggaccucgagaaguacguggaggauaccaagauugaccuguggucuuauaaugccgaauuacugguagcacucgagaaccaacauacaauagaucuuacugacagcgaaaugaauaaacuguuugagaagaccaaaaagcaguugagggaaaacgcugaggauaugggcaauggaugcuucaaaaucuaccacaagugugacaacgccugcauuggcucaauccggaaugggacauaugaucaugacguguaccgagacgaggcucuaaacaaucgcuuucagauuaagggagucgaacugaaaagugguuacaaggauuggauccucuggauauccuucgccaucagcugcuuucugcuuuguauugcacuguugggcuucaucaugugggccugccagaaagggaacauuagauguaauaucugcauauga

SEQ ID NO: 136032 - RNA, 1701 nt, Artificial Sequence; identical to SEQ ID NO: 130482
  derived and/or modified CDS sequence (opt3) from hemagglutinin__InfluenzaA__AEX34199

SEQ ID NO: 136033 - RNA, 1701 nt, Artificial Sequence
  derived and/or modified CDS sequence (opt3) from hemagglutinin__InfluenzaA__AEX34221
augaagaccaucauugcccugagcuacauacucugccuuguguucgcucagaaacugcccggcaucgacaacuccacagcaacuuuguguuuagggcaccaugccgucccuaauggaacgauuguuaagaccaucacaaacgaucaaauugaggugacuaaugcgaccgaacugguacagucuucaaguacagguggcaucugcgacagcccacaccagauacuagauggggagaacuguacccucaucgacgcucugcuuggagauccgcagugcgacggcuuucaaaauaaaaagugggaucuguucguggaaagauccaaagccuauucuaacuguuaccccuaugacgucccugauuacgcaucguugaggucacucguggccagcagugguacucuggaguuuaauaacgaauccuucaauuggacagggguuacccagaacggaacgucuagcgcuugcaagcggggcuccaauaacucauuuuucagucgccugaauuggcucacucauagcaaguuuaaauauccagcauuaaacgugaccaugcccaauaacgaggaguucgacaagcuguacauuuggggcguccaccauccugggacagauaacgaccagaucuuucuuuaugcccaggcuucuggacgaauuacuguguccaccaaacguucacaacagacaguaaucccaaauauagguagcagacccaggguucggaacauuccuagucgcaucucuauuuacuggaccaucgugaagccaggcgauaucuugcugauuaauuccacggggaaccuaauagccccgagaggauacuucaaaaucaggagcggcaagucgucuauuaugcgguccgacgcgcccaucgguaagugugacucagaaugcauaacuccuaaugggaguauuccaaacgauaaacccuuucagaaugucaaccgcaucacauauggagcauguccucgauacgugaagcagaauacccucaaacuggccacuggcaugagaaacgugccagagaagcaaacaaggggcaucuucggggcuauugccggauuuaucgaaaaugguugggagggcauggucgacgggugguauggauuccggcaccagaacagcgagggcauuggucaggcagcugaucuuaaauccacccaagccgcgauagaccagaucaaugggaagcugaaccguuugauuggcaaaacgaaugaaaaguuccaccagaucgagaaggaauuuucugagguugaaggacgcauccaggaucucgagaaauacguggaggacaccaagauugaucuguggagcuauaacgccgaauuacugguagcacucgagaaccaacauacaauagaccuuacugauucagaaaugaauaaacuguucgagaagaccaaaaagcaguugagagaaaacgcugaggacaugggcaaugggugcuuuaagaucuaccacaaaugugauaacgccugcauuggaaguaucaggaaugguacauaugaccaugacguguaccgggaugaggcucuaaacaaucgauuccagauuaagggcgucgaacugaaauccggguacaaggacuggauccucuggaucagcuuugccauaucuugcuuccugcuuuguguggcacuguugggauuuauuaugugggccugccagaaaggcaacauccgcuguaauauuugcaucuga

SEQ ID NO: 136034 - RNA, 1701 nt, Artificial Sequence; identical to SEQ ID NO: 129976
  derived and/or modified CDS sequence (opt3) from hemagglutinin__InfluenzaA__AEX34243

SEQ ID NO: 136035 - RNA, 1701 nt, Artificial Sequence; identical to SEQ ID NO: 136031
  derived and/or modified CDS sequence (opt3) from hemagglutinin__InfluenzaA__AEX34254

SEQ ID NO: 136036 - RNA, 1701 nt, Artificial Sequence; identical to SEQ ID NO: 129976
  derived and/or modified CDS sequence (opt3) from hemagglutinin__InfluenzaA__AEX34265

SEQ ID NO: 136037 - RNA, 1701 nt, Artificial Sequence
  derived and/or modified CDS sequence (opt3) from hemagglutinin__InfluenzaA__AEX34275
augaagaccaucauugcccugagcuacauacucugccuuguguucgcucagaaacugcccggcaucgacaacuccacagcaacuuuguguuuagggcaccaugccgucccuaauggaacgauuguuaagaccaucacaaacgaucaaauugaggugacuaaugcgaccgaacugguacagaacucuucaacagguggcaucugcgacaguccacaccagauacuagauggggagaauuguacccucaucgacgcucugcuuggagauccgcagugcgacggcuuucaaaacaaaaagugggaucuguucguggaaagaagcaaagccuauuccaauuguuaccccuaugacgucccugauuacgcaucuuugaggucgcucguggccucaagcgguacucuggaguuuaacaaugaaaguuucaacuggacagggguuacccagaauggaacguccucugcuugcaagcggggcagcaacaauuccuuuuucucacgccugaacuggcucacucauaguaaguuuaaauauccagcauuaaaugugaccaugcccaacaacgaggaguucgacaagcuguacauuuggggcguccuucacccugggacagauaaugaccagaucuuuuuguaugcccaggcuagcggacgaauuacugugucuaccaaacguucccaacagacaguaaucccaaacauagguucaagacccaggguucggaauauuccuagccgcaucaguauuuacuggaccaucgugaagccaggcgauauccugcuaauuaacucuacggggaaucucauagccccgagaggauacuucaaaaucagguccggcaagagcucgauuaugcggucugacgcgcccaucgguaaguguaacuccgaaugcauaacuccuaaugggucaauuccaaacgacaaacccuuucagaaugucaaccgcaucacauauggagcauguccucgauacgugaagcagaauacccugaaacuugccacuggcaugagaaacgugccagagaagcaaacaaggggcaucuucggggcuauugccggauuuaucgaaaaugguugggagggcauggucgaugggugguauggauuccggcaucagaacagugagggcauuggucaggcagcugaccugaaaagcacccaagccgcgauagaucagaucaaugggaaguugaaccgucucauuggcaaaacgaacgaaaaguuccaccagaucgagaaggaauuuuccgagguugaaggacgcauccaggaccuggagaaauacguggaggauaccaagauugacuuauggucuuauaaugccgaacugcucguagcacuugagaaccaacacacaauagaucugacugacagcgaaaugaauaaauuguucgagaagaccaaaaagcagcuaagagaaaacgcugaggauaugggcaaugggugcuuuaagaucuaccauaaaugugacaacgccugcauuggaucaaucaggaaugguacauaugaucacuacguguaccgggacgaggcucugaacaaucgauuccagauuaagggcgucgaacucaaaaguggguauaaggacuggauccuguggauauccuuugccaucagcugcuuccuucuguguguggcauugcucggauuuauuaugugggccugccagaaaggcaacauccgcuguaauauuugcaucuga

SEQ ID NO: 136038 - RNA, 1698 nt, Artificial Sequence; identical to SEQ ID NO: 130536
  derived and/or modified CDS sequence (opt3) from hemagglutinin__InfluenzaA__AEX34318

SEQ ID NO: 136039 - RNA, 1698 nt, Artificial Sequence
  derived and/or modified CDS sequence (opt3) from hemagglutinin__InfluenzaA__AEX34329
augaaggugaaacugcucguccuucugugcaccuucacagccacuuacgcugacacgaucuguauuggcuaucacgcaaacaauagcaccgauacaguugacacuguguuggagaagaacguaaccgugacacauuccgucaauuuacuggaaaacucucacaaugggaaacuaugccuccugaagggaauagcgccccuucagcuggguaacuguucaguggccggcuggaucuuggggaauccugagugcgaacuccugguuaguaaagagagcugguccuacauuguggaaaagccaaacccggagaauggaaccuguuaucccggccauuuugcugauuacgaggaacugagagagcaacucucuucggucagcucauucgaaagguuugagaucuucccuaaggagaguuccuggccaaaccacacugugacagguguaucugccagcugcucccauaauggggaaucaaguuuuuaucggaacuuacuguggcuuaccggcaaaaauggauuguaccccaaccugagcaagucuuaugcaaauaacaaagagaaggaaguucuagugcucuggggcguccaccacccuccaaacauuggggaccagaaagcccuguaccauacggagaaugcuuacguguccguggucucaagccacuauagucgcaaguucacucccgaaaucgcaaagcgaccuaaaguucgugaucaggagggaagaauaaacuacuauuggacccuucuggagccaggugacacaaucauuuuugaagccaauggcaacuugaucgcuccgagguacgccuucgcgcucucucggggguuuggauccggcauuaucaauagcaacgcacccauggauaagugugacgccaaaugccagacuccucaaggugcuauaaauucgucucugccauuccagaacgugcaucccguaaccauuggggaguguccuaaguaugugcgcuccgccaaauuaagaauggucacaggacugaggaauaucccaucaauucagagucggggccucuuuggcgcaaucgcuggguucaucgaaggagguuggaccggcaugguggaugggugguacggauaucaccaccagaacgagcaaggcagcgguuacgccgcggaccagaaguccacgcagaaugccauuaacgggauaacuaauaaaguuaacucugugaucgaaaagaugaauacacaguuuaccgcagucggcaaggaguucaacaaacuugagcgccgaauggaaaaccugaauaagaaaguggaugacggauucauugauaucuggacuuacaacgcugaguugcuaguacugcucgaaaaugagagaacacuggacuuucaugacagcaacguuaagaaucuuuaugaaaaagugaagucacaacugaagaacaaugccaaagagauaggcaacgggugcuucgaguuuuaccacaaguguaaugaugaaugcauggagagugucaaaaacggaaccuaugacuaccccaaguauuccgaagagagcaaauugaauagggagaagauugaaggugugaagcucgagucuaugggcgucuaccagauccuggcuaucuauucaacgguggccaguagcuuaguucugcuagugucccucggggcaauuucuuucuggaugugcucgaacggaagccugcagugucggaucugcauuuga

SEQ ID NO: 136040 - RNA, 1701 nt, Artificial Sequence
  derived and/or modified CDS sequence (opt3) from hemagglutinin__InfluenzaA__AEX34352
augaagaccaucauugcccugagcuacauacucugccuuguguucgcucagaaacugcccggcaacgacaauuccacagcaacuuuguguuuagggcaccaugccgucccuaacggaacgaucguuaagaccauuacaaaugaucaaaucgaggugacuaacgcgaccgaacugguacagucuucaaguacaggugagauuugcgacagcccacaccagauccuagauggcgaaaauuguacccucauagacgcucugcuuggggauccgcagugcgacggauuucaaaacaaaaagugggaucuguucguggagagauccaaagccuauucuaauuguuaccccuaugacgucccugauuacgcaucguugaggucacucguggccagcaguggcacucuggaauuuaacaaugaguccuucaacuggacagguguuacccagaaugggacgucuagcgcuugcauccggcgcuccaacaauucauuuuucagucgacugaacuggcucacucauuuaaaguuuaaguauccagcacugaaugugaccaugcccaacaacgagaaauucgacaaacuuuacauuuggggaguccaccauccuggcacagauaaugaccagaucuuuuuguaugcccaggcuagcggccguauuacugugucuaccaagagaucccaacagacaguaaucccaaacauagggucaaggccccggguucgcaauauuccuagcagaaucaguauuuacuggaccaucgugaagccaggagauauccugcuaauuaacucuacggguaaucucauagccccgaggggcuacuucaaaauccgguccggaaagagcucgauuaugcgcucugacgcgcccaucgggaaguguaacuccgaaugcauaacuccuaauggcucaauucugaacgacaaaccauuucagaaugucaaccgaaucacauauggugcaugucccagauacgugaagcagaauacccuuaaacuggccacugggaugaggaacgugccugagaagcaaacacggggaaucuucggcgcuauugccggcuuuaucgaaaaugggugggagggaauggucgaugguugguauggcuuccgucaccagaacagugaggggauuggacaggcagcugacuugaaaagcacccaagccgcgauagaucagaucaauggcaagcucaaccgccugauugguaaaacgaacgaaaaguuccaccagaucgagaaggaauuuuccgagguugaagggagaauccaggacuuagagaaauacguggaggauaccaagauugaccuguggucuuauaaugccgaacuccuuguagcacuggagaaccaacauacaauagauuugacugacagcgaaaugaauaaacuauucgagaagaccaaaaagcagcugagggaaaacgcugaggauaugggcaauggaugcuuuaagaucuaccacaaaugugacaacgccugcauuggcucaauccggaaugggacauaugaucaugacguguaccgagacgaggcucucaacaaucgcuuccagauuaagggagucgaacugaaaagugguuacaaggauuggauccuuuggauauccuuugccaucagcugcuuccuguuguguguggcacuccugggcuuuauuaugugggccugccagaaagggaacaucagauguaauauuugcaucuga

SEQ ID NO: 136041 - RNA, 1701 nt, Artificial Sequence; identical to SEQ ID NO: 130482
  derived and/or modified CDS sequence (opt3) from hemagglutinin__InfluenzaA__AEX34364

SEQ ID NO: 136042 - RNA, 1701 nt, Artificial Sequence; identical to SEQ ID NO: 130482
  derived and/or modified CDS sequence (opt3) from hemagglutinin__InfluenzaA__AEX34375

SEQ ID NO: 136043 - RNA, 1701 nt, Artificial Sequence
  derived and/or modified CDS sequence (opt3) from hemagglutinin__InfluenzaA__AEX34386
augaagaccaucauugcccugagcuacauacucugccuuguguucgcucagaaacugcccggcaacgacaauuccacagcaacuuuguguuuagggcaccaugccgucccuaacggaacgaucguuaagaccauuacaaaugaucaaaucgaggugacuaacgcgaccgaacugguacagucuucaaguacaggugagauuugcgacagcccacaccagauccuagauggcgaaaauuguacccucauagacgcucugcuuggggauccgcagugcgacggauuucaaaacaaaaagugggaucuguucaucgagagauccaaagccuauucuaauuguuaccccuaugacgugccugauuacgcaucguugaggucacucgucgccagcaguggcacucuggaauuuaacaaugaguccuucaacuggacaggugugacccagaaugggacgucuagcgcuugcauucggcgcuccaacaauucauuuuucagucgacugaacuggcucacucauuuaaaguuuaaguauccagcacugaauguuaccaugcccaacaacgagcaguucgacaaacuuuacaucuggggagugcaccauccuggcacagauaaugaccagaucuuuuuguaugcccaagcuagcggccguauuacugucucuaccaagagaucccagcagacagugauaccaaacauugggucaaggccccggguacgcaauaucccuagcagaauuaguaucuacuggaccaucguuaaaccaggagauauucugcuaauaaacucuacggguaaucucaucgccccgaggggcuacuucaagauucgguccgggaaaagcucgaucaugcgcucugacgcgcccauaggaaaguguaacuccgaaugcauuacuccuaauggcucaaucccaaacgacaagcccuuucagaaugugaaccgaaucacauauggugcauguccuagauacgucaaacaaaauacccugaagcuggccacugggaugaggaacgugccagagaaacagacacggggaauuuucggcgcuaucgccggcuuuauugaaaaugggugggagggaaugguggaugguugguauggcuuccgucaccagaacagugaggggcgcggacaagcagcugaccuuaagagcacccaggccgcgauagaucagaucaauggcaaauugaacagacucauugguaagacgaacgaaaaauuccaccagaucgagaaggaauuuuccgaggucgaagggaggauccaagaccuggagaaguacguugaggauaccaaaauugacuuauggucuuauaaugccgaacugcucguggcacuugagaaccagcauacaauagaucugacugacagcgaaaugaauaaguuguucgagaaaaccaagaaacagcuacgggaaaacgcugaggauaugggcaauggaugcuuuaagaucuaccacaagugugacaacgccugcauuggcucaauccgaaaugggacauaugaucaugacguauaccgcgacgaggcucugaacaauagauuccagauuaaaggaguggaacucaagagugguuacaaagauuggauccuguggauauccuuugccaucagcugcuuccuucugugugucgcauugcucggcuuuauuaugugggccugccaaaaggggaacaucagguguaauauuugcaucuga

SEQ ID NO: 136044 - RNA, 1701 nt, Artificial Sequence
  derived and/or modified CDS sequence (opt3) from hemagglutinin__InfluenzaA__AEX34407
augaagaccaucauugcccugagcuacauacucugccuuguguucgcucagaaacugcccggcaacgacaauuccauggcaacauuguguuuagggcaccaugccgucccuaacggaacuaucguuaagacgauuaccaaugaucaaaucgaggugacaaacgcgacugaacugguacagucuucaaguaccggugagauuugcgacagcccacaccagauccuagauggcgaaaauuguacacucauagacgcucugcuuggggauccgcagugcgacggauuucaaaacaaaaagugggaucuguucguggagagauccaaagccuauucuaauuguuaccccuaugacgucccugauuacgcaucguugaggucacucguggccagcaguggcacccuggaauuuaacaaugaguccuucaacuggacugguguuacacagaaugggaccucuagcgcuugcauccggcgcuccaacaauucauuuuucagucgacugaacuggcucacgcauuuaaaguuuaaguauccagcacugaaugugacuaugcccaacaacgagcaguucgacaaacuuuacauuuggggaguccaccauccuggcaccgauaaugaccagaucuuuuuguaugcccaagcuagcggccguauuacagugucuacuaagagaucccagcagaccguaaucccaaacauagggucaaggccccggguucgcaauauuccuagcagaaucaguauuuacuggacaaucgugaaaccaggagauauccugcuaauuaacucuaccgguaaucucauagccccgaggggcuacuucaagauccuguccgggaaaagcucgauuaugcggucugacgcgcccaucggaaaguguaacuccgaaugcauaacgccuaauggcucaauuccaaacgacaagcccuuucagaaugucaaccgcaucacuuauggugcauguccucgauacgugaaacaaaauacacuuaagcuggccaccgggaugagaaacgugccagagaaacagacuaggggaaucuucggcgcuauugccggcuuuaucgaaaaugggugggagggaauggucgaugguugguauggcuuccggcaccagaacagugaggggcguggacaagcagcugaccucaagagcacacaggccgcgauugaucagauaaauggcaaauugaaccgccugaucgguaagaccaacgaaaaauuccaccagauugagaaggaauuuuccgagguugaagggagaauccaagacuuagagaaguacguggaggauacgaaaguagaccuguggucuuauaaugccgaacuccuuguggcacuggagaaccagcauaccaucgauuugacagacagcgaaaugaauaagcuauucgagaaaacuaagaaacagcugagggaaaacgcugaggauaugggcaauggaugcuuuaagauuuaccacaagugugacaacgccugcauaggcucaauccggaaugggaccuaugaucaugacgucuaccgagacgaggcucucaacaaucgcuuccagauuaaaggaguggaacugaagagugguuacaaagauuggauccuuuggauuuccuuugccaucagcugcuuccuguuguguguugcacuccugggcuuuauaaugugggccugccaaaaggggaacaucagauguaauauuugcaucuga

SEQ ID NO: 136045 - RNA, 1698 nt, Artificial Sequence
  derived and/or modified CDS sequence (opt3) from hemagglutinin__InfluenzaA__AEX34440
augaaggugaaacugcucguccuucugugcaccuucacagccacuuacgcugacacgaucuguauuggcuaucacgcaaacaauagcaccgauacaguugacacuguguuggagaagaacguaaccgugacacauuccgucaauuuacuggaagauucucacaacgggaaacuaugccuccugaagggaauagcgccccuucagcuggguaauuguucaguggccggcuggaucuuggggaacccugagugcgaacuccugaccaguagagagagcugguccuacauuguugaaaaaccaaauccggagaacggaacuuguuaucccggccauuuugcugacuacgaggaacugagggagcaacucucuucggugagcucauucgaacgguuugagaucuucccuaaggagaguuccuggccaaaucacacaaccacgggugucucugccagcugcucccauaacggggaaucaaguuuuuauaagaauuuacuguggcuuacuggaaagaacggcuuguaccccaaucugagcaagucuuaugcaaacaauaaagagaaggaagugcuaguacucuggggcguucaccacccuccaaacauugggaaccagcgcgcccuguaccauaccgagaaugcuuacguguccgucgugucaagccacuauagucgaaaauucacacccgaaaucgcaaagcguccuaaggugagagaucaggagggaaggauaaacuacuauuggacucuucuggagccaggugacaccaucauuuuugaagccaauggcaacuugaucgcuccgcgguacgccuucgcgcucucucgcggguuuggauccggcauuaucaauagcaacgcacccauggaugagugugacgccaaaugccagacaccucaaggugcuauaaauucgucucugccauuccagaacguccaucccguuaccauuggggaauguccuaaguaugugagauccgccaaauuaaggaugguaacgggacugcggaauaucccaucaauucagagucgcggccucuuuggcgcaaucgcuggguucaucgagggagguuggacuggcaugguggaugggugguacggauaucaccaccagaacgaacaaggcagcgguuacgccgcggaccagaaguccacacagaaugccauuaacgggauaaccaauaaagucaacucugugaucgagaagaugaauacucaguuuacagcaguuggcaaagaguucaacaaacuugaacgaagaauggagaaccugaauaagaaaguggaugacggauucauugauaucuggaccuacaacgcugaauugcuaguccugcucgagaaugaaaggacgcuggacuuucaugacagcaacgugaagaaucuuuaugagaaaguaaagucacaacugaaaaacaaugccaaggagauaggcaacgggugcuucgaauuuuaccacaaguguaaugaugagugcauggaaaguguuaaaaacggaaccuaugacuaccccaaguauuccgaggagagcaaauugaaucgggaaaagauugauggugugaaacucgagucuaugggcgucuaccagauccuggcuaucuauucaacaguggccaguagcuuaguccugcuagugucccucggggcaauuucuuucuggaugugcucgaacggaagccugcagugucguaucugcauuuga

SEQ ID NO: 136046 - RNA, 1698 nt, Artificial Sequence; identical to SEQ ID NO: 128347
  derived and/or modified CDS sequence (opt3) from hemagglutinin__InfluenzaA__AEX34462

SEQ ID NO: 136047 - RNA, 1698 nt, Artificial Sequence
  derived and/or modified CDS sequence (opt3) from hemagglutinin__InfluenzaA__AEX34473
augaaggugaaacugcucguccuucugugcaccuucacagccacuuacgcugacacgaucuguauuggcuaucacgcaaacaauagcaccgauacaguugacacuguguuggagaagaacguaaccgugacacauuccgucaauuuacuggaagauucucacaacgggaaacuaugccuccugaagggaauagcgccccuucagcuggguaauuguucaguggccggcuggaucuuggggaacccugagugcgaacuccugauuaguaaagagagcugguccuacaucguugaaaccccaaauccggagaacggaacuuguuaucccggcuacuuugcugacuaugaggaacugagagagcaacucucuucggugagcucauucgaaagguuugagauuuucccuaaggagaguuccuggccaaaucauacagucaccggugugucugccagcugcucccacaacgggaagucaaguuuuuaccggaauuuacuguggcuuacgggaaaaagcggcuuguaucccaaccugucuaaguccuacgcaaauaacaaagaaaaggagguacuuguucucuggggcgugcaucacccuccaaauaucggggaucagcgcgcccuguaccacacugaaaacgcuuaugucucaguggugagcagucauuacucucgacguuucacccccgagauagcaaaaagaccuaaggucagggaccaggaaggacggaucaacuauuacuggacacuucuggagccaggugauacuauuaucuuugaggccaauggcaacuugauugcuccgcgcuaugccuucgcgcucuccagaggguuuggaagcggcaucauaaccucgaaugcacccauggacgaaugugaugccaagugccagacaccucaaggugcuauuaacucuucccugccauuccagaauguucaccccgugaccaucggggaguguccuaaauacguaaagucagccaaauuaaggauggugacgggacugcggaacauuccaaguauccagagccgcggccucuuuggcgcaaucgcuggguucauugaaggagguuggacuggcauggucgacgggugguauggauaccaucaccagaaugagcaaggcuccgguuacgccgcggaucagaagucuacacagagcgccauaaacgggaucaccaauaaagugaacucaguuauugaaaagaugaauacucaguuuacagcagugggcaaagaguucaacaagcuagagcgaagaauggaaaaucugaacaagaaagucgacgauggauucuuggacaucuggaccuauaaugcugagcuacuggugcuccuggaaaacgagaggacgcuugacuuucacgauaguaacguaaagaaucuguacgaaaaaguuaagucccaauugaaaaacaaugccaaggagauaggcaacgggugcuucgaguuuuaucauaaguguaaugacgaaugcauggagagcgugaaaaacggaaccuacgauuaucccaaguacucugaagagucaaaacucaaucgggagaagauugacggugucaaacuggaaaguaugggcguguaucagaucuuagcuaucuacagcacagucgccuccucucuggugcuacucguuucgcugggggcaauuagcuucuggaugugcuccaacggaucacuucagugucguaucugcauuuga

SEQ ID NO: 136048 - RNA, 1698 nt, Artificial Sequence
  derived and/or modified CDS sequence (opt3) from hemagglutinin__InfluenzaA__AEX34495
augaaggugaaacugcucguccuucugugcaucuucaccgccacauacgcugacacuauuuguauaggcuaucacgcaaacaauagcacggauaccguugacacaguguuggagaagaacguaacugugacccauuccgucaauuuacuggaagauucucacaacgggaaacuaugccuccugaagggaaucgcgccccuucagcuggguaauuguucaguggccggcuggauuuuggggaacccugagugcgaacuccugaucaguaaagagagcugguccuacauuguugaaacaccaaauccggagaacggaaccuguuaucccggcuacuuugcugacuaugaggaacugagagagcaacucucuucggugagcucauucgaaagguuugagaucuucccuaaggagaguuccuggccaaaucauacugucacaggugugucugccagcugcucccacaacgggaagucaaguuuuuaccggaauuuacuguggcuuaccggaaaaagcggcuuguaucccaaccugucuaaguccuacgcaaauaacaaagaaaaggagguacuuguucucuggggcgugcaucacccuccaaauauagggguccagcgcgcccuguaccacacggaaaacgcuuaugugucaguggucagcagucauuacucucgacguuucacucccgagaucgcaaaaagaccuaagguuagggaucaggaaggacggauuaacuauuacuggacccuucuggagccaggugacacaaucauuuuugaggccaauggcaacuugaucgcuccgcgcuaugccuucgcgcucuccagaggguuuggaagcggcauaauuacuucgaaugcacccauggaugaaugugacgccaagugccagaccccucaaggugcuaucaacucuucccugccauuccagaaugugcaccccguaacaauuggggaguguccuaaauacgugaagucagccaaauuaaggauggucaccggacugcggaacaucccaaguauccagagccgcggccucuuuggcgcaauugcuggguucauagaaggagguuggacgggcaugguggaugggugguauggauaccaucaccagaaugagcaaggcuccgguuacgccgcggaccagaagucuacucagaacgccaucaaugggauuacaaacaaaguuaauagcgugaucgaaaagaugaacacccaguuuacugcagucggcaaagaguucaauaagcuagagcgaagaauggaaaaccugaauaagaaaguggaugacggauucuuggauauauggacauauaacgcugagcuacugguacuccuggaaaacgagaggacccuugacuuucacgacucaaauguuaagaaccuguacgaaaaagugaagagucaauugaaaaauaacgccaaggagauuggcaaugggugcuucgaguuuuaucauaaguguaacgaugaaugcauggaguccgucaaaaauggaacguacgacuaucccaaguacagcgaagagucuaaacucaaccgggagaagaucgauggugugaaacuggaaucaaugggcgucuaucagaucuuagcuauuuacaguaccguggccagcucccugguucuacucgugucucugggggcaaucucguucuggaugugcagcaauggaucccuucagugucguauuugcauauga

SEQ ID NO: 136049 - RNA, 1698 nt, Artificial Sequence; identical to SEQ ID NO: 136048
  derived and/or modified CDS sequence (opt3) from hemagglutinin__InfluenzaA__AEX34506

SEQ ID NO: 136050 - RNA, 1698 nt, Artificial Sequence; identical to SEQ ID NO: 136048
  derived and/or modified CDS sequence (opt3) from hemagglutinin__InfluenzaA__AEX34517

SEQ ID NO: 136051 - RNA, 1698 nt, Artificial Sequence; identical to SEQ ID NO: 136048
  derived and/or modified CDS sequence (opt3) from hemagglutinin__InfluenzaA__AEX34528

SEQ ID NO: 136052 - RNA, 1698 nt, Artificial Sequence; identical to SEQ ID NO: 136048
  derived and/or modified CDS sequence (opt3) from hemagglutinin__InfluenzaA__AEX34539

SEQ ID NO: 136053 - RNA, 1698 nt, Artificial Sequence; identical to SEQ ID NO: 136048
  derived and/or modified CDS sequence (opt3) from hemagglutinin__InfluenzaA__AEX34550

SEQ ID NO: 136054 - RNA, 1698 nt, Artificial Sequence; identical to SEQ ID NO: 136048
  derived and/or modified CDS sequence (opt3) from hemagglutinin__InfluenzaA__AEX34561

SEQ ID NO: 136055 - RNA, 1698 nt, Artificial Sequence; identical to SEQ ID NO: 136048
  derived and/or modified CDS sequence (opt3) from hemagglutinin__InfluenzaA__AEX34572

SEQ ID NO: 136056 - RNA, 1698 nt, Artificial Sequence; identical to SEQ ID NO: 136048
  derived and/or modified CDS sequence (opt3) from hemagglutinin__InfluenzaA__AEX34583

SEQ ID NO: 136057 - RNA, 1698 nt, Artificial Sequence; identical to SEQ ID NO: 136048
  derived and/or modified CDS sequence (opt3) from hemagglutinin__InfluenzaA__AEX34594

SEQ ID NO: 136058 - RNA, 1698 nt, Artificial Sequence; identical to SEQ ID NO: 136048
  derived and/or modified CDS sequence (opt3) from hemagglutinin__InfluenzaA__AEX34605

SEQ ID NO: 136059 - RNA, 1698 nt, Artificial Sequence; identical to SEQ ID NO: 136048
  derived and/or modified CDS sequence (opt3) from hemagglutinin__InfluenzaA__AEX34616

SEQ ID NO: 136060 - RNA, 1698 nt, Artificial Sequence; identical to SEQ ID NO: 136048
  derived and/or modified CDS sequence (opt3) from hemagglutinin__InfluenzaA__AEX34627

SEQ ID NO: 136061 - RNA, 1698 nt, Artificial Sequence; identical to SEQ ID NO: 136048
  derived and/or modified CDS sequence (opt3) from hemagglutinin__InfluenzaA__AEX34638

SEQ ID NO: 136062 - RNA, 1698 nt, Artificial Sequence
  derived and/or modified CDS sequence (opt3) from hemagglutinin__InfluenzaA__AEX34650
augaaggugaaacugcucguccuucugugcaccuucacagccacuuacgcugacacgaucuguauuggcuaucacgcaaacaauagcaccgauacaguugacacuguguuggagaagaacguaaccgugacacauuccgucaauuuacuggaagauucucacaacgggaaacuaugccuccugaagggaauagcgccccuucagcuggguaauuguucaguggccggcuggaucuuggggaacccugagugcgaacuccugauuaguaaagagagcugguccuacaucguugaaaccccaaauccggagaacggaacuuguuaucccggcuacuuugcugacuaugaggaacugagagagcaacucucuucggugagcucauucgaaagguuugagauuuucccuaaggagaguuccuggccaaaucauacagucaccggugugucugccagcugcucccacaacgggaagucaaguuuuuaccggaauuuacuguggcuuacgggcaaaaacggauuguaucccaaucugagcaagucuuacgcaaacaauaaagaaaaggagguucuaguacucuggggcgugcaucacccuccaaacaucgggaaccagcgcucccuguaccacacugaaaaugccuaugucucaguggugagcagucauuacucucgacguuucacccccgagauagcuaaaagaccuaaggucagggaucaggaaggacggaucaacuauuacuggacacuucuggagccaggugacacuauuaucuuugaggcaaauggcaacuugauugccccgcgcuucgcuuuugcccucuccagaggguucggaagcggcaucauaaccucgaaugcgcccauggaugaaugugacgcaaagugccagacaccucaaggugccauuaacucuucccugccauuucagaauguucaccccgugaccaucggggaguguccuaaauauguaaggucagcuaaguuacggauggugacgggacugcgcaacauuccaaguauccagagccgaggccucuucggcgccaucgcaggguuuauugaaggagguuggacuggcauggucgaugggugguacggauaucaucaccagaaugagcaaggcuccgguuacgcugccgaccagaaaucuacacagaacgcgauaaaugggaucaccaacaaggugaauagcguuauugaaaagaugaacacucaguucacagccgugggcaaagaguucaauaaacuugagagaaggauggaaaaccugaacaagaaggucgaugacggauuuuuggauaucuggaccuacaaugcagagcuacuggugcuccuggaaaacgagcggacgcuugacuuccacgacucaaauguuaaaaaccuguaugaaaagguaaaaagucaauugaagaauaacgcuaaagagauaggcaaugggugcuuugaguucuaccauaaguguaacgaugaaugcauggaguccgugaagaauggaaccuaugacuaccccaaauauagcgaagagucuaagcucaaccgugagaaaauugauggugucaagcuggaaucaaugggcguguaccagaucuuagccaucuauaguacagucgcuagcucccuggugcuacucguuucucugggggccauuucguuuuggaugugcagcaauggaucccuucagugucgcaucugcauuuga

SEQ ID NO: 136063 - RNA, 1698 nt, Artificial Sequence
  derived and/or modified CDS sequence (opt3) from hemagglutinin__InfluenzaA__AEX34661
augaaggugaaacugcucguccuucugugcaccuucacagccacuuacgcugacacgaucuguauuggcuaucacgcaaacaauagcaccgauacaguugacacuguguuggagaagaacguaaccgugacacauuccgucaauuuacuggaagauucucacaacgggaaacuaugccuccugaagggaauagcgccccuucagcuggguaauuguucaguggccggcuggaucuuggggaacccugagugcgaacuccugauuaguaaagagagcugguccuacaucguugaaaccccaaauccggagaacggaacuuguuaucccggcuacuuugcugacuaugaggaacugagagagcaacucucuucggugagcucauucgaaagguuugagauuuucccuaaggagaguuccuggccaaaucauacagucaccggugugucugccagcugcucccacaacgggaagucaaguuuuuaccggaauuuacuguggcuuacgggcaaaaagggauuguaucccaaccugagcaaaucuuacgcaaauaacaaggaaaaagagguucuaguacucuggggcgugcaucacccuccaaauaucggggaucagcgcgcccuguaccacacugaaaacgcuuaugucuccguggugucaagccauuacagucgacguuucacccccgagauagcaaagagaccuaaggucagggaccaggaaggacggaucaacuauuacuggacacuucuggagccaggugauacuauuaucuuugaggccaauggcaacuugauugcuccgcgcuucgccuuugcgcucucuagaggguucggauccggcaucauaaccagcaaugcacccauggacgaaugugaugccaaaugccagacaccucaaggugcuauuaacucgucucugccauuucagaauguucaccccgugaccaucggggaguguccuaaguauguaagguccgccaaauuacggauggcaacgggacugcgcaacauuccaucaauccagagucgaggccucuucggcgcuaucgccggguuuauugaaggagguuggacuggcaugguggacgggugguacggauaucaucaccagaaugagcaaggcagcgguuacgcggccgaucagaaguccacacagaacgcaauaaaugggaucaccaaaaaggucaacucugugauugaaaagaugaauacucaguucacagcuguuggcaaggaguucagcaaacuugagagaaggauggaaaaccugaauaaaaagguggacgauggauuuuuggacaucuggaccuacaacgccgagcuacugguccuccuggaaaaugagcggacgcuugacuuccacgauucaaacgugaaaaaccuguaugaaaagguaaaaagucaauugaagaauaacgcuaaggagauaggcaaugggugcuuugaguucuaccauaaauguaacgacgaaugcauggaguccguuaagaauggaaccuaugauuaccccaaauauagcgaagagucuaagcucaaccgugagaaaauugacggugugaagcuggaaucaaugggcgucuaccagaucuuagccaucuauaguacaguggcaagcucccugguccuacucgugucucugggggccauuucguuuuggaugugcagcaauggaucccuucagugucgcaucugcauuuga

SEQ ID NO: 136064 - RNA, 1698 nt, Artificial Sequence
  derived and/or modified CDS sequence (opt3) from hemagglutinin__InfluenzaA__AEX34672
augaaggugaaacugcucguccuucugugcaccuucacagccacuuacgcugacacgaucuguauuggcuaucacgcaaacaauagcaccgauacaguugacacuguguuggauaagaacguaaccgugacacauuccgucaauuuacuggaggacucucacaacgggaaacuaugccuccugaagggaauagcgccccuucagcuggguaauuguucaguggccggcuggaucuuggggaacccugaaugcgagcuccugauuaguagagaaagcugguccuacaucguugagaaaccaaauccggaaaacggaaccuguuaucccggccauuuugcugauuacgaggagcugagggaacaacucucuucggugagcucauucgagcgguuugaaauuuucccuaaggagaguuccuggccaaaucacacuacaaccggugucucugccagcugcucccaugacggggagucaaguuuuuauaagaacuuacuguggcuuacgggaaagaauggcuuguaccccaaccugagcaagucuuaugcaaauaacaaagaaaaggaggugcuaguacucuggggcguucaccacccuccaaauaucggggugcagcgcgcccuguaccauacugaaaacgcuuacgucuccguggugucaagccacuauagucgaaaauucacccccgagauagcaaagcguccuaaggucagagaucaggaaggaaggaucaacuacuauuggacacuucuggagccaggugacacuauuaucuuugaggccaauggcaacuugauugcuccgcgguacgccuucgcgcucucucgcggguuuggauccggcaucauaaauagcaacgcacccauggaugaaugugacgccaaaugccagaccccucaaggugcuauuaauucgucucugccauuccagaacguucaucccgugacaaucggggaguguccuaaguauguaagauccgccaaauuaaggauggugaccggacugcggaauauuccaucaauccagagucgcggccucuuuggcgcaaucgcuggguucauugaaggagguuggacgggcauggucgaugggugguacggauaucaccaccagaacgagcaaggcagcgguuacgccgcggaccagaaguccacucagaaugccauaaacgggaucacaaauaaagugaacucuguuauugaaaagaugaauacccaguuuacugcagugggcaaagaguucaacaaacuugagcgaagaauggaaaaucugaacaagaaagucgaugacggauucaucgacauauggacauacaacgcugaguugcuagugcugcucgaaaaugagaggacccuggauuuucaugacagcaacguaaagaaucuuuaugaaaaaguuaagucacaacugaaaaacaaugccaaggagauuggcaacgggugcuucgaguuuuaccacaaguguaaugaugaaugcauggagagugugaaaaacggaacguaugacuaccccaaguauuccgaagagagcaaauugaaucgggagaagaucgauggugucaaacucgaaucuaugggcguguaccagauccuggcuauuuauucaaccgucgccaguagcuuagugcugcuaguuucccucggggcaaucucuuucuggaugugcucgaacggaagccugcagugucguauuugcauauga

SEQ ID NO: 136065 - RNA, 1698 nt, Artificial Sequence
  derived and/or modified CDS sequence (opt3) from hemagglutinin__InfluenzaA__AEX34683
augaaggugaaacugcucguccuucugugcaccuucacagccacuuacgcugacacgaucuguauuggcuaucacgcaaacaauagcaccgauacaguugacacuguguuggagaagaacguaaccgugacacauuccgucaauuuacuggaagauucucacaacgggaaacuaugccuccugaagggaauagcgccccuucagcuggguaauuguucaguggccggcuggaucuuggggaacccugagugcgaacuccugauuaguagagagagcugguccuacaucguugaaaaaccaaauccggagaacggaaccuguuaucccggccauuuugcugacuacgaggaacugagggagcaacucucuucggugagcagcuucgaacgguuugagauuuucccuaaggagaguuccuggccauaucacacuacaaccggugucucugccagcugcucccauaauggggaaucaaguuuuuacaagaacuuacuguggcuuacgggaaagaauggcuuguaucccaaccugagcaagucuuacgcaaauaacaaagagaaggaagugcuaguacucuggggcguucaccacccuccaaauaucggggaucagcgcgcccuguaccauacugagaacgcuuauguguccgucgugucaagccacuacagucgaaaauucacccccgaaauagcaaagcguccuaaggugagagaccaggagggaaggaucaacuauuacuggacacuucuggagccaggugauacuauuaucuuugaagccaauggcaacuugauugcuccgcgguaugccuucgcgcucucucgcggguuuggauccggcaucauaaauagcaacgcacccauggacgagugugaugccaaaugccagaccccucaaggugcuauuaauucgucucugccauuccagaacguccaucccguuacaaucggggaauguccuaaguacgugagauccgccaaauuaaggaugguaaccggacugcggaauauuccaucaauccagagucgcggccucuuuggcgcaaucgcuggguucauugagggagguuggacgggcaugguggacgggugguauggauaccaccaccagaacgaacaaggcuuugguuacgccgcggaucagaagucaacucagaaugccauaaacgggaucacaaauaaagucaacuccgugauugagaagaugaauacccaguucacugcaguuggcaaagaguucaacaaacuugaacgaagaauggagaaucugaacaagaaaguggacgauggauuuaucgacauauggacauauaacgcugaauugcuaguccugcucgagaaugaaaggacccuggacuuccaugauucuaacgugaagaaucuuuacgagaaaguaaagagccaacugaaaaacaaugccaaggagauuggcaacgggugcuuugaguucuaucacaaguguaaugacgaaugcauggaaucaguuaaaaacggaacguacgauuaucccaaguacagugaggaguccaaauugaaucgggaaaagaucgacggugugaaacucgagagcaugggcgucuaucagauccuggcuauuuacucuaccguggccucaaguuuaguccugcuagugagccucggggcaaucuccuuuuggaugugcucuaacggaucgcugcagugucguauuugcauauga

SEQ ID NO: 136066 - RNA, 1698 nt, Artificial Sequence
  derived and/or modified CDS sequence (opt3) from hemagglutinin__InfluenzaA__AEX34757
augaaggugaaacugcucguccuucugugcaccuucacagccacuuacgcugacacgaucuguauuggcuaucacgcaaacaauagcaccgauacaguugacacuguguuggagaagaacguaaccgugacacauuccgucaauuuacuggaagauucucacaacgggaaacuaugccuccugaagggaauagcgccccuucagcuggguaauuguucaguggccggcuggaucuuggggaacccugagugcgaacuccugauuaguagagagagcugguccuacaucguugaaaaaccaaauccggagaacggaaccuguuaucccggccauuuugcugacuacgaggaacugagggagcaacucucuucggugagcucauucgaacgguuugagauuuucccuaaggagaguuccuggccaaaucacacuacaaccggugucucugccagcugcucccauaacgggggaucaaguuuuuauaagaauuuacuguggcuuacgcgcaaaaacggcuuguaccccaaucugagcaagucuuaugcaaacaauaaagaaaaggaggugcuaguacucuggggcguucaccacccuccaaacaucggggaucagcgagcccuguaccauacugaaaacgcuuacguguccgucgugucaagccacuauagucguaaauucacccccgagauagcaaagagaccuaaggugagggaccaggaaggacggaucaauuacuauuggacacuucuggagccaggugauacuauuaucuuugaggccaacggcaauuugauugcuccgcgcuacgccuucgcgcucucuagaggguuuggauccggcaucauaaacagcaaugcacccauggacgaaugugaugccaaaugccagaccccucaaggugcuauuaacucgucucugccauuccagaauguccaucccguuacaaucggggaguguccuaaguaugugagguccgccaaauuacggaugguaaccggacugcgcaacauuccaucaauccagagucgaggccucuuuggcgcaaucgcuggguucauugaaggagguuggacgggcaugguggacgggugguacggauaucaccaccagaaugagcaaggcagcgguuacgccgcggaucagaaguccacucagaacgccauaaaugggaucacaaacaaagucaauucugugauugaaaagaugaacacccaguuuacugcaguuggcaaagaguucaauaaacuugagagaaggauggaaaaccugaacaagaagguggacgauggauucaucgacauauggacauacaaugcugaguugcuaguccugcucgaaaacgagcggacccuggacuuucaugauagcaaugugaagaaccuuuaugaaaaaguaaagucacaacugaaaaauaacgccaaggagauuggcaaugggugcuucgaguuuuaccacaaguguaacgacgaaugcauggagaguguuaaaaauggaacguaugauuaccccaaguauuccgaagagagcaaauugaaccgugagaagaucgacggugugaaacucgaaucuaugggcgucuaccagauccuggcuauuuauucaaccguggccaguagcuuaguccugcuagugucccucggggcaaucucuuucuggaugugcucgaauggaagccugcagugucgcauuugcauauga

SEQ ID NO: 136067 - RNA, 1698 nt, Artificial Sequence
  derived and/or modified CDS sequence (opt3) from hemagglutinin__InfluenzaA__AEX34768
augaaggugaaacugcucguccuucugugcaccuucacagccacuuacgcugacacgaucuguauuggcuaucacgcaaacaauagcaccgauacaguugacacuguguuggagaagaacguaaccgugacacauuccgucaauuuacuggaagauucucacaacgggaaacuaugccuccugaagggaauagcgccccuucagcuggguaauuguucaguggccggcuggaucuuggggaacccugagugcgaacuccugauuaguagagagagcugguccuacaucguugaaaaaccaaauccggagaacggaaccuguuaucccggccauuuugcugacuacgaggaacugagggagcaacucucuucggugagcucauucgaacgguuugagauuuucccuaaggauaguuccuggccaaaucacacuacaaccggugucucugccagcugcucccauaacggggagucaaguuuuuauaagaauuuacuguggcuuacgggaaagaacggcuuguaccccaaucugagcaagucuuaugcaaacaauaaagaaaaggaggugcuaguacucuggggcguucaccacccuccaaacaucggggaccagcgcgcccuguaccauacugaaaacgcuuacguguccgucgugucaagccacuauagucgaaaauucacccccgagauagcaaagcguccuaaggugagagaucagggagguaggaucaauuacuauuggacacuucuggaaccaggcgacacuauuaucuuugaggccaacgggaauuugauugcuccgcgguacgccuucgcgcucucucgcggauuuggcuccgguaucauaaacagcaaugcacccauggaugagugugacgccaaaugccagaccccucaaggggcuauuaacucgucucugccauuccagaauguccaucccguuacaaucggagaauguccuaaguaugugagauccgccaaauuaaggaugguaaccggccugcggaacauuccaucaauccagagucgcggccucuuuggggcaaucgcuggauucauugaggguggcuggacggggaugguggauggaugguacggcuaucaccaccagaaugaacaagguagcggguacgccgcggaccagaaguccacucagaacgccauaaauggcaucacaaacaaagucaauucugugauugagaagaugaacacccaguuuacugcaguuggaaaagaguucaauaaacuugaacgaagaauggagaaccugaacaagaaaguggaugacggcuucaucgacauauggacauacaaugcugaauugcuaguccugcucgagaacgaaaggacccuggauuuucaugacagcaaugugaagaaccuuuaugagaaaguaaagucacaacugaaaaauaacgccaaggaaauugggaauggaugcuucgaguuuuaccacaaguguaacgaugagugcauggaaaguguuaaaaaugguacguaugacuaccccaaguauuccgaggaaagcaaauugaaccgggagaagaucgauggcgugaaacucgagucuaugggggucuaccagauccuggcuauuuauucaaccguggccaguagcuuaguccugcuagugucccucggagcaaucucuuucuggaugugcucgaauggcagccugcagugucguauuugcauauga

SEQ ID NO: 136068 - RNA, 1698 nt, Artificial Sequence
  derived and/or modified CDS sequence (opt3) from hemagglutinin__InfluenzaA__AEX34779
augaaggugaaacugcucguccuucugugcaccuucacagccacuuacgcugacacgaucuguauuggcuaucacgcaaacaauagcaccgauacaguugacacuguguuggagaagaacguaaccgugacacauuccgucaauuuacuggaaaacucucacaaugggaaacuaugccuccugaagggaauagcgccccuucagcuggguaacuguucaguggccggcuggaucuuggggaauccugagugcgaacuccugauuaguaaagagagcugguccuacaucguugaaaagccaaacccggagaauggaaccuguuaucccggccauuuugcugauuacgaggaacugagagagcaacucucuucggugagcucauucgaaagguuugagauuuucccuaaggagaguuccuggccaaaccacacugucacaggugugucugccagcugcucccauaauggggaacggucauuuuaucgcaacuuacuguggcuuaccggaaagaauggcuuguaccccaaccugaguaagagcuaugcaaauaacaaagagaaggaagugcuaguucucuggggcgugcaccacccuccaaacaucgggaaucagaaagcccuguaccauacggagaacgcuuacgucucugugguguccucacacuauagccgaaaguucacucccgaaauagcaaagcguccuaaagucagagaccaggagggaaggaucaauuacuauuggacccuucuggagccaggugauacaauuaucuuugaagccaacggcaauuugauugcuccgcgguacgccuucgcgcucagucgcggguuuggaucuggcaucauaaacuccaaugcacccauggacaagugugaugccaaaugccagacuccucaaggugcuauuaacagcucgcugccauuccagaauguucaucccgugaccaucggggaguguccuaaguauguaagaucugccaaauuaaggauggugacaggacugcggaacauuccauccauccagucacgcggccucuuuggcgcaaucgcuggguucauugaaggagguuggaccggcauggucgacgggugguacggauaucaccaccagaaugagcaaggcagugguuacgccgcggaucagaaaagcacgcagaacgccauaaaugggaucacuaacaaaguaaauuccguuauugaaaagaugaacacacaguuuaccgcagugggcaaggaguucaacaaacuugagcgaagaauggaaaaucugaacaagaaagucgacgauggauucaucgacauauggacuuacaaugcugaguugcuagugcugcucgaaaacgagaggacacuggauuuucaugacucuaauguaaagaaccuuuaugaaaaaguuaagagccaacugaagaauaacgccaaagagauuggcaaugggugcuucgaguuuuaccacaaguguaacgacgaaugcauggagucagugaaaaauggaaccuaugauuaccccaaguauagugaagaguccaaauugaaccgggagaagaucgacggugucaagcucgaaagcaugggcguguaccagauccuggcuauuuauucuacggucgccucaaguuuagugcugcuaguuagccucggggcaaucuccuucuggaugugcucuaauggaucgcugcagugucguauuugcauauga

SEQ ID NO: 136069 - RNA, 1698 nt, Artificial Sequence; identical to SEQ ID NO: 132145
  derived and/or modified CDS sequence (opt3) from hemagglutinin__InfluenzaA__AEX34790

SEQ ID NO: 136070 - RNA, 1698 nt, Artificial Sequence
  derived and/or modified CDS sequence (opt3) from hemagglutinin__InfluenzaA__AEX34801
augaaggugaaacugcucguccuucugugcaccuucacagccacuuacgcugacacgaucuguauuggcuaucacgcaaacaauagcaccgauacaguugacacuguguuggagaagaacguaaccgugacacauuccgucaauuuacuggaagauaaccacaaugggaaacuaugccuccugaagggaauagcgccccuucagcuggguaacuguucuguggccggcuggaucuuggggaauccugagugcgaacuccugauuucaaaagagaguuggagcuacaucguugaaaagccaaacccggagaauggagcuuguuaucccggccauuuugccgacuacgaggaacugagagagcaacucuccucugugucgucauucaagagguuugaaauuuucccuaaagagagcaguuggccaaaccacaccgucacugguguguccgcaucuugcagccauaauggggaguccucauuuuauaagaacuuacuguggcuuacaggaaagaauggcuuguaccccaaccugaguaagagcuaugccaauaacaaagaaaaggagguucuaguacucuggggcgugcaccacccuccaaacaucggggaucagaugacccuguaccauaaggaaaaugcuuacgucucugugguguccucacacuauagccggaaauucacgcccgagauagcaaagcgcccuaaaguccgagaccaggaaggacguaucaacuacuauuggacucuucuggagccaggugauaccauuaucuuugaggccaguggcaauuugauugcuccgagauacgccuucgcgcucucuaggggguuuggauccggcaucauaaacagcgacgcacccauggaugaaugugacgccaagugccagacaccucaaggugcuauuaauucgucucugccauuccagaacguucaucccgugacuaucggggaguguccuaaauauguacgguccgccaaguuacgcauggugaccggacugagaaauauuccaucaauccagaguaggggccucuuuggcgcaaucgcuggguucauugaaggagguuggacaggcauggucgaugggugguacggauaucaccaccagaacgagcaaggcagcgguuacgccgcggaccagaaauccacccagaaugccauaaacgggaucacgaauaaggugaacucuguuauugaaaagaugaauacucaguuuacagcagugggcaaagaguucaacaaacuugagcggcgcauggaaaaucugaacaaaaaggucgaugacggauucaucgacguguggaccuacaacgcugaguugcuaguacugcucgaaaaugagcgaacucuggauuuucaugacagcaacguuaaaaaucuuuaugaaaaggugaagaaccaacugaaaaauaacgccaaggagauaggcaaugggugcuucgaguuuuaccacaaauguaacgaugaaugcauggagucagucaagaauggaacauaugacuaccccaaauauagugaagaguccaaguugagcagagagaagauugauggugugaaacucgaaucuaugggcgucuaccagauccuggcuaucuauucaaccguggccaguagcuuaguucugcuagugucccucggggcaauuucuuucuggaugugcucgaacggaagccugcaguguaggaucugcauuuga

SEQ ID NO: 136071 - RNA, 1698 nt, Artificial Sequence
  derived and/or modified CDS sequence (opt3) from hemagglutinin__InfluenzaA__AEX34812
augaaggugaaacugcucguccuucugugcaccuucacagccacuuacgcugacacgaucuguauuggcuaucacgcaaacaauagcaccgauacaguugacacuguguuggagaagaacguaaccgugacacauuccgucaauuuacuggaaaacucucacaaugggaaacuaugccuccugaagggaauagcgccccuucagcuggguaacuguucaguggccggcuggaucuuggggaauccugagugcgaacuccugauuaguaaagagagcugguccuacaucguugaaaagccaaacccggagaauggaaccuguuaucccggccauuuugcugauuacgaggaacugagagagcaacucucuucggugagcucauucgaaagguuugagauuuucccuaaggagaguuccuggccaaaccacacugucacaggugugucugccagcugcucccauaauggggaaucaaguuuuuaucggaacuuacuguggcuuaccggcaaaaauggauuguaccccaaccugagcaagucuuaugcaaauaacaaagagaaggaagugcuaguucucuggggcgugcaccacccuccaaacaucggggaccagaaagcccuguaccauacggagaaugcuuacgucuccguggugucaagccacuauagucgcaaguucacucccgaaauagcaaagcgaccuaaaguccgugaucaggagggaagaaucaacuacuauuggacccuucuggagccaggugacacaauuaucuuugaagccaauggcaacuugauugcuccgagguacgccuucgcgcucucucggggguuuggauccggcaucauaaauagcaacgcacccauggauaagugugacgccaaaugccagacuccucaaggugcuauuaauucgucucugccauuccagaacguucaucccgugaccaucggggaguguccuaaguauguacgcuccgccaaauuaagaauggugacaggacugaggaauauuccaucaauccagagucggggccucuuuggcgcaaucgcuggguucauugaaggagguuggaccggcauggucgaugggugguacggauaucaccaccagaacgagcaaggcagcgguuacgccgcggaccagaaguccacgcagaaugccauagaugggaucacuaacaaaguaaauucuguuauugaaaagaugaacacacaguuuaccgcagugggcaaggaguucaauaaacuugagcgccgaauggaaaaccugaacaagaaagucgacgauggauucaucgacauauggacuuacaaugcugaguugcuagugcugcucgaaaacgagagaacacuggacuuucaugauagcaauguaaagaaccuuuaugaaaaaguuaagucacaacugaagaauaacgccaaagagauuggcaaugggugcuucgaguuuuaccacaaguguaacgacgaaugcauggagagugugaaaaauggaaccuaugauuaccccaaguauuccgaagagagcaaauugaacagggagaagaucgacggugucaagcucgaaucuaugggcguguaccagauccuggcuauuuauucaacggucgccaguagcuuagugcugcuaguuucccucggggcaaucucuuucuggaugugcucgaauggaagccugcagugucggauuugcauauga

SEQ ID NO: 136072 - RNA, 1698 nt, Artificial Sequence
  derived and/or modified CDS sequence (opt3) from hemagglutinin__InfluenzaA__AEX34834
augaaggugaaacugcucguccuucugugcaccuucacagccacuuacgcugacacgaucuguauuggcuaucacgcaaacaauagcaccgauacaguugacacuguguuggagaagaacguaaccgugacacauuccgucaauuuacuggaagauaaccacaaugggaaacuaugccuccugaagggaauagcgccccuucagcuggguaacuguucuguggccggcuggaucuuggggaauccugagugcgaacuccugaacucaaaagagaguuggagcuacauuguugaaaagccaaauccggagaacggaaccuguuaucccggccauuuugcugacuacgaggaacugagagagcaacucuccucugugucgucauucaagagguuugaaaucuucccuaaagagagcaguuggccaaaucacacugucacagguguguccgccucuugcagccauaacggggaguccucauuuuauaagaauuuacuguggcuuaccggaaagaacggcuuguaccccaaucugaguaagagcuaugcaaacaacaaagaaaaggagguucuaguacucuggggcgugcaccacccuccaaauauuggggaucagaugacgcuguaccauaaggaaaacgccuacgucucugugguguccucacacuauagccggaaauucacucccgagaucaccaagcgcccuaaaguccgagaccaggaaggacguauaaauuacuauuggacacuucuggagccaggugauacuaucauuuuugaggcuaguggcaacuugaucgcaccgagauacgccuucgcucucucuaggggguuuggauccggcauuaucaauagcaacgcccccauggacgaaugugaugcgaagugccagaccccucaaggugcaauaaauucgucucugccauuccagaacguucaucccgugacaauuggggaguguccuaaauauguacgguccgccaaguuacgcauggugaccggacugagaaauaucccaucaauucagaguaggggccucuuuggcgcuaucgccggguucaucgaaggagguuggacgggcauggucgacgggugguacggauaucaccaccagaacgagcaaggcagcgguuacgcagcugaucagaaauccacucagaaugccauuaacgggauaacaaauaaggugaacucuguuaucgaaaagaugaauacccaguuuacugcggugggcaaagaguucaacaaacuugagcggcgcauggaaaaccugaauaaaaaggucgacgauggauucauugacguguggacauacaacgccgaguugcuaguacugcucgaaaaugagcgaacccuggacuuucaugauagcaacguuaaaaaucuuuaugaaaaggugaagaaccaacugaaaaauaacgcaaaggagaucggcaaugggugcuucgaguuuuaccacaaauguaacgacgaaugcauggagucagucaagaauggaacguaugauuaccccaaauauagugaagaguccaaguugagcagagagaagauagacggugugaaacucgaaucuaugggcgucuaccagauucuggcuaucuauucaaccguggccaguagcuuaguucugcuagugucccucggggcuaucucuuucuggaugugcucgaacggaagccugcaguguaggauuugcaucuga

SEQ ID NO: 136073 - RNA, 1698 nt, Artificial Sequence
  derived and/or modified CDS sequence (opt3) from hemagglutinin__InfluenzaA__AEX34845
augaaggugaaacugcucguccuucugugcaccuucacagccacuuacgcugacacgaucuguauuggcuaucacgcaaacaauagcaccgauacaguugacacuguguuggagaagaacguaaccgugacacauuccgucaauuuacuggaaaacucucacaaugggaaacuaugccuccugaagggaauagcgccccuucagcuggguaacuguucaguggccggcuggaucuuggggaauccugagugcgaacuccugguuccaaaagagaguuggagcuacauuguggaaaagccgaaccccgagaauggaaccuguuauccuggccauuuugcugauuacgaggaacugagagagcaacucuccucugucucgucauucgaaagguuugagaucuucccaaaggagagcaguuggcccaaccacacugugacagguguauccgccucuugcagccauaauggggaauccucauuuuaucggaacuuacuguggcuuaccggaaagaauggcuuguacccuaaccugaguaagagcuaugcaaauaacaaagagaaggaaguucuagugcucuggggcguccaccacccacccaacauuggggaccagaaagcccuguaccauacggagaaugcuuacgugucuguggucuccucacacuauagccgcaaguucacuccugaaaucgcaaagcgaccaaaaguucgugaucaggagggaagaauaaacuacuauuggacccuucuggagccgggugacacaaucauuuuugaagccaauggcaacuugaucgcucccagguacgccuucgcgcucagucggggguuuggaucuggcauuaucaauuccaacgcaccuauggauaagugugacgccaaaugccagacuccacaaggugcuauaaauagcucgcugcccuuccagaacgugcauccuguaaccauuggggaguguccaaaguaugugcgcucugccaaauuaagaauggucacaggacugaggaauauccccuccauucagucacggggccucuuuggcgcaaucgcuggguucaucgaaggagguuggaccggcaugguggaugggugguacggauaucaccaccagaacgagcaaggcagugguuacgccgcggaccagaaaagcacgcagaaugccauuaacgggauaacuaauaaaguuaacuccgugaucgaaaagaugaauacacaguuuaccgcagucggcaaggaguucaacaaacuugagcgccgaauggaaaaccugaauaagaaaguggaugacggauucauugauaucuggacuuacaacgcugaguugcuaguacugcucgaaaaugagagaacacuggacuuucaugacucuaacguuaagaaucuuuaugaaaaagucaagagccaacugaagaacaaugccaaagagauaggcaacgggugcuucgaguuuuaccacaaguguaaugaugaaugcauggagucagugaaaaacggaaccuaugacuacccgaaguauagugaagaguccaaauugaauagggagaagauugaaggugugaagcucgagagcaugggcgucuaccagauccuggcuaucuauucuacgguggccucaaguuuaguucugcuagugagccucggggcaauuuccuucuggaugugcucuaacggaucgcugcagugucggaucugcauuuga

SEQ ID NO: 136074 - RNA, 1698 nt, Artificial Sequence; identical to SEQ ID NO: 132145
  derived and/or modified CDS sequence (opt3) from hemagglutinin__InfluenzaA__AEX34856

SEQ ID NO: 136075 - RNA, 1698 nt, Artificial Sequence
  derived and/or modified CDS sequence (opt3) from hemagglutinin__InfluenzaA__AEX34867
augaaggugaaacugcucguccuucugugcaccuucacagccacuuacgcugacacgaucuguauuggcuaucacgcaaacaauagcaccgauacaguugacacuguguuggagaagaacguaaccgugacacauuccgucaauuuacuggaaaacucucacaaugggaaacuaugccuccugaagggaauagcgccccuucagcuggguaacuguucaguggccggcuggaucuuggggaauccugagugcgaacuccugguuaguaaagagagcugguccuacauuguggaaaagccaaacccggagaauggaaccuguuaucccggccauuuugcugauuacgaggaacugagagagcaacucaucucugucucgucauucgaaagguuugagauuuucccuaaggagagcaguuggccaaaccacacugugacagguguauccgccucuugcagccauaauggggaauccucauuuuaucggaacuuacuguggcuuaccggaaagaauggcuuguaccccaaccugaguaagagcuaugcaaauaacaaagagaaggaaguucuagugcucuggggcguccaccacccuccaaacaucggggaccagaaagcccuguaccauacggagaaugcuuacgugucuguggucuccucacacuauagccgcaaguucacucccgaaauagcaaagcgaccuaaaguucgugaucaggagggaagaaucaacuacuauuggacccuucuggagccaggugacacaauuaucuuugaagccaauggcaacuugauugcuccgagguacgccuucgcgcucagucggggguuuggaucuggcaucauaaauuccaacgcacccauggauaagugugacgccaaaugccagacuccucgcggugcuauuaauagcucgcugccauuccaaaacgugcaucccguaaccaucggggaguguccuaaguaugugagaucugccaaauuaaggauggucacaggacugcggaauauuccauccauccagucacgcggccucuuuggcgcaaucgcuggguucauugaaggagguuggaccggcaugguggaugggugguacggauaucaccaccagaacgagcagggcagugguuacgccgcggaccaaaagagcacgcagaaugccauaaacgggaucacuaauaaaguuaacuccgugauugaaaagaugaauacacaguuuaccgcagucggcaaggaguucaacaaacuugagcgaagaauggaaaaccugaauaagaaaguggaugacggauucaucgauauauggacuuacaacgcugaguugcuaguacugcucgaaaaugagaggacacuggacuuucaugacucuaacguuaagaaucuuuaugaaaaagugaaaagccagcugaagaacaaugccaaagagauuggcaacgggugcuucgaguuuuaccacaaguguaaugaugaaugcauggagucagucaaaaacggaaccuaugacuaccccaaguauagugaagaguccaaauugaaucgggagaagaucgaaggugugaagcucgagagcaugggcgucuaccaaauccuggcuauuuauucuacgguggccucaaguuuaguucugcuagugagccucggggcaaucuccuucuggaugugcucuaacggaucgcugcagugucguauuugcauauga

SEQ ID NO: 136076 - RNA, 1698 nt, Artificial Sequence; identical to SEQ ID NO: 132145
  derived and/or modified CDS sequence (opt3) from hemagglutinin__InfluenzaA__AEX34878

SEQ ID NO: 136077 - RNA, 1698 nt, Artificial Sequence
  derived and/or modified CDS sequence (opt3) from hemagglutinin__InfluenzaA__AEX34889
augaaggugaaccugcucguccuucugugcaccuucacagccacuuacgcugacacgaucuguauuggcuaucacgcaaauaacagcaccgauacaguugacacuguguuggagaaaaauguaaccgugacacauuccgucaacuuacuggaaaauucucacaacgggaagcuaugccuccugaaaggaauagcgccccuucagcuggguaauuguucaguggccggcuggaucuuggggaacccugagugcgaacuccugauuaguaaggagagcugguccuacaucguugaaaaaccaaauccggagaacggaaccuguuaucccggccauuuugcugauuacgaggaacugagagagcaacucucuucggugagcucauucgaaagguuugagauuuucccuaaggagaguuccuggccaaaucacacugucacaggugugucugccagcugcucccauaacggggaaucaaguuuuuaucggaauuuacuguggcuuaccggaaagaacggcuuguaccccaaucugagcaaaucuuaugcaaacaacaaggagaaagaagugcuaguucucuggggcgugcaccacccuccaaauaucggggaccagaaggcccuguaccauacggagaacgcuuacgucuccguggugucaagccacuauagucgcaaauucacucccgaaauagcaaagcgaccuaagguccgugaucaggagggaagaaucaauuacuauuggacccuucuggagccaggugacacaauuaucuuugaagccaacggcaauuugauugcuccgagguacgccuucgcgcucucucggggguuuggauccggcaucauaaacagcaaugcacccauggauaaaugugacgccaagugccagacuccucaaggugcuauuaacucgucucugccauuccagaauguucaucccgugaccaucggggaguguccuaaauauguacgcuccgccaaguuaagaauggugacaggacugaggaacauuccaucaauccagagucggggccucuuuggcgcaaucgcuggguucauugaaggagguuggaccggcauggucgaugggugguacggauaucaccaccagaaugagcaaggcagcgguuacgccgcggaccagaaauccacgcagaacgccauaaaugggaucacuaacaagguaaauucuguuauugaaaagaugaacacacaguuuaccgcagugggcaaggaguucaacaaacuugagcgccgaauggaaaaucugaacaaaaaggucgaugacggauucaucgauauauggacuuacaaugcugaguugcuagugcugcucgaaaacgagagaacacuggacuuucaugacagcaauguuaaaaaccuuuaugaaaagguaaaaucacaacugaagaauaacgccaaggagauuggcaaugggugcuucgaguuuuaccacaaauguaacgaugaaugcauggagagugugaagaauggaaccuaugacuaccccaaauauuccgaagagagcaaguugaacagggagaaaaucgauggugucaagcucgaaucuaugggcguguaccagauccuggcuauuuauucaacggucgccaguagcuuagugcugcuaguuucccucggggcaaucucuuucuggaugugcucgaauggaagccugcagugucggauuugcauauga

SEQ ID NO: 136078 - RNA, 1698 nt, Artificial Sequence
  derived and/or modified CDS sequence (opt3) from hemagglutinin__InfluenzaA__AEX34900
augaaggugaaacugcucguccuucugugcaccuucacagccacuuacgcugacacgaucuguauuggcuaucacgcaaacaauagcaccgauacaguugacacuguguuggagaagaacguaaccgugacacauuccgucaauuuacuggaagauaaccacaaugggaaacuaugccuccugaagggaauagcgccccuucagcuggguaacuguucuguggccggcuggaucuuggggaauccugagugcgaacuccugauuucaaaagagaguuggagcuacaucguugaaaagccaaacccggagaauggaaccuguuaucccggccauuuugcugacuacgaggaacugagagagcaacucuccucugugucgucauucgaaagguuugagauuuucccuaaggagagcaguuggccaaaccacacugucacagguguguccgccucuugcagccauaauggggaauccucauuuuauaaaaacuuacuguggcuuaccggaaagaauggcuuguaccccaaccugaguaaaagcuaugcaaauaacaaggagaaagaaguucuaguacucuggggcgugcaccacccuccaaacaucggggaucagaugacgcuguaccauaaggagaaugccuacgucucugugguguccucacacuauagccggaaguucacucccgaaauagcuaaacgcccuaagguccgagaccaggagggacguaucaacuacuauuggacccuucuggagccaggugauacaauuaucuuugaagcaaguggcaauuugauugccccgagauacgcuuucgcccucucuaggggguuuggauccggcaucauaaacagcaaugcgcccauggacgagugugaugcaaaaugccagacuccucaaggugccauuaacucgucucugccauuccagaauguucaucccgugaccaucggggaauguccuaaguauguacgguccgcuaaauuacgcauggugacaggacugagaaacauuccaucaauccagaguaggggccucuuuggcgccaucgcaggguucauugagggagguuggaccggcauggucgacgggugguacggauaucaccaccagaaugaacaaggcagcgguuacgcugccgaucagaaguccacgcagaacgcgauaaauggggugacuaacaaaguuaauucugugaucgagaagaugaacacacaguuuaccgccgucggcaaggaguucaauaaacuugaacggcgcauggagaaccugaacaagaaaguggacgauggauucauugacguauggacuuacaaugcagaauugcuaguucugcucgagaacgaacgaacacuggacuuucaugauagcaaugugaagaaccuuuaugagaaagucaagaaucaacugaagaacaaugcuaaagagaucggcaacgggugcuucgaauuuuaccacaaguguaaugacgagugcauggaaucagugaaaaacggaaccuaugauuaccccaaguauagugaggaguccaaauugagcagagaaaagauagacggugucgagcucgaaucuaugggcguguaccagauucuggccaucuauucaacgguugcuaguagcuuagugcugcuaguaucccucggggccaucucuuucuggaugugcucgaauggaagccugcaguguaggauuugcaucuga

SEQ ID NO: 136079 - RNA, 1698 nt, Artificial Sequence
  derived and/or modified CDS sequence (opt3) from hemagglutinin__InfluenzaA__AEX34911
augaaggugaaacugcucguccuucugugcaccuucacagccacuuacgcugacacgaucuguauuggcuaucacgcaaacaauagcaccgauacaguugacacuguguuggagaagaacguaaccgugacacauuccgucaauuuacuggaaaacucucacaaugggaaacuaugccuccugaagggaauagcgccccuucagcuggguaacuguucaguggccggcuggaucuuggggaauccugagugcgaacuccugauuagucaagagagcugguccuacaucguugaaaaaccaaacccggagaauggaaccuguuaucccggccauuuugcugauuacgaggaacugagagagcagcucucuucggugagcucauucgaaagguuugagauuuucccuaaggagaguuccuggccaaaccacacugucacaggugugucugccagcugcucccauaauggggaaucaaguuuuuaucggaacuuacuguggcuuaccggaaagaauggcuuguaccccaaccugagcaaaucuuaugcaaauaacaaggagaaagaaguucuaguacucuggggcgugcaccacccuccaaacaucggggaccagaaggcccuguaccauacggagaaugcuuacgucuccguggugucaagccacuauagucgcaaauucacucccgaaauagcaaagcgaccuaagguccgugaucaggagggaagaaucaacuacuauuggacccuucuggagccaggugacacaauuaucuuugaagccaauggcaacuugauugcuccgagguacgccuucgcgcucucucggggguuuggauccggcaucauaaauagcaacgcacccauggauaaaugugacgccaagugccaaacuccucagggugcuauuaauucgucucugccauuccagaacguucaucccgugaccaucggggaguguccuaaauauguacgcuccgccaaguuaagaauggugacaggacugaggaauauuccaucaauccagagucggggccucuuuggcgcaaucgcuggguucauugaaggagguuggaccggcauggucgaugggugguacggauaucaccaccaaaacgagcagggcagcgguuacgccgcggaccagaaauccacgcagaaugccauaaacgggaucacuaauaaggugaacucuguuauugaaaagaugaauacacaauuuaccgcagugggcaaggaguucaacaaacuugagcgccgaauggaaaaccugaauaaaaaggucgaugacggauucaucgauauauggacuuacaacgcugaguugcuagugcugcucgaaaaugagagaacacuggacuuucaugacagcaacguuaaaaaucuuuaugaaaagguaaaaucacagcugaagaacaaugccaaggagauuggcaacgggugcuucgaguuuuaccacaaauguaaugaugaaugcauggagagugugaagaacggaaccuaugacuaccccaaauauuccgaagagagcaaguugaauagggagaaaaucgauggugucaagcucggcucuauggggguguaccagauccuggcuauuuauucaacggucgccaguagcuuagugcugcuaguuucccucggagcaaucucuuucuggaugugcucgaacggcagccugcaaugucggauuugcauauga

SEQ ID NO: 136080 - RNA, 1698 nt, Artificial Sequence
  derived and/or modified CDS sequence (opt3) from hemagglutinin__InfluenzaA__AEX34922
augaaggugaaacugcucguccuucugugcaccuucacagccacuuacgcugacacgaucuguauuggcuaucacgcaaacaauagcaccgauacaguugacacuguguuggagaagaacguaaccgugacacauuccgucaauuuacuggaaaacucucacaaugggaaacuaugccuccugaagggaauagcgccccuucagcuggguaacuguucaguggccggcuggaucuuggggaauccugagugcgaacuccugauuaguaaagagagcugguccuacaucguugaaaagccaaacccggagaauggaaccuguuaucccggccauuuugcugauuacgaggaacugagagagcaacucucuucggugagcucauucgaaagguuugagauuuucccuaaggagaguuccuggccaaaccacacugucacaggugugucugccagcugcucccauaauggggaaucaaguuuuuaucggaacuuacuguggcuuaccggcaaaaauggauuguaccccaaccugagcaagucuuaugcaaauaacaaagagaaggaaguucuaguacucuggggcgugcaccacccuccaaacaucggggaccagaaagcccuguaccauacggagaaugcuuacgucuccguggugucaagccacuauagucgccgauucacucccgaaauagcaaagcguccuaaggucagagaucaggagggaaggaucaacuacuauuggacccuucuggagccaggugacacaauuaucuuugaagccaauggcaacuugauugcuccgcgguacgccuucgcgcucucucgcggguuuggauccggcaucauaaauagcaacgcacccauggauaaaugugacgccaagugccagacuccucaaggugcuauuaauucgucucugccauuccagaacguucaucccgugaccaucggggaguguccuaaauauguaagauccgccaaguuaaggauggugacaggacugcggaauauuccaucaauccagagucgcggccucuuuggcgcaaucgcuggguucauugaaggagguuggaccggcauggucgaugggugguacggauaucaccaccagaacgagcaaggcagcgguuacgccgcggaccagaaauccacgcagaaugccauaaacgggaucacuaauaaggugaacucuguuauugaaaagaugaauacacaguuuaccgcagugggcaaggaguucaacaaacuugagcgaagaauggaaaaccuggauaaaaaggucgacgauggauucaucgacauauggacuuacaaugcugaguugcuagugcugcucgaaaacgagaggacacuggacuuucaugauagcaauguuaaaaaccuuuaugaaaagguaaaaucacaacugaagaauaacgccaaggagauuggcaaugggugcuucgaguuuuaccacaaauguaacgacgaaugcauggagagugugaagaauggaaccuaugauuaccccaaauauuccgaagagagcaaguugaaccgggagaaaaucgacggugucaagcucgaaucuaugggcguguaccagauccuggcuauuuauucaacggucgccaguagcuuagugcugcuaguuucccucggggcaaucucuuucuggaugugcucgaauggaagccugcagugucguauuugcauauga

SEQ ID NO: 136081 - RNA, 1698 nt, Artificial Sequence; identical to SEQ ID NO: 130536
  derived and/or modified CDS sequence (opt3) from hemagglutinin__InfluenzaA__AEX34933

SEQ ID NO: 136082 - RNA, 1698 nt, Artificial Sequence; identical to SEQ ID NO: 130536
  derived and/or modified CDS sequence (opt3) from hemagglutinin__InfluenzaA__AEX34944

SEQ ID NO: 136083 - RNA, 1698 nt, Artificial Sequence
  derived and/or modified CDS sequence (opt3) from hemagglutinin__InfluenzaA__AEX34955
augaaggccaaacugcucgugcuucugugcaccuucacagcuacuuacgcagacacgaucuguauuggcuaucacgccaacaauagcaccgauacagucgacacuguuuuggagaagaacgugaccguaacacauuccgugaauuuacuggaaaacucucacaaugggaaacuaugccuccugaagggaauagcgccccuucagcuggguaacuguucagucgcuggcuggaucuuggggaauccugagugcgaacuccugauuaguaaagagagcugguccuacaucguggaaaagccaaacccggagaauggaaccuguuaucccggccauuuugccgauuacgaggaacugagagagcaacucucuucgguuagcucauucgaaagguuugagauuuucccuaaggagaguuccuggccaaaccacacugugacaggugucucugcaagcugcucccauaauggggaaucaaguuuuuaucggaacuuacuguggcuuaccggcaaaaauggauuguaccccaaccugagcaagucuuaugccaauaacaaagagaaggaagugcuaguacucuggggcguucaccacccuccaaacaucggggaccagaaagcucuguaccauacggagaaugcauacguguccgucgugucaagccacuauagucgcaaguucacucccgaaauagccaagcgaccuaaagugcgugaucaggagggaagaaucaacuacuauuggacccuucuggagccaggugacacaauuaucuuugaagcuaauggcaacuugauugccccgagguacgcguucgcacucucucggggguuuggauccggcaucauaaauagcaacgcccccauggauaagugugacgcuaaaugccagacuccucaaggugccauuaauucgucucugccauuccagaacguccaucccguuaccaucggggaguguccuaaguaugugcgcuccgcaaaauuaagaaugguaacaggacugaggaauauuccaucaauccagagucggggccucuuuggcgcuaucgccggguucauugaaggagguuggaccggcaugguggaugggugguacggauaucaccaccagaacgagcaaggcagcgguuacgcggccgaccagaaguccacgcagaaugcaauaaacgggaucacuaauaaagucaacucugugauugaaaagaugaauacacaguuuaccgcuguuggcaaggaguucaacaaacuugagcgccgaauggaaaaccugaauaagaaaguggaugacggauucaucgauauauggacuuacaacgccgaguugcuaguccugcucgaaaaugagagaacacuggacuuucaugacagcaacgugaagaaucuuuaugaaaaaguaaagucacaacugaagaacaaugcuaaagagauuggcaacgggugcuucgaguuuuaccacaaguguaaugaugaaugcauggagaguguuaaaaacggaaccuaugacuaccccaaguauuccgaagagagcaaauugaauagggagaagaucgauggugugaagcucgaaucuaugggcgucuaccagauccuggccauuuauucaacgguggcaaguagcuuaguccugcuagugucccucggggccaucucuuucuggaugugcucgaacggaagccugcagugucggauuugcauauga

SEQ ID NO: 136084 - RNA, 1698 nt, Artificial Sequence
  derived and/or modified CDS sequence (opt3) from hemagglutinin__InfluenzaA__AEX34966
augaaggugaaacugcucguccuucugugcaccuucacagccacuuacgcugacacgaucuguauuggcuaucacgcaaacaauagcaccgauacaguugacacuguguuggagaagaacguaaccgugacacauuccgucaauuuacuggaaaacucucacaaugggaaacuaugccuccugaagggaauagcgccccuucagcuggguaacuguucaguggccggcuggaucuuggggaauccugagugcgaacuccugauuaguaaagagagcugguccuacaucguugaaaagccaaacccggagaauggaaccuguuaucccggccauuuugcugauuacgaggaacugagagagcaacucucuucggugagcucauucgaaagguuugagauuuucccuaaggagaguuccuggccaaaccacacugucacaggugugucugccagcugcucccauaauggggaaucaaguuuuuaucggaacuuacuguggcuuaccggcaaaaauggauuguaccccaaccugagcaagucuuaugcaaauaacaaagagaaggaaguucuaguacucuggggcgugcaccacccuccaaacaucggggaccagaaagcccuguaccauacggagaaugcuuacgucuccguggugucaagccacuauagucgcaaguucacucccgaaauagcaaagcgaccuaaaguccgugaucaggagggaagaaucaacuacuauuggacccuucuggagccaggugacacaauuauguuugaagccaauggcaacuugaucgcuccgagguacgccuucgcgcucucucggggguuuggauccggcauuaucaauagcaacgcacccauggauaagugugacgccaaaugccagacuccucaaggugcuauaaauucgucucugccauuccagaacguucaucccgugaccauuggggaguguccuaaguauguacgcuccgccaaauuaagaauggugacaggacugaggaauaucccaucaauucagagucggggccucuuuggcgcaaucgcuggguucaucgaaggagguuggaccggcauggucgaugggugguacggauaucaccaccagaacgagcaaggcagcgguuacgccgcggaccagaaguccacgcagaaugccauuaacgggauaacuaauaaagugaacucuguuaucgaaaagaugaauacacaguuuaccgcagugggcaaggaguucaacaaacuugagcgccgaauggaaaaccugaauaagaaagucgaugacggauucauugauaucuggacuuacaacgcugaguugcuagugcugcucgaaaaugagagaacacuggacuuucaugacagcaacguaaagaaucuuuaugaaaaaguuaagucacaacugaagaacaaugccaaagagauaggcaacgggugcuucgaguuuuaccacaaguguaaugaugaaugcauggagagugugaaaaacggaaccuaugacuaccccaaguauuccgaagagagcaaauugaauagggagaagauugauggugucaagcucgaaucuaugggcguguaccagauccuggcuaucuauucaacggucgccaguagcuuagugcugcuaguuucccucggggcaauuucuuucuggaugugcucgaacggaagccugcagugucggaucugcauuuga

SEQ ID NO: 136085 - RNA, 1698 nt, Artificial Sequence; identical to SEQ ID NO: 136084
  derived and/or modified CDS sequence (opt3) from hemagglutinin__InfluenzaA__AEX34977

SEQ ID NO: 136086 - RNA, 1698 nt, Artificial Sequence; identical to SEQ ID NO: 136084
  derived and/or modified CDS sequence (opt3) from hemagglutinin__InfluenzaA__AEX34988

SEQ ID NO: 136087 - RNA, 1698 nt, Artificial Sequence; identical to SEQ ID NO: 132145
  derived and/or modified CDS sequence (opt3) from hemagglutinin__InfluenzaA__AEX34999

SEQ ID NO: 136088 - RNA, 1698 nt, Artificial Sequence; identical to SEQ ID NO: 136084
  derived and/or modified CDS sequence (opt3) from hemagglutinin__InfluenzaA__AEX35010

SEQ ID NO: 136089 - RNA, 1698 nt, Artificial Sequence; identical to SEQ ID NO: 136084
  derived and/or modified CDS sequence (opt3) from hemagglutinin__InfluenzaA__AEX35032

SEQ ID NO: 136090 - RNA, 1698 nt, Artificial Sequence; identical to SEQ ID NO: 136084
  derived and/or modified CDS sequence (opt3) from hemagglutinin__InfluenzaA__AEX35043

SEQ ID NO: 136091 - RNA, 1698 nt, Artificial Sequence
  derived and/or modified CDS sequence (opt3) from hemagglutinin__InfluenzaA__AEX35054
augaaggugaaacugcucguccuucugugcaccuucacagccacuuacgcugacacgaucuguauuggcuaucacgcaaacaauagcaccgauacaguugacacuguguuggagaagaacguaaccgugacacauuccgucaauuuacuggaaaacucucacaaugggaaacuaugccuccugaagggaauagcgccccuucagcuggguaacuguucaguggccggcuggaucuuggggaauccugagugcgaacuccugauuaguaaagagagcugguccuacaucguugaaaagccaaacccggagaauggaaccuguuaucccggccauuuugcugauuacgaggaacugagagagcaacucucuucggugagcucauucgaaagguuugagauuuucccuaaggagaguuccuggccaaaccacacugucacaggugugucugccagcugcucccauaauggggaaucaaguuuuuaucggaacuuacuguggcuuaccggaaagaauggcuuguaccccaaccugagcaagucuuaugcaaauaacaaagagaaggaagugcuaguucucuggggcgugcaccacccuccaaacaucggggaccagaaagcccuguaccauacggagaaugcuuacgucuccguggugucaagccacuauagucgcaaguucacucccgaaauagcaaagcgaccuaaaguccgugaucaggagggaagaaucaacuacuauuggacccuucuggagccaggugacacaauuauguuugaagccaauggcaacuugaucgcuccgagguacgccuucgcgcucaaucggggguuuggaucuggcauuaucaacuccaaugcacccauggauaagugugacgccaaaugccagacuccucaaggugcuauaaacagcucgcugccauuccagaauguucaucccgugaccauuggggaguguccuaaguauguacgcucugccaaauuaagaauggugacaggacugaggaacaucccauccauucagucacggggccucuuuggcgcaaucgcuggguucaucgaaggagguuggaccggcauggucgaugggugguacggauaucaccaccagaaugagcaaggcagugguuacgccgcggaccagaaaagcacgcagaacgccauuaaugggauaacuaacaaaguaaauuccguuaucgaaaagaugaacacacaguuuaccgcagugggcaaggaguucaacaaacuugagcgccgaauggaaaaucugaacaagaaagucgaugacggauucauugauaucuggacuuacaaugcugaguugcuagugcugcucgaaaacgagagaacacuggacuuucaugacucuaauguaaagaaccuuuaugaaaaaguuaagagccaacugaagaauaacgccaaagagauaggcaaugggugcuucgaguuuuaccacaaguguaacgaugaaugcauggagucagugaaaaauggaaccuaugacuaccccaaguauagugaagaguccaaauugaacagggagaagauugauggugucaagcucgaaagcaugggcguguaccagauccuggcuaucuauucuacggucgccucaaguuuagugcugcuaguuagccucggggcaauuuccuucuggaugugcucuaauggaucgcugcagugucggaucugcauuuga

SEQ ID NO: 136092 - RNA, 1698 nt, Artificial Sequence; identical to SEQ ID NO: 136084
  derived and/or modified CDS sequence (opt3) from hemagglutinin__InfluenzaA__AEX35065

SEQ ID NO: 136093 - RNA, 1698 nt, Artificial Sequence; identical to SEQ ID NO: 130536
  derived and/or modified CDS sequence (opt3) from hemagglutinin__InfluenzaA__AEX35076

SEQ ID NO: 136094 - RNA, 1698 nt, Artificial Sequence
  derived and/or modified CDS sequence (opt3) from hemagglutinin__InfluenzaA__AEX35087
augaaggugaaacugcucguccuucugugcaccuucacagccacuuacgcugacacgaucuguauuggcuaucacgcaaacaauagcaccgauacaguugacacuguguuggagaagaacguaaccgugacacauuccgucaauuuacuggaagauaaccacaaugggaaacuaugccuccugaagggaauagcgccccuucagcuggguaacuguucuguggccggcuggaucuuggggaauccugagugcgaacuccugauuucaaaagagaguuggagcuacaucguugaaaagccaaacccggagaauggaaccuguuaucccggccauuuugcugacuacgaggaacugagagagcaacucuccucugugucgucauucaagagguuugaaauuuucccuaaagagagcaguuggccaaaccacacugucacagguguguccgccucuugcagccauaauggggaguccucauuuuauaagaacuuacuguggcuuaccggaaagaauggcuuguaccccaaccugaguaagagcuaugcaaauaacaaagaaaaggaggugcuaguucucuggggcgugcaccacccuccaaacaucggggaucagaugacgcuguaccauaaggaaaaugccuacgucucugugguguccucacacuauagccggaaauucacucccgagauagcuaagcgcccuaaaguccgagaccaggaaggacguaucaacuacuauuggacccuucuggagccaggugauacaauuaucuuugaggcaaguggcaauuugauugccccgagauacgcuuucgcccucucuaggggguuuggauccggcaucauaaacagcaaugcgcccauggacgaaugugaugcaaagugccagacuccucaaggugccauuaacucgucucugccauuccagaauguucaucccgugaccaucggggaguguccuaaauauguacgguccgcuaaguuacgcauggugacaggacugagaaacauuccaucaauccagaguaggggccucuuuggcgccaucgcaggguucauugaaggagguuggaccggcauggucgacgggugguacggauaucaccaccagaaugagcaaggcagcgguuacgcugccgaucagaaauccacgcagaacgcgauaaaugggaucacuaacaagguaaauucuguuauugaaaagaugaacacacaguuuaccgccgugggcaaagaguucaauaaacuugagcggcgcauggaaaaccugaacaaaaaggucgacgauggauucaucgacguguggacuuacaaugcagaguugcuaguacugcucgaaaacgagcgaacacuggacuuucaugauagcaauguuaaaaaccuuuaugaaaaggugaagaaucaacugaaaaacaaugcuaaggagauaggcaacgggugcuucgaguuuuaccacaaauguaaugacgaaugcauggagucagucaagaacggaaccuaugauuaccccaaauauagugaagaguccaaguugagcagagagaagauugacggugugaaacucgaaucuaugggcgucuaccagauccuggccaucuauucaacgguggcuaguagcuuaguucugcuagugucccucggggccauuucuuucuggaugugcucgaauggaagccugcaguguaggaucugcauuuga

SEQ ID NO: 136095 - RNA, 1698 nt, Artificial Sequence
  derived and/or modified CDS sequence (opt3) from hemagglutinin__InfluenzaA__AEX35098
augaaggugaaacugcucguccuucugugcaccuucacagccacuuacgcugacacgaucuguauuggcuaucacgcaaacaauagcaccgauacaguugacacuguguuggagaagaacguaaccgugacacauuccgucaauuuacuggaaaacucucacaaugggaaacuaugccuccugaagggaauagcgccccuucagcuggguaacuguucaguggccggcuggaucuuggggaauccugagugcgaacuccugauuaguaaagagagcugguccuacaucguugaaaagccaaacccggagaauggaaccuguuaucccggccauuuugcugauuacgaggaacugagagagcaacucucuucggugagcucauucgaaagguuugagauuuucccuaaggagaguuccuggccaaaccacacugucacaggugugucugccagcugcucccauaauggggaaucaaguuuuuaucggaacuuacuguggcuuaccggcaaaaauggauuguaccccaaccugagcaagucuuaugcaaauaacaaagagaaggaaguucuaguacucuggggcgugcaccacccuccaaacaucggggaccagaaagcccuguaccauacggagaaugcuuacgucuccgugaugucaagccacuauagucgcaaguucacucccgaaauagcaaagcgaccuaaagugcgugaucaggagggaagaaucaacuacuauuggacccuucuggagccaggugacacaauuaucuuugaagccaauggcaacuugauugcuccgagguacgccuucgcgcucucucggggguuuggauccggcaucauaaauagcaacgcacccauggauaagugugacgccaaaugccagacuccucaaggugcuauuaauucgucucugccauuccagaacguccaucccguuaccaucggggaguguccuaaguaugugcgcuccgccaaauuaagaaugguaacaggacugaggaauauuccaucaauccagagucggggccucuuuggcgcaaucgcuggguucauugaaggagguuggaccggcaugguggaugggugguacggauaucaccaccagaacgagcaaggcagcgguuacgccgcggaccagaaguccacgcagaaugccauaaacgggaucacuaauaaagucaacucugugauugaaaagaugaauacacaguuuaccgcaguuggcaaggaguucaacaaacuugagcgccgaauggaaaaccugaauaagaaaguggaugacggauucaucgauauauggacuuacaacgcugaguugcuaguccugcucgaaaaugagagaacacuggacuuucaugacagcaacgugaagaaucuuuaugaaaaaguaaagucacaacugaagaacaaugccaaagagauuggcaacgggugcuucgaguuuuaccacaaguguaaugaugaaugcauggagaguguuaaaaacggaaccuaugacuaccccaaguauuccgaagagagcaaauugaauagggagaagaucgauggugugaagcucgaaucuaugggcgucuaccagauccuggcuauuuauucaacgguggccaguagcuuaguccugcuagugucccucggggcaaucucuuucuggaugugcucgaacggaagccugcagugucggauuugcauauga

SEQ ID NO: 136096 - RNA, 1698 nt, Artificial Sequence
  derived and/or modified CDS sequence (opt3) from hemagglutinin__InfluenzaA__AEX35109
augaaggugaaacugcucguccuucugugcaccuucacagccacuuacgcugacacgaucuguauuggcuaucacgcaaacaauagcaccgauacaguugacacuguguuggagaagaacguaaccgugacacauuccgucaauuuacuggaaaacucucacaaugggaaacuaugccuccugaagggaauagcgccccuucagcuggguaacuguucaguggccggcuggaucuuggggaauccugagugcgaacuccugauuaguaaagagagcugguccuacaucguugaaaagccaaacccggagaauggaaccuguuaucccggccauuuugcugauuacgaggaacugagagagcaacucucuucggugagcucauucgaaagguuugagauuuucccuaaggagaguuccuggccaaaccacacugucacaggugugucugccagcugcucccauaauggggaaucaaguuuuuaucggaacuuacuguggcuuaccggcaaaaauggauuguaccccaaccugagcaagucuuaugcaaauaacaaagagaaggaaguucuaguacucuggggcgugcaccagccuccaaacaucggggaccagaaagcccuguaccacacggagaaugcuuacgucuccguggugucaagccauuauagucgcaaguucacucccgaaauagcaaagcgaccuaaaguccgugaucaggagggaagaaucaacuacuauuggacccuucuggagccaggugacacaauuaucuuugaagccaauggcaacuugauugcuccgagguacgccuucgcgcucucucggggguuuggauccggcaucauaaauagcaacgcacccauggauaagugugacgccaaaugccaaacuccucagggugcuauuaauucgucucugccauuccagaacguucaccccgugaccaucggggaguguccuaaguauguacgcuccgccaaauuaagaauggugacaggacugaggaauauuccaucaauccagagucggggccucuuuggcgcaaucgcuggguucauugaaggagguuggaccggcauggucgaugggugguacggauaucaucaccaaaacgagcagggcagcgguuacgccgcggaccagaaguccacgcagaaugccauaaacgggaucacuaauaaagugaacucuguuauugaaaagaugaauacacaauuuaccgcagugggcaaggaguucaacaaacuugagcgccgaauggaaaaccugaauaagaaagucgaugacggauucaucgauauauggacuuacaacgcugaguugcuagugcugcucgaaaaugagagaacacuggacuuucacgacagcaacguaaagaaucuuuaugaaaaaguuaagucacagcugaagaacaaugccaaagagauuggcaacgggugcuucgaguuuuaccauaaguguaaugaugaaugcauggagagugugaaaaacggaaccuaugacuaccccaaguauuccgaagagagcaaauugaauagggagaagaucgauggugucaagcucgaaucuaugggcguguaccagauccuggcuauuuauucaacggucgccaguagcuuagugcugcuaguuucccucggggcaaucucuuucuggaugugcucgaacggaagccugcaaugucggauuugcauauga

SEQ ID NO: 136097 - RNA, 1698 nt, Artificial Sequence
  derived and/or modified CDS sequence (opt3) from hemagglutinin__InfluenzaA__AEX35120
augaaggugaaacugcucguccuucugugcaccuucacagccacuuacgcugacacgaucuguauuggcuaucacgcaaacaauagcaccgauacaguugacacuguguuggagaagaacguaaccgugacacauuccgucaauuuacuggaaaacucucacaaugggaaacuaugccuccugaagggaauagcgccccuucagcuggguaacuguucaguggccggcuggaucuuggggaauccugagugcgaacuccugauuaguaaagagagcugguccuacaucguugaaaagccaaacccggagaauggaaccuguuaucccggccauuuugcugauuacgaggaacugagagagcaacucucuucggugagcucauucgaaagguuugagauuuucccuaaggagaguuccuggccaaaccacacugucacaggugugucugccagcugcucccauaauggggaaucaaguuuuuaucggaacuuacuguggcuuaccggcaaaaauggauuguaccccaaccugagcaagucuuaugcaaauaacaaagagaaggaaguucuaguacucuggggcgugcaccacccuccaaacaucggggaccagaaagcccuguaccauacggagaaugcuuacgucuccguggugucaagccacuauagucgcaaguucacucccgaaauagcaaagcgaccuaaaguccgugauagagagggaaggaucaacuacuauuggacccuucuggagccaggugacacaauuaucuuugaagccaauggcaacuugauugcuccgcgguacgccuucgcgcucucucgcggguuuggauccggcaucauaaauagcaacgcacccauggauaagugugacgccaaaugccagacuccucagggugcuauuaauucgucucugccauuccaaaacguucaucccgugaccaucggggaguguccuaaguauguaagauccgccaaauuaaggauggugacaggacugcggaauauuccaucaauccagagucgcggccucuuuggcgcaaucgcuggguucauugaaggagguuggaccggcauggucgaugggugguacggauaucaccaccagaacgagcagggcagcgguuacgccgcggaccaaaaguccacgcagaaugccauaaacgggaucacuaauaaagugaacucuguuauugaaaagaugaauacacaguuuaccgcagugggcaaggaguucaacaaacuugagcgaagaauggaaaaccugaauaagaaagucgaugacggauucaucgauauauggacuuacaacgcugaguugcuagugcugcucgaaaaugagaggacacuggacuuucaugacagcaacguaaagaaucuuuaugaaaaaguuaagucacagcugaagaacaaugccaaagagauuggcaacgggugcuucgaguuuuaccacaaguguaaugaugaaugcauggagagugugaaaaacggaaccuaugacuaccccaaguauuccgaagagagcaaauugaaucgggagaagaucgauggugucaagcucgaaucuaugggcguguaccaaauccuggcuauuuauucaacggucgccaguagcuuagugcugcuaguuucccucggggcaaucucuuucuggaugugcucgaacggaagccugcagugucguauuugcauauga

SEQ ID NO: 136098 - RNA, 1698 nt, Artificial Sequence; identical to SEQ ID NO: 135841
  derived and/or modified CDS sequence (opt3) from hemagglutinin__InfluenzaA__AEX35131

SEQ ID NO: 136099 - RNA, 1698 nt, Artificial Sequence; identical to SEQ ID NO: 135841
  derived and/or modified CDS sequence (opt3) from hemagglutinin__InfluenzaA__AEX35142

SEQ ID NO: 136100 - RNA, 1698 nt, Artificial Sequence
  derived and/or modified CDS sequence (opt3) from hemagglutinin__InfluenzaA__AEX35153
augaaggugaaacugcucguccuucugugcaccuucacagccacuuacgcugacacgaucuguauuggcuaucacgcaaacaauagcaccgauacaguugacacuguguuggagaagaacguaaccgugacacauuccgucaauuuacuggaagauaaccacaaugggaaacuaugccuccugaagggaauagcgccccuucagcuggguaacuguucuguggccggcuggaucuuggggaauccugagugcgaacuccugauuucaaaagagaguuggagcuacaucguugaaaagccaaacccggagaauggaaccuguuaucccggccauuuugcugacuacgaggaacugagagagcaacucuccucugugucgucauucgaaagguuugagauuuucccuaaggagagcaguuggccaaaccacacugucacagguguguccgccucuugcagccauaauggggaauccucauuuuauaaaaacuuacuguggcuuaccggaaagaauggcuuguaccccaaccugaguaaaagcuaugcaaauaacaaggagaaagaagugcuaguucucuggggcgugcaccacccuccaaacaucgggaaucagaugacgcuguaccauaaggagaacgccuacgucucugugguguccucacacuauagccggaaguucacucccgaaauagcuaaacgcccuaagguccgagaucaggagggacguaucaauuacuauuggacccuucuggagccaggugacacaauuaucuuugaagcaaguggcaacuugauugccccgagauacgcuuucgcccucucuaggggguuuggauccggcaucauaaauagcaacgcgcccauggaugagugugacgcaaaaugccagacuccucaaggugccauuaauucgaaccugccauuccagaauguucaucccgugaccaucggggaauguccuaaguauguacggucugcuaaauuacgcauggugacaggacugagaaacauuccauccauccagucaaggggccucuuuggcgccaucgcaggguucauugagggagguuggaccggcauggucgaugggugguacggauaucaccaccagaaugaacaaggcagugguuacgcugccgaccaaaagagcacgcagaacgcgauaaaugggaucacuaacaaaguaaauuccguuauugagaagaugaacacacaguuuaccgccgugggcaaggaguucaacaaacuugaacggcgcauggagaaucugaacaagaaagucgaugacggauucaucgauguguggacuuacaaugcagaauugcuaguacugcucgagaacgaacgaacacuggacuuucaugacucuaauguuaagagccuuuaugagaaagugaagaaccagcugaagaauaacgcuaaagagauaggcaaugggugcuucgaauuuuaccacaaguguaacgaugagugcauggaaucagucaaaaauggaaccuaugacuaccccaaguauagugaggaguccaaauugagcagagaaaagauugauggugugaagcucgagucuaugggcgucuaccagauccuggccaucuauucaacgguggcuaguagcuuaguucugcuagugucccucggggccauuucuuucuggaugugcucgaacggaagccugcaguguaggaucugcauuuga

SEQ ID NO: 136101 - RNA, 1698 nt, Artificial Sequence
  derived and/or modified CDS sequence (opt3) from hemagglutinin__InfluenzaA__AEX35164
augaaggugaaacugcucguccuucugugcgccuucaccgcuacauacgcagacacuaucuguauuggcuaucacgccaacaauagcacggauaccguugacacaguguuggagaagaacguaacugugacccauuccgucaauuuacuggaaaacucucacaaugggaaacuaugccuccugaagggaauagcgccccuucagcuggguaacuguucaguggcuggcuggaucuuggggaauccugagugcgaacuccugauuaguaaagagagcugguccuacaucguugaaaagccaaacccggagaauggaacauguuaucccggccauuuugccgauuacgaggaacugagagagcaacucucuucggugagcucauucgaaagguuugagauuuucccuaaggagaguuccuggccaaaccacaccgucacuggugugucugcaagcugcucccauaauggggaaucaaguuuuuaucggaacuuacuguggcuuacaggcaaaaauggauuguaccccaaccugagcaagucuuaugccaauaacaaagagaaggaaguucuaguacucuggggcgugcaccacccuccaaacaucgggguccagaaagcucuguaccauaccgagaaugcauacguguccguggucucaagccacuauagucgcaaguucacgcccgaaauagccaagcgaccuaaaguucgugaccaggagggaagaaucaacuacuauuggacucuucuggagccaggugauaccauuaucuuugaagcuaauggcaacuugauugccccgagguacgcguucgcacucucucggggguuuggauccggcaucauaaauagcaacgcccccauggacaagugugaugcuaaaugccagacaccucaaggugccauuaauucgucucugccauuccagaacgugcaucccguaacuaucggggaguguccuaaguaugugcgcuccgcaaaauuaagaauggucaccggacugaggaauauuccaucaauccagagucggggccucuuuggcgcuaucgccggguucauugaaggagguuggacaggcaugguggacgggugguacggauaucaccaccagaacgagcaaggcagcgguuacgcggccgaucagaaguccacccagaaugcaauaaacgggaucacgaauaaaguuaacucugugauugaaaagaugaauacucaguuuacagcugucggcaaggaguucaacaaacuugagcgccgaauggaaaaccugaauaagaaaguggacgauggauucaucgacauauggaccuacaacgccgaguugcuaguacugcucgaaaaugagagaacucuggauuuucaugacagcaacguuaagaaucuuuaugaaaaagugaagucacaacugaagaacaaugcuaaagagauuggcaacgggugcuucgaguuuuaccacaaguguaaugacgaaugcauggagagugucaaaaacggaacauaugauuaccccaaguauuccgaagagagcaaauugaauagggagaagaucgacggugugaagcucgaaucuaugggcgucuaccagauccuggccauuuauucaaccguggcaaguagcuuaguucugcuagugucccucggggccaucucuuucuggaugugcucgaacggaagccugcagugucggauuugcauauga

SEQ ID NO: 136102 - RNA, 1698 nt, Artificial Sequence
  derived and/or modified CDS sequence (opt3) from hemagglutinin__InfluenzaA__AEX35175
augaaggugaaacugcucguccuucugugcaccuucacagccacuuacgcugacacgaucuguauuggcuaucacgcaaacaauagcaccgauacaguugacacuguguuggagaagaacguaaccgugacacauuccgucgauuuacuggaagacucucacaaugggaaacuaugccuccugaagggaauagcgccccuucagcuggguaacuguucaguggccggcuggaucuuggggaauccugagugcgaacuccugauuaguaaagagagcugguccuacaucguugaaaccccaaacccggagaauggaacuuguuaucccggcuacuuugcugauuaugaggaacugagagagcaacucucuucggugagcucauucgaaagguuugagauuuucccuaaggagaguuccuggccaaaccauacagucaccggugugacggccucuugcagccacaaugggaaguccucauuuuaccggaacuuacuguggcuuacuggcaaaaauggauuguaucccaaccugaguaagagcuacgcaaauaacaaagaaaaggagguucuaguacucuggggcgugcaucacccuccaaauaucggggaccagcgcgcccuguaccacaccgaaaacgcuuaugucucugugguguccucacauuacagccgacguuucacacccgagauagcaaaaagaccuaaggucagggaucaggaaggacggaucaacuauuacuggacucuucuggagccaggugacaccauuaucuuugaggccaauggcaacuugauugcuccgcgcuucgccuuugcgcucaauagaggguucggaaguggcaucauaacaucuaacgcacccauggaugguugugacgccaagugccagaccccucaaggggcuauuaauuccagccugccauuucagaacguucaccccgugacgaucggagaauguccuaaauauguaaggucggccaaguuacggauggcaacuggccugcgcaauauuccaucuauccagucccgaggccucuucggggcuaucgccggauuuauugaggguggcuggacagggaugguggauggaugguacggcuaucaucaccagaacgaacaagguucaggguacgcggccgaccagaaaaguacccagaaugcaauaaacggcaucacuaauaaggucaacagcgugauugagaaaaugaauacacaguucaccgcuguuggaaaggaguucuccaaacuugaaagaaggauggagaaccugaauaagaagguggaugacggcuuuuuggacaucuggacguacaacgccgaacuacugguccuccuggagaacgaacggacccuugauuuccacgacucuaaugugaaaaaccuguaugagaagguaaaaagccaauugaagaauaacgcuaaagaaauagggaauggaugcuuugaguucuaccauaaguguaacgaugagugcauggaaucaguuaagaaugguacauaugacuaccccaaauauagugaggaauccaagcucaaccgugagaaaauugauggcgugaagcuggagagcaugggggucuaccagaucuuagccaucuauucuacuguggcaucaagucugguccuacucgugagccugggagccauuuccuuuuggaugugcucuaauggcucgcuucagugucgcaucugcauuuga

SEQ ID NO: 136103 - RNA, 1698 nt, Artificial Sequence
  derived and/or modified CDS sequence (opt3) from hemagglutinin__InfluenzaA__AEX35186
augaaggugaaacugcucguccuucugugcaccuucacagccacuuacgcugacacgaucuguauuggcuaucacgcaaacaauagcaccgauacaguugacacuguguuggagaagaacguaaccgugacacauuccgucaauuuacuggaagauucucacaacgggaaacuaugccuccugaagggaauagcgccccuucagcuggguaauuguucaguggccggcuggaucuuggggaacccugagugcgaacuccugauuaguagagagagcugguccuacaucguugaaaaaccaaauccggagaacggaaccuguuaucccggccauuuugcugacuacgaggaacugagggagcaacucucuucggugagcucauucgaacgguuugagauuuucccuaaggagaguuccuggccaaaucacacuacaaccggugucucugccagcugcucccauaacggggaaucaaguuuuuauaagaauuuacuguggcuuacgggaaagaacggcuuguaccccaaucugagcaagucuuaugcaaacaauaaagagaaggaagugcuaguacucuggggcguucaccacccuccaaacaucgggaaccagcgcgcccuguaccauacugagaaugcuuacguguccgucgugucaagccacuauagucgaaaauucacccccgaaauagcaaagcguccuaaggugagagaucaggagggaaggaucaacuacuauuggacacuucuggagccaggugacacuauuaucuuugaagccaauggcaacuugauugcuccgcgguacgccuucgcgcucucucgcggguuuggauccggcaucauaaauagcaacgcacccauggaugagugugacgccaaaugccagaccccucaaggugcuauuaauucgucucugccauuccagaacguccaucccguuacaaucggggaauguccuaaguaugugagauccgccaaauuaaggaugguaaccggacugcggaauauuccaucaauccagagucgcggccucuuuggcgcaaucgcuggguucauugagggagguuggacgggcaugguggaugggugguacggauaucaccaccagaacgaacaaggcagcgguuacgccgcggaccagaaguccacucagaaugccauaaacgggaucacaaauaaagucaacucugugauugagaagaugaauacccaguuuacugcaguuggcaaagaguucaacaaacuugaacgaagaauggagaaccugaauaagaaaguggaugacggauucaucgauauauggacauacaacgcugaauugcuaguccugcucgagaaugaaaggacccuggacuuucaugacagcaacgugaagaaucuuuaugagaaaguaaagucacaacugaaaaacaaugccaaggagauuggcaacgggugcuucgaauuuuaccacaaguguaaugaugagugcauggaaaguguuaaaaacggaacguaugacuaccccaaguauuccgaggagagcaaauugaaucgggaaaagaucgauggugugaaacucgagucuaugggcgucuaccagauccuggcuauuuauucaaccguggccaguagcuuaguccugcuagugucccucggggcaaucucuuucuggaugugcucgaacggaagccugcagugucguauuugcauauga

SEQ ID NO: 136104 - RNA, 1698 nt, Artificial Sequence; identical to SEQ ID NO: 136103
  derived and/or modified CDS sequence (opt3) from hemagglutinin__InfluenzaA__AEX35197

SEQ ID NO: 136105 - RNA, 1698 nt, Artificial Sequence; identical to SEQ ID NO: 130536
  derived and/or modified CDS sequence (opt3) from hemagglutinin__InfluenzaA__AEX35208

SEQ ID NO: 136106 - RNA, 1701 nt, Artificial Sequence
  derived and/or modified CDS sequence (opt3) from hemagglutinin__InfluenzaA__AEX35219
augaagaccaucauugcccugagcuacauacucugccuuguguucgcucagaaacugcccggcaacgacaauuccacagcaacuuuguguuuagggcaccaugccgucccuaacggaacgcugguuaagaccaucacaaaugaucaaauugaggugacuaacgcgaccgaacuuguacagucuucaaguacagguggcaucugcgacagcccacaccagauucucgauggggagaauuguacccugaucgacgcucuacugggagauccgcauugcgacggcuuucagaacaaagaaugggauuuguucguggagagauccaaggccuauucuaauuguuaccccuaugacgucccugauuacgcaucgcucaggucacugguggccagcagugguacucuggaauuuaacaaugaguccuucaacuggacagggguugcucaaaauggaaccucuagcgcaugcaaacggcgcuccaacaagucauuuuucagucgacucaauugguuacaccagcugaaguauaaauacccagcccuuaacgugacgaugcccaauaacgagaaguuugacaaauuguauauauggggcguccaucacccuagcacugauucugaccagaucucccuguacgcucaggccucaggccgugugaccguaagcacaaagagaagucaacagacuguuauuccaaacaucgggucuaggcccugggugcgggaugucuccagccgcauuucgaucuacuggaccauagugaaaccuggagacauucuacucaucaauucuacagguaaccugauugcgccaagaggcuauuucaagaucagguccgggaagucaaguaucaugcggagcgacgcaccgauuggaaaauguaauuccgaaugcauaacccccaacggcucuaucccuaaugauaagccauuucagaacgugaaucgcauuacguacggugccuguccccgauaugucaaacagaacacucuuaagcuggcuacagggaugagaaauguuccugagaaacaaaccaggggaaucuucggcgccauagcaggcuuuauugaaaacgggugggagggaaugguggacgguugguacggcuuccggcaccagaauagcgaggggacuggacaggcugccgauuugaagucaacacaagcggccaucaaccagaucaauggcaaacucaaccgucugauugguaagaccaaugaaaaguuucaucagaucgagaaagaguucagugaaguagaagggcgcauucaggacuuagagaaguauguggaggauacgaaaauagaccugugguccuacaacgcagaacuccuugucgcucuggagaaccaacacaccaucgauuugacagacagcgaaaugaauaagcuauucgagagaacuaaaaagcagcugagggaaaacgccgaggauaugggcaauggaugcuuuaagauuuaucauaaaugugacaacgcuugcaucggcucuauccggaaugggaccuacgaucacgacguguaccgagacgaggcccucaacaaucgcuuccagauuaagggaguugaacugaaaucagguuauaaggauuggauacuuuggaucaguuuugcaaugagcugcuuccuguugugugugguccuccugggcuuuauuaugugggccugccagaaagggaacaucagauguaauauuugcaucuga

SEQ ID NO: 136107 - RNA, 1698 nt, Artificial Sequence; identical to SEQ ID NO: 136048
  derived and/or modified CDS sequence (opt3) from hemagglutinin__InfluenzaA__AEX35230

SEQ ID NO: 136108 - RNA, 1701 nt, Artificial Sequence; identical to SEQ ID NO: 129945
  derived and/or modified CDS sequence (opt3) from hemagglutinin__InfluenzaA__AEX35241

SEQ ID NO: 136109 - RNA, 1698 nt, Artificial Sequence; identical to SEQ ID NO: 136048
  derived and/or modified CDS sequence (opt3) from hemagglutinin__InfluenzaA__AEX35263

SEQ ID NO: 136110 - RNA, 1698 nt, Artificial Sequence; identical to SEQ ID NO: 136048
  derived and/or modified CDS sequence (opt3) from hemagglutinin__InfluenzaA__AEX35274

SEQ ID NO: 136111 - RNA, 1701 nt, Artificial Sequence; identical to SEQ ID NO: 129843
  derived and/or modified CDS sequence (opt3) from hemagglutinin__InfluenzaA__AEX35285

SEQ ID NO: 136112 - RNA, 1701 nt, Artificial Sequence; identical to SEQ ID NO: 136009
  derived and/or modified CDS sequence (opt3) from hemagglutinin__InfluenzaA__AEX35296

SEQ ID NO: 136113 - RNA, 1701 nt, Artificial Sequence
  derived and/or modified CDS sequence (opt3) from hemagglutinin__InfluenzaA__AEX35307
augaagaccaucauugcccugagcuacauacucugccuuguguucgcucagaaaauccccggcaacgacaauuccacagcaacucuguguuuggggcaccaugccgucccuaacggaacgauuguuaagaccaucacaaaugaucaaauugaggugacuaacgcgaccgaauuaguacagucuucaaguacagguggcaucugcgacagcccacaccagauacuggauggggagaauuguacccuaaucgacgcucuccugggagauccgcagugcgacggcuuucaaaacaaaaagugggaucuuuucguggaaagauccaaagccuauucuaauuguuaccccuaugacgucccugauuacgcaucgcugaggucauugguggccagcagugguacucucgaguuuaacaaugaauccuucaacuggacagggguuacccagaauggaacgucuagcgcuugcaagcggcgcuccaacaagucauuuuucagucgacugaauuggcugacucaucucaaauauaaguacccagcauuaaacgugaccaugcccaauaacgagaaauuugacaagcuguauauuuggggcguccaccauccuggcacagauagcgaccagaucucucuuuacgcccaggcuuccgggcguauuacugugucaaccaaaagaagccaacagacaguaaucccaaacauaggaaguaggccccggguucgcgaugugucuuccagaauuagcaucuacuggaccauugucaagccuggugacaucuugcugaucaauucgacgggcaaccuaauugccccaaggggguauuucaagauacggucuggaaaauccucaaucaugcgcagugacgcgccgauuggcaaguguaauagcgagugcaucacucccaacgguuccauaccuaaugauaaaccauuucagaacgugaaucgaauuacauacggggcaugucccagauaugugaagcagaacacccucaaacuggccacuggaaugaggaaugucccugaaaagcaaacacggggcaucuucggcgcuaucgccggguuuauugagaacggaugggaagguaugguugacggcugguacggguuccgucaccaaaauucugagggaaccggccaggcagcugaucuuaaaagcacgcaggccgcgaucaaccagauuaaugguaagcugaaccgcuugauagggaagaccaaugagaaauuucaccagaucgaaaaggaguucucagaaguggagggcaggauucaggaccucgaaaaauauguagaggauacaaagaucgaccuguggaguuacaacgccgaguuacugguggcacucgaaaaccaacauacuaucgaucuuaccgacuccgagaugaauaaacuguucgaaagaacaaagaagcaguugcgggagaacgcugaagauaugggaaauggcugcuuuaaaauuuaucacaagugugacaacgccugcauagggagcauccgaaauggaacuuacgaucaugacgucuaccgcgacgaggcucuaaacaauagauuccagauuaaagguguggagcugaagucuggcuauaaagauuggauccucuggauuucauuugccaucaguugcuuccugcuuuguguugugcuguugggguuuauaaugugggcaugccagaagggaaacaucagguguaauauuugcaucuga

SEQ ID NO: 136114 - RNA, 1701 nt, Artificial Sequence; identical to SEQ ID NO: 136009
  derived and/or modified CDS sequence (opt3) from hemagglutinin__InfluenzaA__AEX35318

SEQ ID NO: 136115 - RNA, 1701 nt, Artificial Sequence
  derived and/or modified CDS sequence (opt3) from hemagglutinin__InfluenzaA__AEX35329
augaagaccaucauugcccugagcuacuuccucugccuuguguuugcucagaaacugcccggcaacgacaauuccacagcaacuuuguguuuagggcaccaugccgucccuaacggaacgauaguuaagaccaucacaaaugaucaaauugaggugacuaacgcgaccgaacugguacaaaauucuucaacagguggcaucugcgacaguccacaccagauucuagauggggagaacuguacccucaucgacgcucugcuuggagauccgcagugcgacggcuuccagaauaaaaagugggaucuguuuguggaaagaagcaaagccuauuccaacuguuaccccuaugacgucccugauuacgcaucuuugaggucgcucguggccucaagcgguacucuggaguucaauaacgaaaguuuuaauuggacagggguuacccagaacggaacguccucugcuugcaagcggcgcagcaauaaguccuucuuuucacgacugaacuggcucacucauuuaaaauauaaguacccagcacugaaugugaccaugcccaacaacgagaaauucgacaaacuuuauauauggggcguccaccauccuggcacagauagugaccagaucagcuuguacgcccaggcuucugggcguauuacuguguccaccaagagaucacaacagacaguaaucccaaauauuggaagcaggccccggguucgcgaugugaguucuagaaucuccauauacuggaccauugucaagccuggugacauccugcuaauuaacagcacgggcaaucucaucgccccaaggggguauuuuaagauccggucgggaaaaucuuccauuaugcgcucagacgcgccgauaggcaaguguaacagugagugcaucacucccaaugguagcauuccuaacgauaaaccauuccagaaugugaaccgaaucacauacggggcaugucccagauaugugaagcagaauacccugaaacuugccacuggaaugaggaacgucccugaaaagcaaacacggggcauauuuggcgcuauugccggguucaucgagaauggaugggaagguaugguugacggcugguacggguuucgucaccagaacuccgagggaaccggccaggcagcugaucugaaaucuacgcaagccgcgaucaaucagauuaacgguaaguugaaucgccucaucgggaagaccaacgagaaauuccaccagauugaaaaggaguucagcgaaguggagggcagaauacaggaccuggaaaaauauguagaggauacaaagaucgacuuauggucauacaacgccgagcugcucguggcacuugaaaaucaacauacuauugaucugaccgacagugagaugaacaaauuguuugaaaggacaaagaagcagcuacgggagaaugcugaagauaugggaaacggcugcuucaaaaucuaucacaagugugacaaugccugcaucggguccauucgaaacggaacuuacgaucaugacgucuaccgcgacgaggcucugaauaacagauuucagauaaaagguguggagcucaagagcggcuauaaagauuggauccuguggauuucuuucgccaucucaugcuuucuucuguguguugcauugcucggguucauuaugugggccugccagaagggaaauaucagguguaacauaugcaucuga

SEQ ID NO: 136116 - RNA, 1701 nt, Artificial Sequence
  derived and/or modified CDS sequence (opt3) from hemagglutinin__InfluenzaA__AEX35340
augaagaccaucauugcccugagcuacauacucugccuuguguucgcucagaaacugcccggcaacgacaauuccacagcaacuuuguguuuagggcaccaugccgucccuaacggaacgaucguuaagaccauuacaaaugaucaaaucgaggugacuaacgcgaccgaacugguacaaaauucuucaacagguggcauuugcgacaguccacaccagauccuagauggggagaacuguacccucauagacgcucugcuuggagauccgcagugcgacggcuuucagaauaaaaagugggaucuguucguggaaagaagcaaagccuauuccaacuguuaccccuaugacgucccugauuacgcaucuuugaggucgcucguggccucaagcgguacucuggaguuuaauaacgaaaguuucaauuggacagggguuacccagaacggaacguccucugcuugcaagcggcgcagcaauaaguccuuuuucucacgacugaacuggcucacucauuuaaaauauaaguacccagcacugaaugugaccaugcccaacaacgagaaauuugacaaacuuuauaucuggggcguccaccauccuggcacagauagugaccagauuagcuuguacgcccaggcuucugggcguaucacuguguccaccaagagaucacaacagacaguaauuccaaauaucggaagcaggccccggguucgcgaugugaguucuagaauauccauuuacuggaccaucgucaagccuggugacauucugcuaaucaacagcacgggcaaucucaucgccccaaggggguauuucaagauucggucgggaaaaucuuccauaaugcgcucagacgcgccgaucggcaaguguaacagugagugcauuacucccaaugguagcaucccuaacgauaaaccauuucagaaugugaaccgaauaacauacggggcaugucccagauaugugaagcagaauacccugaaacuugccacuggaaugaggaacgucccugaaaagcaaacacggggcauuuucggcgcuaucgccggguuuaucgagaauggaugggaagguaugguugacggcugguacggguuccgucaccagaacuccgagggaaccggccaggcagcugaucugaaaucuacgcaagccgcgauuaaucagaucaacgguaaguugaaucgccucauugggaagaccaacgagaaauuucaccagauagaaaaggaguucagcgaaguggagggcagaauccaggaccuggaaaaauauguagaggauacaaagauugacuuauggucauacaacgccgagcugcucguggcacuugaaaaucaacauacuaucgaucugaccgacagugagaugaacaaauuguucgaaaggacaaagaagcagcuacgggagaaugcugaagauaugggaaacggcugcuuuaaaaucuaucacaagugugacaaugccugcauuggguccauacgaaacggaacuuacgaucaugacgucuaccgcgacgaggcucugaauaacagauuccagaucaaagguguggagcucaagagcggcuauaaagauuggauucuguggaucucuuuugccauuucaugcuuccuucuguguguugcauugcucggguuuaucaugugggccugccagaagggaaauauaagguguaacaucugcauuuga

SEQ ID NO: 136117 - RNA, 1701 nt, Artificial Sequence; identical to SEQ ID NO: 136009
  derived and/or modified CDS sequence (opt3) from hemagglutinin__InfluenzaA__AEX35351

SEQ ID NO: 136118 - RNA, 1701 nt, Artificial Sequence; identical to SEQ ID NO: 136009
  derived and/or modified CDS sequence (opt3) from hemagglutinin__InfluenzaA__AEX35362

SEQ ID NO: 136119 - RNA, 1701 nt, Artificial Sequence; identical to SEQ ID NO: 129843
  derived and/or modified CDS sequence (opt3) from hemagglutinin__InfluenzaA__AEX35373

SEQ ID NO: 136120 - RNA, 1701 nt, Artificial Sequence
  derived and/or modified CDS sequence (opt3) from hemagglutinin__InfluenzaA__AEX35384
augaagaccaucauugcccugagcuacauacucugccuuguguucgcucagaaacugcccggcaacgacaauuccacagcaacuuuguguuuagggcaccaugccgucccuaacggaacgaucguuaagaccauuacaaaugaucaaaucgaggugacuaacgcgaccgaacugguacagucuucaaguacagguggcauuugcgacagcccacaccagauccuagauggggagaauuguacccucauagacgcucugcuuggagauccgcagugcgacggcuuucaaaacaaaaagugggaucuguucguggaaagauccaaagccuauucuaauuguuaccccuaugacgucccugauuacgcaucguugaggucacucguggccagcagugguacucuggaguuuaacaaugaauccuucaacuggacagggguuacccagaauggaacgucuagcgcuugcaagcggcgcuccaacaagucauuuuucagucgacugaauuggcucacucauuuaaaauuuaaguauccagcacugagcgugaccaugcccaacaaugagaaauucgacaaacuuuacaucuggggcguccaccauccuggcacagauaacgaccagauuucuuuguaugcccaggcuuccgggcguaucacugugucaaccaagagaagccaacagacaguaauuccaaacaucggaaguaggacccggguucgcgaugugcccucuagaauauccauuuacuggacgaucgucaagccuggugacauucugcuaaucaauagcacuggcaaccucaucgccccaaggggguacuuuaagauucggucgggaaaaucuuccauaaugcgcucagacgcgccgaucggcaaguguaauagugagugcauuacacccaacgguagcaucccuaaugauaaaccauuccagaacgugaaucgaauaaccuauggggcaugucccagauacgugaagcagaacacucugaaacuugccacaggaaugaggaaugucccugaaaagcaaacccggggcauuuuuggcgcuaucgccggguucaucgagaacggaugggaagguaugguugacggcugguauggguuucgucaccaaaauuccgagggaacgggccaggcagcugaucugaaaucuacccaggccgcgauuaaccagaucaaugguaaguugaaccgccucauugggaagacaaaugagaaauuccaccagauagaaaaggaguucagcgaaguggagggcagaauccaggaccuggaaaaauacguagaggauacuaagauugacuuauggucauauaacgccgagcugcucguggcacuugaaaaccaacauaccaucgaucugacagacagugagaugaauaaauuguuugaaaggacuaagaagcagcuacgggagaacgcugaagauaugggaaauggcugcuucaaaaucuaccacaagugugacaacgccugcauuggguccauacgaaauggaaccuaugaucaugacgucuaccgcgacgaggcucugaacaauagauuucagaucaaagguguggagcucaagagcggcuacaaagauuggauucuguggaucucuuucgccauuucaugcuuucuucuguguguugcauugcucggguucaucaugugggccugccagaagggaaacauaagguguaauaucugcauuuga

SEQ ID NO: 136121 - RNA, 1701 nt, Artificial Sequence
  derived and/or modified CDS sequence (opt3) from hemagglutinin__InfluenzaA__AEX35395
augaagaccaucauugcccugagcuacauacucugccuuguguucgcucagaaacugcccggcaacgacaauuccacagcaacuuuguguuuagggcaccaugccgucccuaacggaacgaucguuaagaccauuacaaaugaucaaaucgaggugacuaacgcgaccgaacugguacagucuucaaguacaggugagauuugcgacagcccacaccagauccuagauggcgaaaauuguacccucauagacgcucugcuuggggauccgcagugcgacggauuucaaaacaaaaaguggaaucuguucguggagagauccaaagccuauucuaacuguuaccccuaugaugucccugacuacgcaucguugaggucacucguggccagcaguggcacucuggaauuuaauaacgaguccuucaauuggacagguguuacccagaacgggacgucuagcgcuugcaagcggcgcuccaauaagucauuuuucagucgacugaacuggcucacucauuuaaaauuuaaguauccagcacugaaugugaccaugcccaacaacgagaaauucgauaaacuuuacaucuggggaguccaccauccuggcacagacaaugaucagauuagcuuguaugcccaggcuucuggccguaucacuguguccaccaagagaucacaacagacaguaauuccaaacaucgggagcaggccccggguucgcgacgugccuaguagaauaucuauuuacuggaccaucgucaagccaggagauauucugcuaaucaauuccacggguaaccucaucgccccgaggggcuacuuuaagauucggagcgggaaaucgucuauaaugcgcuccgacgcgcccaucggaaaguguaauucagaaugcauuacuccuaacggcaguaucccaaaugacaaacccuuccagaacgugaaucgaauaacauauggugcauguccuagauacgugaagcagaacacccugaaacuugccacugggaugaggaaugucccagagaagcaaacacggggaauuuuuggcgcuaucgccggcuucaucgaaaacgggugggagggaaugguugaugguugguauggcuuucgucaccagaauagcgaggggaccggacaggcagcugaccugaaauccacgcaagccgcgauuaaccagaucaauggcaaguugaaccgccucauugguaagaccaacgaaaaauuccaccagauagagaaggaguucucugaaguggaagggagaauccaggaucuggagaaauacguagaggacacaaagauugauuuauggagcuauaaugccgaacugcucguggcacuugagaaccaacauacuaucgaccugaccgauucagaaaugaauaaauuguuugagaggacaaagaagcagcuacgggaaaacgcugaggacaugggcaauggaugcuucaaaaucuaccacaagugugauaacgccugcauuggcaguauacgaaaugggacuuaugaccaugaugucuaccgcgacgaggcucugaacaauagauuucagaucaaaggaguggaacucaaguccgguuacaaagacuggauucuguggaucagcuucgccauuucuugcuuucuucuguguguugcauugcucggcuucaucaugugggccugccagaaggggaacauaagguguaauaucugcauuuga

SEQ ID NO: 136122 - RNA, 1701 nt, Artificial Sequence; identical to SEQ ID NO: 129843
  derived and/or modified CDS sequence (opt3) from hemagglutinin__InfluenzaA__AEX35406

SEQ ID NO: 136123 - RNA, 1701 nt, Artificial Sequence; identical to SEQ ID NO: 129843
  derived and/or modified CDS sequence (opt3) from hemagglutinin__InfluenzaA__AEX35417

SEQ ID NO: 136124 - RNA, 1701 nt, Artificial Sequence
  derived and/or modified CDS sequence (opt3) from hemagglutinin__InfluenzaA__AEX35428
augaagaccaucauugcccugagcuacauacucugccuuguguucgcucagaaacugcccggcaacgacaauuccacagcaacuuuguguuuagggcaccaugccgucccuaacggaacgcugguuaagaccaucacaaaugaucaaauugaggugacuaacgcgaccgaacuuguacagucuucaaguacagguggcaucugcgacagcccacaccagauucucgauggggagaauuguacccugaucgacgcucuacugggagauccgcauugcgacggcuuucagaacaaaaagugggauuuguucguggaaagauccaaagccuauucuaauuguuaccccuaugacgucccugauuacgcaucgcucaggucacugguggccagcagugguacucuggaguuuaacaaugaauccuucaacuggacagggguugcucaaaauggaaccucuagcgcaugcaagcggcgcuccgacaagucauuuuucagucgacucaacugguuacaccagcugaaauauaaguacccagcccuuaaugugacgaugcccaacaaugagaaauuugauaaguuguauauauggggcguccaucacccuggcacugacagcgaucagaucucucuguacgcucaggccuccgggcguauuaccgugucaacaaaaagaagccaacagacuguaaucccaaacauuggaaguaggccccggguucgcgacgugucuuccagaaucagcauauacuggaccauugucaagccuggugacauccuauucauuaacucgacaggcaaucucaucgcgccaaggggguauuuuaagauccggucuggaaaauccucaauuaugcgcagugaugcaccgauagacaaguguaacagcgagugcaucacccccaauggcuccauuccuaacgauaaaccauuccagaaugugaaccgaaucacguacggugccugucccagauaugugaagcagaauacucugaaacuugcuacagggaugaggaacgucccugaaaagcaaacccggggaauauuuggcgccauugcaggcuucaucgagaaugggugggaaggaaugguugacgguugguacggcuuucgucaccagaacucugaggggacuggacaggcugccgaucugaaaagcacacaagcggccaucaaucagauuaacggcaaguugaaucgccucaucgguaagaccaacgagaaauuccaucagauugaaaaggaguucucagaaguggaggggagaauacaggaccuggaaaaauauguagaggauacgaagaucgacuuauggaguuacaaugcagagcugcucguggcucuugaaaaccaacacaccauugaucugacagacuccgagaugaacaaauuguuugaaaggacuaagaagcagcuacgggagaaugccgaagauaugggcaacggaugcuucaaaaucuaucauaagugugacaaugcuugcaucggcagcauucgaaacgggaccuacgaccacgaugucuaccgcgacgaggcccugaauaacagauuucagauaaaaggaguggagcucaagucugguuauaaagauuggauccuguggauuucauucgcaaucaguugcuuucuucuguguguugccuugcucggcuucauuaugugggcuugccagaaggggaauaucagguguaacauaugcaucuga

SEQ ID NO: 136125 - RNA, 1698 nt, Artificial Sequence
  derived and/or modified CDS sequence (opt3) from hemagglutinin__InfluenzaA__AEX35439
augaaggugaaacugcucguccuucugugcaccuucacagccacuuacgcugacacgaucuguauuggcuaucacgcaaacaauagcaccgauacaguugacacuguguuggagaagaacguaaccgugacacauuccgucaauuuacuggaagauucucacaacgggaaacuaugccuccugaagggaauagcgccccuucagcuggguaauuguucaguggccggcuggaucuuggggaacccugagugcgaacuccugauuaguaaagagagcugguccuacaucguugaaaccccaaauccggagaacggaacuuguuaucccggcuacuuugcugacuaugaggaacugagagagcaacucucuucggugagcucauucgaaagguuugagauuuucccuaaggagaguuccuggccaaaucauacagucaccggugugucugccagcugcucccacaacgggaagucaaguuuuuaccggaauuuacuguggcuuacgggcaaaaacggauuguaucccaaucugagcaagucuuacgcaaacaauaaagaaaaggagguucuaguacucuggggcgugcaucacccuccaaacaucggggaucagcgcgcccuguaccacacugaaaacgcuuaugucuccguggugucaagccauuacagucgacguuucacccccgagauagcaaaaagaccuaaggucagggaccaggaaggacggaucaauuauuacuggacacuucuggagccaggugauacuauuaucuuugaggccaacggcaauuugauugcuccgcgcuucgccuuugcgcucucuagaggguucggauccggcaucauaaccagcaacgcacccauggacgaaugugaugccaagugccagacaccucaaggugcuauuaauucgucucugccauuucagaacguucaccccgugaccaucggggaguguccuaaauauguaagguccgccaaguuacggauggugacgggacugcgcaauauuccaucaauccagagucgaggccucuucggcgcaaucgcuggguuuauugaaggagguuggacuggcauggucgacgggugguacggauaucaucaccagaacgagcaaggcagcgguuacgccgcggaucagaaauccacacagaaugccauaaacgggaucaccaauaaggugaacucuguuauugaaaagaugaauacucaguucacagcagugggcaaagaguucaacaaacuugagagaaggauggaaaaucugaacaagaaggucgacgauggauuuuuggacaucuggaccuacaacgcugagcuacuggugcuccuggaaaaugagcggacgcuugacuuccacgauagcaacguuaaaaaucuguaugaaaagguaaaaucacaauugaagaacaaugccaaagagauaggcaacgggugcuuugaguucuaccauaaguguaaugacgaaugcauggagagugugaagaacggaaccuaugauuaccccaaauauuccgaagagagcaagcucaaucgugagaaaauugacggugucaagcuggaaucuaugggcguguaccagaucuuagcuaucuauucaacagucgccaguagccuggugcuacucguuucccugggggcaauuucuuuuuggaugugcucgaacggaagccuucagugucgcaucugcauuuga

SEQ ID NO: 136126 - RNA, 1701 nt, Artificial Sequence
  derived and/or modified CDS sequence (opt3) from hemagglutinin__InfluenzaA__AEX35450
augaagaccaucauugcccugagcuacauacucugccuuguguucgcucagaaacugcccggcaacgacaauuccacagcaacuuuguguuuagggcaccaugccgucccuaacggaacgaucguuaagaccauuacaaaugaucaaaucgaggugacuaacgcgaccgaacugguacagucuucaaguacagguggcauuugcgacagcccacaccagauccuagauggggagaauuguacccucauagacgcucugcuuggagauccgcagugcgacggcuuucaaaacaaaaagugggaucuguucguggaaagauccaaagccuauucuaauuguuaccccuaugacgucccugauuacgcaucguugaggucacucguggccagcagugguacucuggaguuuaacaaugaaaacuucaauuggacagggguuacccagaacggaacguccucugcuugcaagcggcgcagcaauaacuccuuuuucucacgacugaauuggcucacucauuuaaaguuuaaauauccagcacugaacgugaccaugcccaacaaugagaaguucgacaaacuuuacaucuggggcguccaccauccuggcacagauaacgaccagauuuuucuuuaugcccaggcuagugggcguaucacugugagcaccaagagaucucaacagacaguaauuccaaauaucggauccaggccccggguucgcaacauaccuucaagaauuagcaucuacuggaccauugugaaaccaggugauauccugcuaaucaauaguacgggcaaccucauugccccgaggggguacuucaagauacagucuggaaaguccagcaucaugcggucggacgcgcccauuggcaaauguaauucugagugcaucacuccuaacgguuccauaccaaaugacaagcccuuucagaacgucaaucgcauuacauauggggcauguccucgauacgugaaacaaaacacccugaaguuggccacuggaaugagaaaugugccagaaaaacagacaaggggcaucuucggcgcuaucgccggguuuauugagaacggaugggaagguauggucgauggcugguauggguuccggcaccaaaauucagagggaaucggccaggcagcugaccugaagaguacccaggccgcgauuaaccagauaaacgguaaauugaaucgucucaucgggaagacgaacgagaaguuccaccagauugaaaaagaguuuagcgaaguugagggccgcauccaagaucuggaaaaguacguggaggacaccaaaaucgauuuaugguccuauaaugccgagcugcucguagcacuugaaaaccagcauacaauugaccugacugauucugagaugaauaaguuguucgaaagaaccaaaaagcagcuaagggagaacgcugaagacaugggaaauggcugcuuuaagauauaccacaaaugugauaacgccugcaucgggagcauucggaauggaacauaugaccaugauguguaccgagacgaggcucugaacaaucgcuuccagaucaagggugucgagcucaaaucaggcuacaaggacuggauucuguggaucaguuuugccauauccugcuuccuucuguguguggcauugcucggguuuaucaugugggccugccaaaaaggaaacauuagauguaauaucugcauuuga

SEQ ID NO: 136127 - RNA, 1701 nt, Artificial Sequence; identical to SEQ ID NO: 128678
  derived and/or modified CDS sequence (opt3) from hemagglutinin__InfluenzaA__AEX35461

SEQ ID NO: 136128 - RNA, 1701 nt, Artificial Sequence
  derived and/or modified CDS sequence (opt3) from hemagglutinin__InfluenzaA__AEX35472
augaagaccaucauugcccugagcuacauacucugccuuguguucgcucagaaacugcccggcaacgacaauuccacagcaacuuuguguuuagggcaccaugccgucccuaacggaacgaucguuaagaccauuacaaaugaucaaaucgaggugacuaacgcgaccgaacugguacagucuucaaguacagguggcauuugcgacagcccacaccagauccuagauggggagaauuguacccucauagacgcucugcuuggagauccgcagugcgacgauuuucaaaacaaaaagugggaccuguucguggaaagauccaaagccuauucuaauuguuaccccuaugaugucccugacuacgcaucguugaggucacucguggccagcaguggcacucuggaguuuaacaaugaauccuucaacuggacagguguuacccagaaugggacgucuagcgcuugcaagcggcgcuccaacaauucauuuuucagucgacugaacuggcucacucauuuaaaguuuaaauauccagcacugaaugugaccaugcccaacaacgagaaguucgauaaacuuuacaucuggggaguccaccauccuggcacagacaaugaucagaucuuuuuguaugcccaggcuagcggccguauuacugugucuaccaagagaucccaacagacaguaauuccaaacaucgggucaaggccccggguucgcaauauaccuagcagaauuaguaucuacuggaccauugugaaaccaggagacauccugcuaaucaacucuacggguaaucucauugccccgaggggcuacuucaagauacgguccggaaagagcucgaucaugcgcucugacgcgcccauugggaaauguaacuccgagugcaucacuccuaauggcucaauaccaaacgauaagcccuuucagaaugucaaccgaauuacauauggugcauguccuagauacgugaaacagaauacccugaagcuggccacugggaugaggaacgugccagaaaaacaaacacggggaaucuucggcgcuaucgccggcuuuauugagaaugggugggaaggaauggucgacgguugguauggcuuccgucaccagaacagugaggggaucggacaggcagcugaucuuaagagcacccaagccgcgauuaaucagauaaacggcaaauugaaccgccucaucgguaagacgaaugagaaguuccaccagauugaaaaagaguuuuccgaaguugaggggagaauccaggaccuggaaaaguacguggaggauaccaaaaucgacuuauggucuuauaacgccgagcugcucguagcacuugaaaaucaacauacaauugaucugacugacagcgagaugaacaaguuguucgaaaggaccaaaaagcagcuacgggagaaugcugaagauaugggcaacggaugcuuuaagauauaccacaaaugugacaaugccugcaucggcucaauucgaaacgggacauaugaucaugacguguaccgcgacgaggcucugaauaacagauuccagaucaagggagucgagcucaaaagugguuacaaggauuggauucuguggaucuccuuugccauaagcugcuuccuucugugugugguuuugcucggcuuuaucaugugggcaugccagaaagggaauauuagguguaacaucugcauuuga

SEQ ID NO: 136129 - RNA, 1701 nt, Artificial Sequence; identical to SEQ ID NO: 128678
  derived and/or modified CDS sequence (opt3) from hemagglutinin__InfluenzaA__AEX35483

SEQ ID NO: 136130 - RNA, 1701 nt, Artificial Sequence
  derived and/or modified CDS sequence (opt3) from hemagglutinin__InfluenzaA__AEX35494
augaagaccaucauugcccugagcuacauacucugccuuguguucgcucagaaacugcccggcaacgacaauuccacagcaacuuuguguuuagggcaccaugccgucccuaacggaacgaucguuaagaccauuacaaaugaucaaaucgaggugacuaacgcgaccgaacugguacagucuucaaguacagguggcauuugcgacagcccacaccagauccuagauggggagaauuguacccucauagacgcucugcuuggagauccgcagugcgacggccugcaaaacaaaaagugggauuuguuuguggaaagauccaaagccuauucuaauuguuaccccuaugacgucccugauuacgcaucgcucaggucacugguggccagcagugguacucuggaguucaacaaugaauccuuuaacuggacagggguuacccagaauggaacgucuagcgcuugcaagcggcgcuccaacaauucauucuuuagucgacucaacugguuaacucaucugaaguucaaauauccagcacuuaaugugaccaugcccaacaacgagaaguuugacaaauuguacaucuggggcguccaccauccuggcacagauaaugaccagauuuuccuguaugcccaggcuagcgggcguaucacugugucuaccaagagaucccaacagacaguaauuccaaacaucggaucaaggccccggguucgcaauauaccuagcagaauuaguaucuacuggaccauugugaaaccaggugauauccuacucaucaacucuacgggcaaucugauugccccgaggggguacuuuaagauacgguccggaaagagcucgaucaugcgcucugacgcgcccauuggcaaauguaacuccgagugcaucacuccuaaugguucaauaccaaacgacaagcccuuccagaaugucaaccgaauuacauauggggcauguccuagauacgugaaacagaauacccuuaagcuggccacuggaaugaggaacgugccagaaaaacaaacacggggcaucuuuggcgcuaucgccggguucauugagaauggaugggaagguaugauggauggcugguauggguuucgucaccagaacagugagggaaucggccaggcagcugaccucaagagcacccaagccgcgauuaaucagauaaacgguaaauugaaccgccugaucgggaagacgaaugagaaguuccaccagauugaaaaagaguucuccgaagucgagggcagaauccaggauuuagaaaaguacguugaggacaccaaaaucgaucuguggucuuauaacgccgagcuccuuguggcacuggaaaaucaacauacaauugacuugacugauagcgagaugaacaagcuauuugaaaggaccaaaaagcagcugcgggagaaugcugaagacaugggaaacggcugcuucaagauauaccacaaaugugauaaugccugcaucgggucaauucgaaacggaacauaugaccaugauguauaccgcgacgaggcucucaauaacagauuucagaucaaggguguggagcugaaaaguggcuacaaggacuggauucuuuggaucuccuucgccauaagcugcuuucuguugugugucgcacuccugggguucaucaugugggccugccagaaaggaaauauuagguguaacaucugcauuuga

SEQ ID NO: 136131 - RNA, 1701 nt, Artificial Sequence
  derived and/or modified CDS sequence (opt3) from hemagglutinin__InfluenzaA__AEX35505
augaagaccaucauugcccugagcuacauacucugccuuguguucgcucagaaacugcccggcaacgacaauuccacagcaacuuuguguuuagggcaccaugccgucccuaacggaacgaucguuaagaccauuacaaaugaucaaaucgaggugacuaacgcgaccgaacugguacagucuucaaguacagguggcauuugcgacagcccacaccagauccuagauggggagaauuguacccucauagacgcucugcuuggagauccgcagugcgacgauuuucaaaacaaaaagugggaccuguucguggaaagauccaaagccuauucuaauuguuaccccuaugaugucccugacuacgcaucguugaggucacucguggccagcaguggcacucuggaguuuaacaaugaauccuucaacuggacagguguuacccagaaugggacgucuagcgcuugcaagcggcgcuccaacaauucauuuuucagucgacugaacuggcucacucauuuaaaguuuaaauauccagcacugaaugugaccaugcccaacaacgagaaguucgauaaacuuuacaucuggggaguccaccauccuggcacagacaaugaucagaucuuuuuguaugcccaggcuagcggccguauuacugugucuaccaagagaucccaacagacaguaauuccaaacaucgggucaaggccccggguucgcaauauaccuagcagaauuaguaucuacuggaccauugugaaaccaggagacauccugcuaaucaacucuacggguaaucucauugccccgaggggcuacuucaagauacuguccggaaagagcucgaucaugcggucugacgcgcccauugggaaauguaacuccgagugcaucacuccuaauggcucaauaccaaacgauaagcccuuucagaaugucaaccgcauuacauauggugcauguccucgauacgugaaacagaauacccuuaagcuggccacugggaugagaaacgugccagaaaaacaaacaaggggaaucuucggcgcuaucgccggcuuuauugagaaugggugggaaggaauggucgacgguugguauggcuuccggcaccagaacagugaggggaucggacaggcagcugaucucaagagcacccaagccgcgauuaaucagauaaacggcaaauugaaccgucugaucgguaagacgaaugagaaguuccaccagauugaaaaagaguuuuccgaaguugaggggcgcauccaggacuuagaaaaguacguggaggauaccaaaaucgaccuguggucuuauaacgccgagcuccuuguagcacuggaaaaucaacauacaauugauuugacugacagcgagaugaacaagcuauucgaaagaaccaaaaagcagcugagggagaaugcugaagauaugggcaacggaugcuuuaagauauaccacaaaugugacaaugccugcaucggcucaauucggaacgggacauaugaucaugacguguaccgagacgaggcucucaauaaccgcuuccagaucaagggagucgagcugaaaagugguuacaaggauuggauucuuuggaucuccuuugccauaagcugcuuccuguuguguguggcacuccugggcuuuaucaugugggccugccagaaagggaauauuagauguaacaucugcauuuga

SEQ ID NO: 136132 - RNA, 1701 nt, Artificial Sequence
  derived and/or modified CDS sequence (opt3) from hemagglutinin__InfluenzaA__AEX35516
augaagaccaucauugcccugagcuacauacucugccuuguguucgcucagaaacugcccggcaacgacaauuccacagcaacuuuguguuuagggcaccaugccgucccuaacggaacgaucguuaagaccauuacaaaugaucaaaucgaggugacuaacgcgaccgaacugguacagucuucaaguacagguggcauuugcgacagcccacaccagauccuagauggggagaauuguacccucauagacgcucugcuuggagauccgcagugcgacggccugcaaaacaaaaagugggauuuguuuguggaaagauccaaagccuauucuaauuguuaccccuaugacgucccugauuacgcaucgcucaggucacugguggccagcagugguacucuggaguucaacaaugaauccuuuaacuggacagggguuacccagaauggaacgucuagcgcuugcaagcggcgcuccaacaauucauucuuuagucgacucaacugguuaacucaucugaaguucaaauauccagcacuuaaugugaccaugcccaacaacgagaaguuugacaaauuguacaucuggggcguccaccauccuggcacagauaaugaccagauuuuccuguaugcccaggcuagcgggcguaucacugugucuaccaagagaucccaacagacaguaauuccaaacaucggaucaaggccccggguucgcaauauaccuagcagaauuaguaucuacuggaccauugugaaaccaggugauauccuacucaucaacucuacgggcaaucugauugccccgaggggguacuuuaagauacgguccggaaagagcucgaucaugcgcucugacgcgcccauuggcaaauguaacuccgagugcaucacuccuaaugguucaauaccaaacgacaagcccuuccagaaugucaaccgaauuacauauggggcauguccuagauacgugaaacagaauacccuuaagcuggccacuggaaugaggaacgugccagaaaaacaaacacggggcaucuuuggcgcuaucgccggguucauugagaauggaugggaagguauggucgauggcugguauggguuucgucaccagaacagugagggaaucggccaggcagcugaccucaagagcacccaagccgcgauuaaucagauaaacgguaaauugaaccgccugaucgggaagacgaaugagaaguuccaccagauugaaaaagaguucuccgaaguugagggcagaauccaggauuuagaaaaguacguggaggacaccaaaaucgaucuguggucuuauaacgccgagcuccuuguagcacuggaaaaucaacauacaauugacuugacugauagcgagaugaacaagcuauuugaaaggaccaaaaagcagcugcgggagaaugcugaagacaugggaaacggcugcuucaagauauaccacaaaugugauaaugccugcaucgggucaauucgaaacggaacauaugaccaugauguguaccgcgacgaggcucucaauaacagauuucagaucaagggugucgagcugaaaaguggcuacaaggacuggauucuuuggaucuccuucgccauaagcugcuuucuguuguguguggcacuccugggguucaucaugugggccugccagaaaggaaauauuagguguaacaucugcauuuga

SEQ ID NO: 136133 - RNA, 1701 nt, Artificial Sequence
  derived and/or modified CDS sequence (opt3) from hemagglutinin__InfluenzaA__AEX35527
augaagaccaucauugcccugagcuacauacucugccuuguguucgcucagaaacugcccggcaacgacaauuccacagcaacuuuguguuuagggcaccaugccgucccuaacggaacgaucguuaagaccauuacaaaugaucaaaucgaggugacuaacgcgaccgaacugguacagucuucaaguacagguggcauuugcgacagcccacaccagauccuagauggggagaauuguacccucauagacgcucugcuuggagauccgcagugcgacggcuuucaaaacaaaaagugggaucuguucguggaaagauccaaagccuauucuaauuguuaccccuaugacgucccugauuacgugucguugaggucacucguugcaagcagugguacucuggaguuuaacaaugaauccuucaacuggacaggggugacccagaauggaacgucuagcgccugcaagcggcgcuccaacaauucauuuuucagucgacugaacuggcucacucauuuaaaguuuaaauauccagcucugaaugucaccaugcccaacaacgagcaguucgacaaacuuuacaucuggggcgugcaccauccuggcacagauaaugaccagauuagcuuguaugcacaagccucugggcguaucacuguauccaccaagagaucacagcagacaguuauuccaaacaucggaagcaggccccgggugcgcgauauaccuaguagaauuucuaucuacuggaccauugucaagccaggugacauccugcuaaucaauuccacgggcaaccucauugcuccgaggggguacuuuaaaauacggagcggaaagucgucuaucaugcgcuccgacgcccccauuggcaaguguaauucagagugcaucacuccuaacgguaguauaccaaaugauaaacccuuccagaacgugaaucgaauuacauauggggcguguccuagauacgugaagcaaaacacccugaaacuugcaacuggaaugaggaaugucccagaaaagcagacacggggcaucuuuggcgccaucgcuggguucauugagaacggaugggaagguaugguugacggcugguauggguuucgucaccagaauagcgagggaaucggccaagccgcagaucugaaauccacccaggcugccauuaaccagauaaaugguaaguugaaccgccucaucgggaaaacgaacgagaaguuccaccagauugaaaaggaguucucugaaguggagggcagaauccaagaccuggaaaaauacguagaggauaccaagaucgacuuauggagcuauaaugcggagcugcucguggcccuugaaaaccagcauacaauugaucugacugacucagagaugaauaaauuguuugaaaggaccaagaaacagcuacgggagaacgcagaagauaugggaaauggcugcuucaagauauaccacaagugugacaacgcuugcaucgggaguauucgaaauggaacauaugaucaugacgucuaccgcgacgaggcccugaacaauagauuucagaucaaagguguggagcucaaguccggcuacaaagauuggauucuguggaucagcuucgcuauaucuugcuuucuucuguguguugccuugcucggguucaucaugugggcaugccaaaagggaaacauuagguguaauaucugcauuuga

SEQ ID NO: 136134 - RNA, 1701 nt, Artificial Sequence
  derived and/or modified CDS sequence (opt3) from hemagglutinin__InfluenzaA__AEX35549
augaagaccaucauugcccugagcuacauacucugccuuguguucgcucagaaacugcccggcaacgacaauuccacagcaacuuuguguuuagggcaccaugccgucccuaacggaacgaucguuaagaccauuacaaaugaucaaaucgaggugacuaacgcgaccgaacugguacagucuucaaguacagguggcauuugcgacagcccacaccagauccuagauggggagaauuguacccucauagacgcucugcuuggagauccgcagugcgacggcuuucaaaacaaaaagugggaucuguucguggaaagauccaaagccuauucuaauuguuaccccuaugacgucccugauuacgcaucguugaggucacucaucgccagcagugguacucuggaguuuaacaaugaauccuucaacuggacaggggugacccagaauggaacgucuagcgcuugcaagcggggcuccaacaauucauuuuucagucgccugaacuggcucacucauuuaaaguuuaaauauccagcacugaauguuaccaugcccaacaacgaggaguucgacaaacuuuacauuuggggcgugcaccauccugggacagauaaugaccagaucagcuuguaugcccaggcuucuggaaagauuacugucuccaccaagcgaucacaacagacagugaucccaaacauagguagccgucccagaguaagggauauuccuagucggaucucuauuuacuggaccaucguuaaaccaggcgacauccugcuaauuaauuccacggggaaccucauagccccgcgcggauacuuuaagaucagaagcggcaagucgucuauuaugagguccgacgcgcccaucgauaaauguaauucagaaugcauaacuccuaacgguaguauuccaaaugacaagcccuuccagaacgugaauaaaaucacauauggggcauguccucgguacgucaagcagaacacccugaaacuugccacuggaaugcgcaaugugccagagaagcaaacacgaggcaucuuuggcgcuauugccggguucaucgaaaacggaugggaggguaugguggauggcugguauggguuuagacaccagaauagcgagggaauuggccaggcagcugaccugaaauccacccaagccgcgauagaucagaucaacgguaaguugaauaggcucauugggaagacgaacgaaaaauuccaccagaucgagaaggaguucucugaagucgaaggccggauccaggaccuggagaaauacguugaggauaccaagauugacuuauggagcuauaacgccgaacugcucguggcacuugagaaucaacauacaauagaucugacugacucagaaaugaacaaauuguuugagcguaccaagaagcagcuacgcgaaaaugcugaggauaugggaaacggcugcuucaaaaucuaccacaagugugacaaugccugcauugggaguaucagaaacggaacauaugaccaugauguauacagggacgaggcucugaauaaccgguuucagauuaaagguguggaacucaaguccggcuacaaagauuggauccuguggaucagcuucgccauaucuugcuuucuucugugugucgcauugcucggguucauuaugugggccugccagaagggaaauauccgauguaacauuugcaucuga

SEQ ID NO: 136135 - RNA, 1701 nt, Artificial Sequence
  derived and/or modified CDS sequence (opt3) from hemagglutinin__InfluenzaA__AEX35560
augaagaccaucauugcccugagcuacauacucugccuuguguucgcucagaaacugcccggcaacgacaauuccacagcaacuuuguguuuagggcaccaugccgucccuaacggaacgaucguuaagaccauuacaaaugaucaaaucgaggugacuaacgcgaccgaacugguacagucuucaaguacagguggcauuugcgacagcccacaccagauccuagauggggagaauuguacccucauagacgcucugcuuggagauccgcagugcgacggcuuucaaaacaaaaagugggaucuguucguggaaagauccaaagccuauucuaauuguuaccccuaugacgucccugauuacgugucguugaggucacucguugcaagcagugguacucuggaguuuaacaaugaauccuucaacuggacaggggugacccagaauggaacgucuagcgccugcaagcggcgcuccaacaauucauuuuucagucgacugaacuggcucacucauuuaaaguuuaaauauccagcucugaaugucaccaugcccaacaacgagcaguucgacaaacuuuacaucuggggcgugcaccauccuggcacagauaaugaccagauuagcuuguaugcacaagccucugggcguaucacuguauccaccaagagaucacagcagacaguuauuccaaacaucggaagcaggccccgggugcgcgauauaccuaguagaauuucuaucuacuggaccauugucaagccaggugacauccugcuaaucaauuccacgggcaaccucauugcuccgaggggguacuuuaaaauacggagcggaaagucgucuaucaugcgcuccgacgcccccauuggcaaguguaauucagagugcaucacuccuaacgguaguauaccaaaugauaaacccuuccagaacgugaaucgaauuacauauggggcguguccuagauacgugaagcaaaacacccugaaacuugcaacuggaaugaggaaugucccagaaaagcagacacggggcaucuuuggcgccaucgcuggguucauugagaacggaugggaagguaugguugacggcugguauggguuucgucaccagaauagcgugggaaucggccaagccgcagaucugaaauccacccaggcugccauuaaccagauaaaugguaaguugaaccgccucaucgggaaaacgaacgagaaguuccaccagauugagaaggaguucucugaaguagaaggcagaauccaagaccuggagaaauacguggaagauaccaagaucgacuuauggagcuauaaugcggagcugcucgucgcccuugagaaccagcauacaauugaucugacugacucagaaaugaauaaauuguuugagaggaccaagaaacagcuacgggaaaacgcagaggauaugggaaauggcugcuucaagauauaccacaagugugacaacgcuugcaucgggaguauucgaaauggaacauaugaucaugacguguaccgcgacgaagcccugaacaauagauuucagaucaaagguguugagcucaaguccggcuacaaagauuggauucuguggaucagcuucgcuauaucuugcuuucuucuguguguggccuugcucggguucaucaugugggcaugccaaaagggaaacauuagguguaauaucugcauuuga

SEQ ID NO: 136136 - RNA, 1701 nt, Artificial Sequence
  derived and/or modified CDS sequence (opt3) from hemagglutinin__InfluenzaA__AEX35571
augaagaccaucauugcccugagcuacauacucugccuuguguucgcucagaaacugcccggcaacgacaauuccacagcaacuuuguguuuagggcaccaugccgucccuaacggaacgaucguuaagaccauuacaaaugaucaaaucgaggugacuaacgcgaccgaacugguacagucuucaaguacagguggcauuugcgacagcccacaccagauccuagauggggagaauuguacccucauagacgcucugcuuggagauccgcagugcgacggcuuucaaaacaaaaagugggaucuguucguggaaagauccagggccuauucuaauuguuaccccuaugacgucccugauuacgcaucguugcggucacucguggccagcagugguacucuggaguuuaacaaugaauccuucaacuggacagggguuacccagaauggaacgucuagcgcuugcaaacgccgauccaacaauucauuuuucagucgucugaacuggcucacucauuuaaaguuuaaguauccagcacugaaugugaccaugcccaacaacgagaaauucgacaaguuguacaucuggggcguccaccauccuggcacagauaaugaccagauuuuucuuuaugcccaggcuagcgggagaaucacugugucuaccaaaaggucccaacagacaguaauuccaaacaucggaucacggccccgcguuagaaauauaccuagcaggauuaguaucuacuggaccauugugaagccaggugauauccugcuaaucaacucuacgggcaaucucauugccccgcggggguacuucaaaauacgcuccggaaagagcucgaucaugcgaucugacgcgcccauuggcaaguguaacuccgagugcaucacuccuaaugguucaauaccaaacgacaaacccuuucagaaugucaacagaauuacauauggggcauguccuagguacgugaagcagaauacccugaaacuugccacuggaaugcggaacgugccagaaaagcaaacacguggcaucuucggcgcuaucgccggguuuauugagaauggaugggaagguauggucgauggcugguauggguuccgccaccagaacagugagggaaucggccaggcagcugaccugaaaagcacccaagccgcgauuaaucagauaaacgguaaguugaacagacucaucgggaaaacgaaugagaaguuccaccagauugaaaaggaguuuuccgaaguugagggcaggauccaggaucuggaaaaauacguggaggacaccaagaucgauuuauggucuuauaacgccgagcugcucguagcacuugaaaaucaacauacaauugaccugacugauagcgagaugaacaaauuguucgaacggaccaagaaacagcuacgagagaaugcugaagacaugggaaacggcugcuuuaagauauaccacaagugugauaaugccugcaucgggucaauucgcaacggaacauaugaccaugauguguacagagacgaggcucugaauaacagguuccagaucaaaggugucgagcucaagaguggcuacaaagacuggauucuguggaucuccuuugccauaagcugcuuccuucuguguguggcauugcucggguuuaucaugugggccugccagaagggaaauauucgguguaacaucugcauuuga

SEQ ID NO: 136137 - RNA, 1701 nt, Artificial Sequence; identical to SEQ ID NO: 128678
  derived and/or modified CDS sequence (opt3) from hemagglutinin__InfluenzaA__AEX35582

SEQ ID NO: 136138 - RNA, 1701 nt, Artificial Sequence
  derived and/or modified CDS sequence (opt3) from hemagglutinin__InfluenzaA__AEX35593
augaagaccaucauugcccugagcuacauacucugccuuguguucgcucagaaacugcccggcaacgacaauuccacagcaacuuuguguuuagggcaccaugccgucccuaacggaacgaucguuaagaccauuacaaaugaucaaaucgaggugacuaacgcgaccgaacugguacagucuucaaguacagguggcauuugcgacagcccacaccagauccuagauggggagaauuguacccucauagacgcucugcuuggagauccgcagugcgacggcuuucaaaacaaaaagugggaucuguucguggaaagauccaaagccuauucuaauuguuaccccuaugacgucccugauuacgcaucguugaggucacucguggccagcagugguacucuggaguuuaacaaugaauccuucaacuggacagggguuacccagaauggaacgucuagcgcuugcaagcggcgcuccaacaauucauuuuucagucgacugaacuggcucacucauuuaaaguuuaaauauccagcacugaaugugaccaugcccaacaacgagaaguucgacaaacuuuacaucuggggcguccaccauccuggcacagauaaugaccagaucuuuuuguaugcccaggcuagcgggcguauuacugugucuaccaagagaucccaacagacaguaauuccaaacaucggaucaaggccccggguucgcaauauaccuagcagaauuaguaucuacuggaccauugugaaaccaggugauauccugcuaaucaacucuacgggcaaucucauugccccgaggggguacuucaagauacgguccggaaagagcucgaucaugcgcucugacgcgccccugggcaaauguaacuccgagugcauuacuccuaaugguucaaucccaaacgacaagcccuuucagaaugucaaccgaauaacauauggggcauguccuagauacgugaaacagaauacccuuaagcuggccacuggaaugaggaacgugccagaaaaacaaacacggggcauuuucggcgcuaucgccggguuuaucgagaauggaugggaagguauggucgauggcugguauggguuccgucaccagaacagugagggaauuggccaggcagcugaccucaagagcacccaagccgcgaucaaucagauuaacgguaaauugaaccgccugauagggaagacgaaugagaaguuccaccagaucgaaaaagaguuuuccgaaguugagggcaggauucaggauuuagaaaaguacguggaggacaccaaaaucgaucuguggucuuauaacgccgagcuccuuguagcacuggaaaaucaacauacaaucgacuugacugauagcgagaugaacaagcuauucgaaagaaccaaaaagcagcugcgggagaaugcugaagacaugggaaacggcugcuuuaagauuuaccacaaaugugauaaugccugcauagggucaauccgaaacggaacauaugaccaugauguguaccgcgacgaggcucucaauaacagauuccagauuaagggugucgagcugaaaaguggcuacaaggacuggauccuuuggauuuccuuugccaucagcugcuuccuguuguguguggcacuccugggguuuauaaugugggccugccagaaaggaaauaucagguguaacauuugcaucuga

SEQ ID NO: 136139 - RNA, 1701 nt, Artificial Sequence; identical to SEQ ID NO: 130420
  derived and/or modified CDS sequence (opt3) from hemagglutinin__InfluenzaA__AEX35604

SEQ ID NO: 136140 - RNA, 1701 nt, Artificial Sequence
  derived and/or modified CDS sequence (opt3) from hemagglutinin__InfluenzaA__AEX35615
augaagaccaucauugcccugagcuacauacucugccuuguguucgcucagaaacugcccggcaacgacaauuccacagcaacuuuguguuuagggcaccaugccgucccuaacggaacgaucguuaagaccauuacaaaugaucaaaucgaggugacuaacgcgaccgaacugguacagucuucaaguacaggugagauuugcgacagcccacaccagauccuagauggcgaaaauuguacccucauagacgcucugcuuggggauccgcagugcgacggauuucaaaacaaaaagugggaucuguucguggagagauccaaagccuauucuaauuguuaccccuaugacgucccugauuacgcaucguugaggucacucguggccagcaguggcacucuggaauuuaacaaugaguccuucaacuggacagguguuacccagaaugggacgucuagcgcuugcauccggcgcuccaacaauucauuuuucagucgacugaacuggcucacucauuuaaaguuuaaguauccagcacugaaugugaccaugcccaacaacgagaaauucgacaaacuuuacauuuggggaguccaccauccuggcacagauaaugaccagaucuuuuuguaugcccaggcuagcggccguauuacugugucuaccaagagaucccaacagacaguaaucccaaacauagggucaaggccccggguucgcaauauuccuagcagaaucaguauuuacuggaccaucgugaagccaggagauauccugcuaauuaacucuacggguaaucucauagccccgaggggcuacuucaaaauccgguccggaaagagcucgauuaugcgcucugacgcgcccaucgggaaguguaacuccgaaugcauaacuccuaauggcucaauuccaaacgacaaacccuuucagaaugucaaccgaaucacauauggugcauguccuagauacgugaagcagaauacccugaaacuugccacugggaugaggaacgugccagagaagcaaacacggggaaucuucggcgcuauugccggcuuuaucgaaaaugggugggagggaauggucgaugguugguauggcuuccgucaccagaacagugaggggauuggacaggcagcugaccugaaaagcacccaagccgcgauagaucagaucaauggcaaguugaaccgccucauugguaaaacgaacgaaaaguuccaccagaucgagaaggaauuuuccgagguugaagggagaauccaggaccuggagaaauacauugaggauaccaagauagacuuauggucuuauaaugccgaacugcucguggcacuugagaaccaacauacaaucgaucugacugacagcgaaaugaauaaauuguucgagaagaccaaaaagcagcuaagggaaaacgcugaggauaugggcaauggaugcuuuaagauuuaccacaaaugugacaacgccugcaucggcucaauucggaaugggacauaugaucaugacguauaccgagacgaggcucugaacaaucgcuuccagaucaagggaguggaacucaaaagugguuacaaggauuggauacuguggaucuccuuugccauuagcugcuuccuucugugugucgcauugcucggcuuuaucaugugggccugccagaaagggaacauuagauguaauaucugcauauga

SEQ ID NO: 136141 - RNA, 1701 nt, Artificial Sequence; identical to SEQ ID NO: 130482
  derived and/or modified CDS sequence (opt3) from hemagglutinin__InfluenzaA__AEX35626

SEQ ID NO: 136142 - RNA, 1701 nt, Artificial Sequence
  derived and/or modified CDS sequence (opt3) from hemagglutinin__InfluenzaA__AEX35637
augaagaccaucauugcccugagcuacauacucugccuuguguucgcucagaaacugcccggcaacgacaauuccacagcaacuuuguguuuagggcaccaugccgucccuaacggaacgaucguuaagaccauuacaaaugaucaaaucgaggugacuaacgcgaccgaacugguacagucuucaaguacagguggcauuugcgacagcccacaccagauccuagauggggagaauuguacccucauagacgcucugcuuggagauccgcagugcgacggcuuucaaaacaaaaagugggaucuguucguggaaagauccaaagccuauucuaauuguuaccccuaugacgucccugauuacgcaucguugaggucacucguggccagcagugguacucuggaguuuaacaaugaauccuucaacuggacagggguuacccagaauggaacgucuagcgcuugcaagcggggcuccgacaacucauuuuucaguaagcugaauuggcucacucauuuaaaauuuaaguauccagcacugaacgugaccaugcccaauaacgagaaauucgauaaacuuuacaucuggggcguccaccauccugggacagacaacgaucagauuuuuccauaugcccaggcuagcggacgcaucacugugucuaccaagcgaucccaacagacaguaauucccaauaucgguucacguccuagaguuaggaacauaccaagccggauuaguaucuacuggaccauugugaagccgggcgacaucuugcugaucaauucuacggggaaccuaauugcgccccgcggauacuucaagauaagauccggcaaaagcucgaucaugaggucugacgccccuauugguaaguguaauuccgagugcaucacuccaaacgggucaauacccaaugauaaaccuuuucagaacgucaaucggauuacauauggagcauguccacgcuacgugaagcagaacacccucaaacuggccacuggcaugcgaaaugugcccgaaaagcaaacaagaggcaucuucggggcuaucgccggauuuauugagaacgguugggaaggcauggucgacgggugguauggauucaggcaccagaauagugagggcaucggucaggcagcugaucuuaaaagcacccaagccgcgauuaaccagauaaaugggaagcugaaccgguugaucggcaagacgaacgagaaauuccaccagauugaaaaggaguuuuccgaaguugagggacguauccaggaccucgaaaaauacguggaggauaccaagaucgaccuguggucuuauaaugccgaguuacugguagcacucgaaaaccaacauacaauugaucuuacugacagcgagaugaauaaacuguucgaacgcaccaagaagcaguugagagagaacgcugaagauaugggcaaugggugcuuuaaaauauaccacaagugugacaacgccugcaucggaucaauuaggaaugguacauaugaucaugacguguaccgggacgaggcucuaaacaaucgauuccagaucaaaggcgucgagcugaagaguggguacaaagauuggauucucuggaucuccuuugccauaagcugcuuccugcuuuguguggcacuguugggauuuaucaugugggccugccagaagggcaacauucgcuguaauaucugcauuuga

SEQ ID NO: 136143 - RNA, 1701 nt, Artificial Sequence; identical to SEQ ID NO: 130482
  derived and/or modified CDS sequence (opt3) from hemagglutinin__InfluenzaA__AEX35648

SEQ ID NO: 136144 - RNA, 1701 nt, Artificial Sequence
  derived and/or modified CDS sequence (opt3) from hemagglutinin__InfluenzaA__AEX36102
augaagaccaucauugcccugagcuacauacucugccuuguguucgcucagaaacugcccggcaacaauaacuccacagcaacuuuguguuuagggcaccaugccgucccuaauggaacgaucguuaagaccauuacaaacgaccaaaucgaggugacuaaugcgaccgaacugguacagucuucaaguacaggugagauuugcgauagcccacaccagauccuagacggcgaaaacuguacccucauagaugcucugcuuggggacccgcagugcgauggauuucaaaauaaaaagugggaccuguucguggagagauccaaagccuauucuaacuguuaccccuaugaugucccugacuacgcaucguugaggucacucguggccagcaguggcacucuggaauuuaauaacgaguccuucaauuggacagguguuacccagaacgggacgucuagcgcuugcauccggcgcuccaauaacucauuuuucagucgacugaauuggcucacucauuuaaaguuuaaguauccagcacugaacgugaccaugcccaacaaugagaaauucgauaaacuuuacauuuggggaguccaccauccuggcacagacaacgaucagaucuuuuuguaugcccaggcuagcggccguauuacugugucuaccaagagaucccaacagacaguaaucccaaauauagggucaaggccccggguucgcaacauuccuagcagaaucaguauuuacuggaccaucgugaagccaggagacauccugcuaauuaauucuacggguaaccucauagccccgaggggcuacuucaaaauccgguccggaaagagcucgauuaugcgcucugaugcgcccaucgggaaguguaauuccgaaugcauaacuccuaacggcucaauuccaaaugacaaacccuuucagaacgucaaucgaaucacauauggugcauguccuagauacgugaagcagaacacccugaaacuugccacugggaugaggaaugugccagagaagcaaacacggggaaucuucggcgcuauugccggcuuuaucgaaaacgggugggagggaauggucgacgguugguauggcuuccgucaccagaauagugaggggauuggacaggcagcugaucugaaaagcacccaagccgcgauagaccagaucaacggcaaguugaaccgccucauugguaaaacgaaugaaaaguuccaccagaucgagaaggaauuuuccgagguugaagggagaauccaggaucuggagaaauacguggaggacaccaagauugauuuauggucuuauaacgccgaacugcucguagcacuugagaaucaacauacaauagaccugacugauagcgaaaugaacaaauuguucgagaagaccaaaaagcagcuaagggaaaaugcugaggacaugggcaacggaugcuuuaagaucuaccacaaaugugauaaugccugcauuggcucaauccggaacgggacauaugaccaugauguguaccgagacgaggcucugaauaaccgcuuccagauuaagggagucgaacucaaaagugguuacaaggacuggauccuguggauauccuuugccaucagcugcuuccuucuguguguggcauugcucggcuuuauuaugugggccugccagaaagggaauaucagauguaacauuugcaucuga

SEQ ID NO: 136145 - RNA, 1701 nt, Artificial Sequence; identical to SEQ ID NO: 129963
  derived and/or modified CDS sequence (opt3) from hemagglutinin__InfluenzaA__AEX36113

SEQ ID NO: 136146 - RNA, 1701 nt, Artificial Sequence; identical to SEQ ID NO: 130482
  derived and/or modified CDS sequence (opt3) from hemagglutinin__InfluenzaA__AEX36124

SEQ ID NO: 136147 - RNA, 1701 nt, Artificial Sequence
  derived and/or modified CDS sequence (opt3) from hemagglutinin__InfluenzaA__AEX36146
augaagaccaucauugcccugagcuacauacucugccuugugcuggcucagaaauugcccggcgacgauaacuccacagcaacuuuaugucuggggcaccaugccgucccuaauggaacgaucguuaagaccauuacaaacgaccaaaucgaggugacuaaugcgaccgagcuaguacagucuucaaguacaggugaaauuugcgauagcccacaccagauccucgacggcgaaaacuguacccugauagaugcuuugcugggggacccgcagugcgauggauuccaaaauaaaaagugggacuuguuuguggagagauccaaagccuauucuaacuguuaccccuaugaugucccugacuacgcaucgcucaggucacugguggccagcaguggcacucuggaguucaauaacgaauccuuuaauuggacagguguuacccagaacgggacgucuagcgcuugcauccggcgcuccaauaacucauucuuuagucgacucaauugguuaacucaucugaaguucaaguauccagcacuuaacgugaccaugcccaauaacgagcaguuugauaaauuguacauuuggggaguccaccauccuggcacagacaacgaucagaucuuccuguaugcccaagcuagcggccguauuacugugucuaccaagagaucccagcagacaguaaucccaaauauagggucaaggccccggguucgcaacauuccuagcagaaucaguauuuacuggaccaucgugaaaccaggagacauccuacucauuaauucuacggguaaccugauagccccgaggggcuacuuuaagauccgguccgggaaaagcucgauuaugcgcucugacgcgcccaucggaaaguguaauuccgaaugcauaacuccuaacggcucaauuccaaaugauaagcccuuccagaacgucaaucgaaucacauauggugcauguccuagauacgugaaacaaaacacccuuaagcuggccacugggaugaggaaugugccagagaaacagacacggggaaucuuuggcgcuauugccggcuucaucgaaaacgggugggagggaauggucgacgguugguauggcuuucgucaccagaauagugaggggcgcggacaagcagcugaucuuaagagcacccaggccgcgauugaccagauaaacggcaaacucaauagacugaucgguaagacgaacgaaaaauuccaccagauugagaaggaguucuccgaaguugaagggaggauccaagauuuagagaaguacguggaggacaccaaaaucgaucuguggucuuauaacgccgaacuccuuguagcacuggagaaucagcauacaauugacuugacugauagcgaaaugaacaagcuauuugagaaaaccaagaaacagcugcgggaaaaugcugaggacaugggcaacggaugcuucaagauauaccacaagugugauaaugccugcaucggcucaauucgaaacgggacauaugaccaugacguguaccgcgaugaggcucucaauaacagauuucagaucaaaggagucgaacugaagagugguuacaaagacuggauucuuuggaucuccuucgccauaagcugcuuucuguuguguguggcacuccugggcuucaucaugugggccugccaaaaggggaauauuagguguaacaucugcauuuga

SEQ ID NO: 136148 - RNA, 1701 nt, Artificial Sequence
  derived and/or modified CDS sequence (opt3) from hemagglutinin__InfluenzaA__AEX36168
augaagaccaucauugcccugagcuacauacucugccuuguguucgcucagaaacugcccggcaucgacaacuccacagcaacuuuguguuuagggcaccaugccgucccuaauggaacgauuguuaagaccaucacaaacgaucaaauugaggugacuaaugcgaccgaacugguacagucuucaaguacagguggcaucugcgacagcccacaccagauacuagauggggagaacuguacccucaucgacgcucugcuuggagauccgcagugcgacggcuuucaaaauaaaaagugggaucuguucguggaaagauccaaagccuauucuaacuguuaccccuaugacgucccugauuacgcaucguugaggucacucguggccagcagugguacucuggaguuuaauaacgaauccuucaauugggcugggguuacacagaacggaaccucuagcgcaugcaagcggggcuccgacaauucauuuuucagucgccugaacuggcucacgcauuuaaaguuuaaauauccagcccugaaugugacuaugcccaacaaugaggaguucgauaaacuuuacauuuggggcguccaccauccugggaccgacaacgaucagaucuuuuuguaugcucaggccagcggacgaauuacagugucuacuaagcguucccaacagaccguaaucccaaacauagguucaagacccaggguucggaauauuccuagccgcaucaguauuuacuggacaaucgugaagccaggcgacauccugcuaauuaacucuaccgggaaucucauagcgccgagaggauacuucaaaaucagguccggcaagagcucgauuaugcggucugacgcacccaucgguaaguguaacuccgaaugcauaacgccuaaugggucaauuccaaacgauaaacccuuucagaaugucaaccgcaucacuuauggagccuguccucgauacgugaagcagaauacacugaaacuugcuaccggcaugagaaacgugccagagaagcaaacuaggggcaucuucggggccauugcaggauuuaucgaaaaugguugggagggcauggucgacgggugguauggauuccggcaccagaacagugagggcauuggucaggcugccgaucugaaaagcacacaagcggccauagaccagaucaaugggaaguugaacaaacucauuggcaagaccaaugaaaaguuccaccagaucgagaaagaauuuuccgagguugaaggacguauccaggaucuggagaaguacguggaggacacgaaaauugauuuauggucuuauaacgcagaacugcucguagcucuugagaaccaacauaccauagaccugacagauagcgaaaugaauaaguuguucgagaaaacuaagaagcagcuacgcgaaaacgccgaggacaugggcaaugggugcuuuaaaaucuaccacaagugugauaacgcuugcauuggaucaaucagaaaugguaccuaugaccaugacguguacagggaugaggcccugaacaaucgguucaaaauuaagggcgucgaacucaaaaguggguacaaggacuggauccuguggauauccuuugcaaucagcugcuuccuucuguguguggccuugcucggauuuauuaugugggcuugccagaagggcaacaucaaauguaauauuugcaucuga

SEQ ID NO: 136149 - RNA, 1701 nt, Artificial Sequence; identical to SEQ ID NO: 130482
  derived and/or modified CDS sequence (opt3) from hemagglutinin__InfluenzaA__AEX36179

SEQ ID NO: 136150 - RNA, 1701 nt, Artificial Sequence; identical to SEQ ID NO: 136031
  derived and/or modified CDS sequence (opt3) from hemagglutinin__InfluenzaA__AEX36190

SEQ ID NO: 136151 - RNA, 1701 nt, Artificial Sequence; identical to SEQ ID NO: 136026
  derived and/or modified CDS sequence (opt3) from hemagglutinin__InfluenzaA__AEX36201

SEQ ID NO: 136152 - RNA, 1701 nt, Artificial Sequence
  derived and/or modified CDS sequence (opt3) from hemagglutinin__InfluenzaA__AEX36212
augaagaccaucauugcccugagcuacauacucugccuuguguucgcucagaaacugcccggcaucgacaacuccacagcaacuuuguguuuagggcaccaugccgucccuaauggaacgauuguuaagaccaucacaaacgaucaaauugaggugacuaaugcgaccgaacugguacagaacucuucaacagguggcaucugcgacaguccacaccagauacuagauggggagaauuguacccucaucgacgcucugcuuggagauccgcagugcgacggcuuucaaaacaaaaagugggaucuguucguggaaagaagcaaagccuauuccaauuguuaccccuaugacgucccugauuacgcaucuuugaggucgcucguggccucaagcgguacucuggaguuuaacaaugaaaguuucaacuggacagggguuacccagaauggaacguccucugcuugcaagcggggcagcaacaauuccuuuuucucacgccugaacuggcucacucauaguaaguuuaaauauccagcauuaaaugugaccaugcccaacaacgaggaguucgacaagcuguacauuuggggcguccaccauccugggacagauaaugaccagaucuuucuuuaugcccaggcuagcggacgaauuacugugucuaccaaaaucucccaacagacaguaauaccaaacauugguucacgucccagaguuaggaauaucccuagccggauuaguaucuacuggaccaucgugaagccaggcgauauuuugcugauaaacucuacggggaaucuaaucgccccgcgcggauacuucaaaauuagauccggcaagagcucgaucaugaggucugacgcgcccauagguaaguguaacuccgaaugcauuacuccuaaugggucaaucccaaacgacaaacccuuucagaaugucaaccggaucacauauggagcauguccucgcuacgugaagcagaauacccucaaacuggccacuggcaugcgaaacgugccagagaagcaaacaagaggcauuuucggggcuaucgccggauuuauugaaaaugguugggagggcauggucgaugggugguauggauucaggcaccagaacagugagggcauaggucaggcagcugaccuuaaaagcacccaagccgcgaucgaucagauuaaugggaagcugaaccgguugaucggcaaaacgaacgaaaaguuccaccagaucgagaaggaauuuuccgagguugaaggacguauucaggaccucgagaaauacguggaggauaccaagauagaccuguggucuuauaaugccgaauuacugguagcacucgagaaccaacauacaaucgaucuuacugacagcgaaaugaauaaacuguucgagaagaccaaaaagcaguugcgcgaaaacgcugaggauaugggcaaugggugcuuuaagauuuaccacaaaugugacaacgccugcaucggaucaauuagaaaugguacauaugaucaugacguguacagggacgaggcucuaaacaaucgguuccagaucaagggcgucgaacugaaaaguggguacaaggauuggauacucuggaucuccuuugccauuagcugcuuccugcuuuguguggcacuguugggauuuaucaugugggccugccagaaaggcaacauucgauguaauaucugcauauga

SEQ ID NO: 136153 - RNA, 1701 nt, Artificial Sequence; identical to SEQ ID NO: 136026
  derived and/or modified CDS sequence (opt3) from hemagglutinin__InfluenzaA__AEX36223

SEQ ID NO: 136154 - RNA, 1701 nt, Artificial Sequence
  derived and/or modified CDS sequence (opt3) from hemagglutinin__InfluenzaA__AEX36234
augaagaccaucauugcccugagcuacauacucugccuuguguucgcucagaaacugcccggcaacgacaauuccacagcaacuuuguguuuagggcaccaugccgucccuaacggaacgaucguuaagaccauuacaaaugaucaaaucgaggugacuaacgcgaccgaacugguacagucuucaaguacagguggcauuugcgacagcccacaccagauccuagauggggagaauuguacccucauagacgcucugcuuggagauccgcagugcgacggcuuucaaaacaaaaagugggaucuguucguggaaagauccaaagccuauucuaauuguuaccccuaugacgucccugauuacgcaucguugaggucacucguggccagcagugguacucuggaguuuaacaaugaauccuucaacuggacagggguuacccagaauggaacgucuagcgcuugcaagcggggcuccgacaacucauuuuucaguaagcugaauuggcucacucauuuaaaauuuaaguauccagcacugaacgugaccaugcccaauaacgagaaauucgauaaguuguacaucuggggcguccaccauccugggacagacaacgaucagauuuuucuuuaugcccaggcuagcggacgcaucacugugucuaccaaacgaucccaacagacaguaauuccaaauaucgguucacgucccagaguuaggaacauaccuagccggauuaguaucuacuggaccauugugaagccaggcgacauccugcuaaucaauucuacggggaaccucauugccccgcgcggauacuucaagauaagauccggcaaaagcucgaucaugaggucugacgcgcccauugguaaguguaauuccgagugcaucacuccuaacgggucaauaccaaaugauaaacccuuucagaacgucaaucggauuacauauggagcauguccucgcuacgugaagcagaacacccugaaacuugccacuggcaugcgaaaugugccagaaaagcaaacaagaggcaucuucggggcuaucgccggauuuauugagaacgguugggaaggcauggucgacgggugguauggauucaggcaccagaauagugagggcaucggucaggcagcugaucugaaaagcacccaagccgcgauuaaccagauaaaugggaaguugaaccggcucaucggcaagacgaacgagaaauuccaccagauugaaaaggaguuuuccgaaguugagggacguauccaggaccuggaaaaauacguggaggauaccaagaucgacuuauggucuuauaaugccgagcugcucguagcacuugaaaaccaacauacaauugaucugacugacagcgagaugaauaaauuguucgaacgcaccaagaagcagcuaagagagaacgcugaagauaugggcaaugggugccugaaaauauaccacaagugugacaacgccugcaucggaucaauuaggaaugguacauaugaucaugacguguaccgggacgaggcucucaacaaucgauuucagaucaaaggcgucgagcugaagaguggguacaaagauuggauucuuuggaucuccuucgccauaagcugcuuucuguuguguguggcacuccugggauucaucaugugggccugccagaagggcaacauucgcuguaauaucugcauuuga

SEQ ID NO: 136155 - RNA, 1701 nt, Artificial Sequence
  derived and/or modified CDS sequence (opt3) from hemagglutinin__InfluenzaA__AEX36245
augaagaccaucauugcccugagcuacauacucugccuuguguucgcucagaaacugcccggcaucgacaacuccacagcaacuuuguguuuagggcaccaugccgucccuaauggaacgauuguuaagaccaucacaaacgaucaaauugaggugacuaaugcgaccgaacugguacagaacucuucaacagguggcaucugcgacaguccacaccagauacuagauggggagaauuguacccucaucgacgcucugcuuggagauccgcagugcgacggcuuucaaaacaaaaagugggaucuguucguggaaagaagcaaaacuuauuccaauuguuaccccuaugacgucccugauuacgccucuuugaggucgcucguggcaucaagcgguacacuggaguuuaacaaugaaaguuucaacuggaccgggguuacgcagaauggaacuuccucugccugcaagcggggcagcaacaauuccuuuuucucacgccugaacuggcucacccauaguaaguuuaaauauccagcuuuaaaugugacaaugcccaacaacgaggaguucgacaagcuguacauuuggggcguccaccauccugggacugauaaugaccagaucuuucuuuaugcacaggccagcggacgaauuaccgugucuacaaaacguucccaacagaccguaaucccaaacauagguucaagacccaggguucggaauauuccuagccgcaucaguauuuacuggacgaucgugaagccaggcgauaucuugcugauuaacucuacugggaaucuaauagcuccgagaggauacuucaaaaucagguccggcaagagcucgauuaugcggucugacgcccccaucgguaaguguaacuccgaaugcauaacaccuaaugggucaauuccaaacgacaaacccuuucagaaugucaaccgcaucaccuauggagcguguccucgauacgugaagcagaauacucucaaacuggcaacaggcaugagaaacgugccagagaagcaaaccaggggcaucuucggggccauugcuggauuuaucgaaaaugguugggagggcauggucgaugggugguauggauuccggcaccagaacagugagggcauuggucaggccgcagaccuuaaaagcacgcaagcugccauagaucagaucaaugggaagcugaaccguuugauuggcaaaaccaacgaaaaguuccaccagaucgagaaggaauuuuccgagguugaaggacgcauccaggaccucgagaaauacguggaggauacaaagauugaccuguggucuuauaaugcggaauuacugguagcccucgagaaccaacauacuauagaucuuaccgacagcgaaaugaauaaacuguucgagaagacuaaaaagcaguugagagaaaacgcagaggauaugggcaaugggugcuuuaagaucuaccacaaaugugacaacgcuugcauuggaucaaucaggaaugguacauaugaucaugacguguaccgggacgaggcccuaaacaaucgauuccagauuaagggcgucgaacugaaaaguggguacaaggauuggauccucuggauauccuuugcuaucagcugcuuccugcuuuguguggcccuguugggauuuauuaugugggcaugccagaaaggcaacauccgcuguaauauuugcaucuga

SEQ ID NO: 136156 - RNA, 1701 nt, Artificial Sequence
  derived and/or modified CDS sequence (opt3) from hemagglutinin__InfluenzaA__AEX36256
augaagaccaucauugcccugagcuacauacucugccuuguguucacacagaaacugcccggcaacgacaauuccacugcuacguuguguuuagggcaccaugcagucccuaacggaaccaucguuaagacaauuacuaaugaucaaaucgaggugaccaacgccacagaacugguacagucuucaaguaccggugagauuugcgacagcccacaccagauccuagauggcgaaaauuguacucucauagacgcgcugcuuggggauccgcagugcgacggauuucaaaacaaaaagugggaucuguucguggagagauccaaggcuuauucuaauuguuaccccuaugacgucccugauuacgccucguugaggucacucguggcaagcaguggcacacuggaauuuaacaaugaguccuucaacuggaccgguguuacgcagaaugggacuucuagcgccugcauccggaaguccaacaauucauuuuucagucgccugaacuggcucacccauuuaaaguuuaaauauccagcucugaaugugacaaugcccaacaacgagcaguucgacaaacuuuacauuuggggaguccaccauccuggcacugauaaugaccagaucuuuuuguaugcacaagccagcggccgaauuaccgugucuacaaaacguucccagcagaccguaaucccaaacauagggucaagacccaggguucggaauauuccuagccgcaucaguauuuacuggacgaucgugaagccaggagauauccugcuaauuaacucuacugguaaucucauagcuccgagaggcuacuucaaaaucagguccgggaaaagcucgauuaugcggucugacgcccccaucggaaaguguaacuccgaaugcauaacaccuaauggcucaauuccaaacgacaaacccuuucagaaugucaaccgcaucaccuauggugcguguccucgauacgugaagcaaaauacucugaaacuugcaacagggaugagaaacgugccagagaagcagaccaggggaaucuucggcgccauugcuggcuuuaucgaaaaugggugggagggaauggucgaugguugguauggcuuccggcaccagaacagugaggggcguggacaagccgcagaccugaaaagcacgcaggcugccauugaucagauaaauggcaaguugaaccgccucaucgguaaaaccaacgaaaaguuccaccagauugagaaggaauuuuccgagguugaagggagaauccaagaccuggagaaauacguggaggauacaaagaucgacuuauggucuuauaaugcggaacugcucguagcccuugagaaccagcauacuauugaucugaccgacagcgaaaugaauaaauuguucgagaagacaaagaagcagcuaagggaaaacgcagaggauaugggcaauggaugcuuuaagauauaccacaaaugugacaacgcuugcaucggcucaauucggaaugggacuuaugaucaugacguguaccgagacgaggcccugaacaaucgcuuccagaucaagggagucgaacucaaaagugguuacaaggauuggauucuguggaucuccuuugcuauaagcugcuuccuucuguguguggccuugcucggcuuuaucaugugggcaugccaaaaagggaacauuagauguaauaucugcauuuga

SEQ ID NO: 136157 - RNA, 1701 nt, Artificial Sequence; identical to SEQ ID NO: 136026
  derived and/or modified CDS sequence (opt3) from hemagglutinin__InfluenzaA__AEX36267

SEQ ID NO: 136158 - RNA, 1701 nt, Artificial Sequence
  derived and/or modified CDS sequence (opt3) from hemagglutinin__InfluenzaA__AEX36289
augaagaccaucauugcccugagcuacauacucugccuuguguucgcucagaaacugcccggcaucgacaacuccacagcaacuuuguguuuagggcaccaugccgucccuaauggaacgauuguuaagaccaucacaaacgaucaaauugaggugacuaaugcgaccgaacugguacagaacucuucaacagguggcaucugcgacaguccacaccagauacuagauggggagaauuguacccucaucgacgcucugcuuggagauccgcagugcgacggcuuucaaaacaaaaagugggaucuguucguggaaagaagcaaagccuauuccaauuguuaccccuaugacgucccugauuacgcaucuuugaggucgcucguggccucaagcgguacucuggaguuuaacaaugaaaguuucaacuggacagggguuacccagaauggaacguccucugcuugcaagcggggcagcaacaauuccuuuuucucacgccugaacuggcucacucauaguaaguuuaaauauccagcauuaaaugugaccaugcccaacaacgaggaguucgacaagcuguacauuuggggcguccaccauccugggacagauaaugaccagaucuuucuuuaugcccaggcuagcggacgaauuacugugucuaccaaaaucucccaacagacaguaauaccaaacauugguucacgucccagaguuaggaauaucccuagccggauuaguaucuacuggaccaucgugaagccaggcgauauuuugcugauaaacucuacggggaaucuaaucgccccgcgcggauacuucaaaauuagauccggcaagagcucgaucaugaggucugacgcgcccauagguaaguguaacuccgaaugcauuacuccuaaugggucaaucccaaacgacaaacccuuucagaaugucaaccggaucacauauggagcauguccucgcuacgugaagcagaauacccucaaacuggccacuggcaugcgaaacgugccagagaagcaaacaagaggcauuuucggggcuaucgccggauuuauugaaaaugguugggagggcauggucgaugggugguauggauacaggcaccagaacagugagggcauaggucaggcagcugaccuuaaaagcacccaagccgcgaucgaucagauuaaugggaagcugaaccgguugaucggcaaaacgaacgaaaaguuccaccagaucgagaaggaguucuccgaaguugaaggacguauucaggaccucgagaaauauguggaggauaccaagauagaccuguggucuuacaaugccgaauuacugguagcacucgagaaccaacauacaaucgaucuuacugacagcgaaaugaauaaacuguuugagaagaccaaaaagcaguugcgcgaaaacgcugaggauaugggcaaugggugcuucaagauuuaucacaaaugugacaacgccugcaucggaucaauuagaaaugguacauacgaucaugacguguacagggacgaggcucuaaacaaucgguuucagaucaagggcgucgaacugaaacucggguauaaggauuggauacuguggaucaguuucgccauuuccugcuuucuucuguguguggcauugcucggauucaucaugugggccugccagaaaggcaacauucgauguaauaucugcauauga

SEQ ID NO: 136159 - RNA, 1701 nt, Artificial Sequence
  derived and/or modified CDS sequence (opt3) from hemagglutinin__InfluenzaA__AEX36300
augaagaccaucauugcccugagcuacauacucugccuuguguucgcucagaaacugcccggcaucgacaacuccacagcaacuuuguguuuagggcaccaugccgucccuaauggaacgauuguuaagaccaucacaaacgaucaaauugaggugacuaaugcgaccgaacugguacagaacucuucaacagguggcaucugcgacaguccacaccagauacuagauggggagaauuguacccucaucgacgcucugcuuggagauccgcagugcgacggcuuucaaaacaaaaagugggaucuguucguggaaagaagcaaagccuauuccaauuguuaccccuaugacgucccugauuacgcaucuuugaggucgcucguggccucaagcgguacucuggaguuuaguaacgaauccuucaauuggacagggguuacccagaacggaacgucuagcgcuugcaagcggggcuccaauaacucauuuuucaguaagcugaauuggcucacucauagcaaauuuaaguauccagcauuaaacgugaccaugcccaauaacgaggaguucgacaaacuguacauuuggggcguccaccauccugggacagauaacgaccagaucuuucuuuaugcccaggcuucuggacgcauuacuguguccaccaagcgaucacaacagacaguaaucccaaauauagguagccgucccagaguuaggaacauuccuagucggaucucuauuuacuggaccaucgugaaaccaggcgauaucuugcugauuaauuccacggggaaccuaauagccccgcgcggauacuucaagaucagaagcggcaagucgucuauuaugagguccgacgcgcccaucgguaaauguaauucagaaugcauaacuccuaacgggaguauuccaaaugacaagcccuuucagaacgucaaucggaucacauauggagcauguccucgcuacgugaaacagaacacccucaagcuggccacuggcaugcgaaaugugccagagaaacaaacaagaggcaucuucggggcuauugccggauuuaucgaaaacgguugggagggcauggucgaugggugguauggauucaggcaccagaauagcgagggcauuggucaggcagcugaccuuaaguccacccaagccgcgauagaucagaucaacgggaaacugaaucgguugauuggcaagacgaacgaaaaguuccaccagaucgagaaagaauuuucugagguugaaggacguauccaggaccucgagaaguacguggaggauaccaaaauugaccuguggagcuauaacgccgaauuacugguagcacucgagaaucaacauacaauagaucuuacugacucagaaaugaacaagcuguucgagaaaaccaagaagcaguugcgcgaaaaugcugaggauaugggcaacgggugcuuuaaaaucuaccacaagugugacaaugccugcauuggaaguaucagaaacgguacauaugaucaugacguguacagggacgaggcucuaaauaaccgguuccagauuaaaggcgucgaacugaaguccggguacaaagauuggauccucuggaucagcuuugccauaucuugcuuccugcuuuguguggcacuguugggauuuauuaugugggccugccagaagggcaauauccgauguaacauuugcaucuga

SEQ ID NO: 136160 - RNA, 1701 nt, Artificial Sequence
  derived and/or modified CDS sequence (opt3) from hemagglutinin__InfluenzaA__AEX36311
augaagaccaucauugcccugagcuacauacucugccuuguguucgcucagaaacugcccggcaucgacaacuccacagcaacuuuguguuuagggcaccaugccgucccuaauggaacgauuguuaagaccaucacaaacgaucaaauugaggugacuaaugcgaccgaacugguacagucuucaaguacagguggcaucugcgacagcccacaccagauacuagauggggagaacuguacccucaucgacgcucugcuuggagauccgcagugcgacggcuuucaaaauaaaaagugggaucuguucguggaaagauccaaagccuauucuaacuguuaccccuaugacgucccugauuacgcaucguugaggucacucguggccagcagugguacucuggaguuuaauaacgaauccuucaauugggcugggguuacacagaacggaaccucuagcgcaugcaagcggggcuccaauaacucauuuuucagucgccugaauuggcucacgcauuuaaaguuuaaauauccagcccugaacgugacuaugcccaauaacgaggaguucgacaaacuuuacauuuggggcguccaccauccugggaccgauaacgaccagaucuuuuuguaugcucaggccagcggacgaauuacagugucuacuaagcguucccaacagaccguaaucccaaauauagguucaagacccaggguucggaacauuccuagccgcaucaguauuuacuggacaaucgugaagccaggcgauauccugcuaauuaauucuaccgggaaccucauagcgccgagaggauacuucaaaaucagguccggcaagagcucgauuaugcggucugacgcacccaucgguaaguguaauuccgaaugcauaacgccuaacgggucaauuccaaaugacaaacccuuucagaacgucaaucgcaucacuuauggagccuguccucgauacgugaagcagaacacacugaaacuugcuaccggcaugagaaaugugccagagaagcaaacuaggggcaucuucggggccauugcaggauuuaucgaaaacgguugggagggcauggucgaugggugguauggauuccggcaccagaauagugagggcauuggucaggcugccgaccugaaaagcacacaagcggccauagaucagaucaacgggaaguugaaucgucucauuggcaaaaccaacgaaaaguuccaccagaucgagaaggaauuuuccgagguugaaggacgcauccaggaccuggagaaauacguggaggauacgaagauugacuuauggucuuauaacgcagaacugcucguagcucuugagaaucaacauaccauagaucugacagacagcgaaaugaacaaauuguucgagaagacuaaaaagcagcuaagagaaaaugccgaggauaugggcaacgggugcuuuaagaucuaccacaaaugugacaaugcuugcauuggaucaaucaggaacgguaccuaugaucaugacguguaccgggacgaggcccugaauaaccgauuccagauuaagggcgucgaacucaaaaguggguacaaggauuggauccuguggauauccuuugcaaucagcugcuuccuucuguguguggccuugcucggauuuauuaugugggcuugccagaaaggcaauauccgcuguaacauuugcaucuga

SEQ ID NO: 136161 - RNA, 1701 nt, Artificial Sequence
  derived and/or modified CDS sequence (opt3) from hemagglutinin__InfluenzaA__AEX36322
augaagaccaucauugcccugagcuacauacucugccuuguguucgcucagaaacugcccggcaucgacaacuccacagcaacuuuguguuuagggcaccaugccgucccuaauggaacgauuguuaagaccaucacaaacgaucaaauugaggugacuaaugcgaccgaacugguacagaacucuucaacagguggcaucugcgacaguccacaccagauacuagauggggagaauuguacccucaucgacgcucugcuuggagauccgcagugcgacggcuuucaaaacaaaaagugggaucuguucguggaaagaagcaaagccuauuccaauuguuaccccuaugacgucccugauuacgcaucuuugaggucgcucguggccucaagcgguacucuggaguuuaacaaugaaaguuucaacuggacagggguuacccagaauggaacguccucugcuugcaagcggggcagcaacaauuccuuuuucucacgccugaacuggcucacucauaguaaguuuaaauauccagcauuaaaugugaccaugcccaacaacgaggaguucgacaagcuguacauuuggggcguccaccauccugggacagauaaugaccagaucuuuccauaugcccaggcuagcggacgaauuacugugucuaccaaaaucucccaacagacaguaauacccaacauugguucacguccuagaguuaggaauaucccaagccggauuaguaucuacuggaccaucgugaagccgggcgauauucuuuugauaaacucuacggggaaucugaucgcgccccgcggauacuucaaaauuagauccggcaagagcucgaucaugaggucugacgccccuauagguaaguguaacuccgaaugcauuacuccaaaugggucaauccccaacgacaaaccuuuucagaaugucaaccggaucacauauggagcauguccacgcuacgugaagcagaauacccuaaaacucgccacuggcaugcgaaacgugcccgagaagcaaacaagaggcauuuucggggcuaucgccggauuuauugaaaaugguugggagggcauggucgaugggugguauggauucaggcaccagaacagugagggcauaggucaggcagcugaccugaaaagcacccaagccgcgaucgaucagauuaaugggaaacuuaaccggcugaucggcaagacgaacgaaaaguuccaccagaucgagaaggaauuuuccgagguugaaggacguauucaggacuuggagaaauacguggaggauaccaagauagaccucuggucuuauaaugccgaacuguuaguagcacuggagaaccaacauacaaucgaucucacugacagcgaaaugaauaaacuuuucgagaagaccaaaaagcagcugcgcgaaaacgcugaggauaugggcaaugggugcuuuaagauuuaccacaaaugugacaacgccugcaucggaucaauuagaaaugguacauaugaucaugacguguacagggacgaggcuuugaacaaucgguuccagaucaagggcgucgaacuaaaaaguggguacaaggauuggauacuguggaucuccuuugccauuagcugcuuccuccuguguaucgcacuucugggauuuauuaugugggccugccagaaaggcaacauccgauguaauauaugcauuuga

SEQ ID NO: 136162 - RNA, 1701 nt, Artificial Sequence
  derived and/or modified CDS sequence (opt3) from hemagglutinin__InfluenzaA__AEX36333
augaagaccaucauugcccugagcuacauacucugccuuguguucgcucagaaacugcccggcaucgacaacuccacagcaacuuuguguuuagggcaccaugccgucccuaauggaacgauuguuaagaccaucacaaacgaucaaauugaggugacuaaugcgaccgaacugguacagaacucuucaacagguggcaucugcgacaguccacaccagauacuagauggggagaauuguacccucaucgacgcucugcuuggagauccgcagugcgacggcuuucaaaacaaaaagugggaucuguucguggaaagaagcaaagccuauuccaauuguuaccccuaugacgucccugauuacgcaucuuugaggucgcucguggccucaagcgguacucuggaguuuaacaaugaaaguuucaacuggacagggguuacccagaauggaacguccucugcuugcaagcggggcagcaacaauuccuuuuucucacgccugaacuggcucacucauaguaaguuuaaauauccagcauuaaaugugaccaugcccaacaacgaggaguucgacaagcuguacauuuggggcguccaccauccugggacagauaaugaccagaucuuucuuuaugcccaggcuagcggacgaauuacugugucuaccaaacguucccaacagacaguaaucccaaacauagguucaagacccaggguucggaauauuccuagccgcaucaguauuuacuggaccaucgugaagccaggcgauaucuugcugauuaacucuacggggaaucuaauagccccgagaggauacuucaaaaucagguccggcaagagcucgauuaugcggucugacgcgcccaucgguaaguguaacuccgaaugcauaacuccuaaugggucaauuccaaacgacaaacccuuucagaaugucaaccgcaucacauauggagcauguccucgauacgugaagcagaauacccucaaacuggccacuggcaugagaaacgugccagagaagcaaacaaggggcaucuucggggcuauugccggauuuaucgaaaaugguugggagggcauggucgaugggugguauggauuccggcaccagaacagugagggcauuggucaggcagcugaccuuaaaagcacccaagccgcgauagaucagaucaaugggaagcugaaccguuugauuggcaaaacgaacgaaaaguuccaccagaucgagaaggaauuuuccgagguugaaggacgcauccaggaccucgagaaauacguggaggauaccaagauugaccuguggucuuauaaugccgaauuacugguagcacucgagaaccaacauacaauagaucuuacugacagcgaaaugaauaaacuguucgagaagaccaaaaagcaguugagagaaaacgcugaggauaugggcaaugggugcuuuaagaucuaccacaaaugugacaacgccugcauuggaucaaucaggaaugguacauaugaucaugacgcuuaccgggacgaggcccuaaacaaucgauuccagauuaagggcguggaacugaaaaguggguacaaggauuggauccucuggauauccuuugcaaucagcugcuuccugcuuugugucgcccuguugggauuuauuaugugggcuugccagaaaggcaacauccgcuguaauauuugcaucuga

SEQ ID NO: 136163 - RNA, 1701 nt, Artificial Sequence
  derived and/or modified CDS sequence (opt3) from hemagglutinin__InfluenzaA__AEX36344
augaagaccaucauugcccugagcuacauacucugccuuguguucgcucagaaacugcccggcaucgacaacuccacagcaacuuuguguuuagggcaccaugccgucccuaauggaacgauuguuaagaccaucacaaacgaucaaauugaggugacuaaugcgaccgaacugguacagucuucaaguacagguggcaucugcgacagcccacaccagauacuagauggggagaacuguacccucaucgacgcucugcuuggagauccgcagugcgacggcuuucaaaauaaaaagugggaucuguucguggaaagauccaacgccuauucuaauuguuaccccuaugacgucccugauuacgcaucguugaggucacucguggccagcagugguacucuggaguuuaacaaugaauccuucaacugggcugggguuacacagaauggaaccucuagcgcaugcaaacggggcuccaacaauucauuuuucagucgccugaacuggcucacgcauuuaaaguuuaaguauccagcccugaaugugacuaugcccaacaacgaggaguucgacaaacuuuacauuuggggcguccaccauccugggaccgauaaugaccagaucuuuuuguaugcucaggccagcggacgaauuacagugucuacuaagcguucccaacagaccguaaucccaaacauagguucaagacccaggguucggaauauuccuagccgcaucaguauuuacuggacaaucgugaaaccaggcgauauccugcuaauuaacucuaccgggaaucucauagcgccgagaggauacuucaagaucagguccggcaaaagcucgauuaugcggucugacgcacccaucgguaaguguaacuccgaaugcauaacgccuaaugggucaauuccaaacgacaagcccuuucagaaugucaaccgcaucacuuauggagccuguccucgauacgugaaacagaauacacugaagcuggcuaccggcaugagaaacgugccagagaaacaaacuaggggcaucuucggggccauugcaggauuuaucgaaaaugguugggagggcauggucgaugggugguauggauuccggcaccagaacagugagggcauuggucaggcugccgaccuuaagagcacacaagcggccauagaucagaucaaugggaaauugaaccgucucauuggcaagaccaacgaaaaauuccaccagaucgagaaggaauuuuccgagguugaaggacgcauccaggaccuggagaaguacguggaggauacgaaaauugacuuauggucuuauaaugcagaacugcucguagcucuugagaaccaacauaccauagaucugacagacagcgaaaugaauaaguuguucgagaaaacuaagaaacagcuaagagaaaacgccgaggauaugggcaaugggugcuuuaagaucuaccacaagugugacaacgcuugcauugagucaaucaggaauggaaccuaugaucaugacguguaccgggacgaagcccugaacaaucgauuccagauuaaaggugucgagcucaagaguggcuacaaagauuggauccuguggauauccuuugcaaucagcugcuuccuucuguguguggccuugcucggguuuauuaugugggcuugccagaagggaaacauccgcuguaauauuugcaucuga

SEQ ID NO: 136164 - RNA, 1701 nt, Artificial Sequence
  derived and/or modified CDS sequence (opt3) from hemagglutinin__InfluenzaA__AEX36366
augaagaccaucauugcccugagcuacauacucugccuuguguucgcucagaaacuguccggcaacgacaauucuacagcaacuuuguguuuagggcaccaugccguccccaacggaacgaucguuaagaccauuacaaaugaucaaaucgaggugacuaacgcgaccgaacugguacagucaaguagcacaggugagauuugcgacuccccucaccagauccuagauggcgaaaauuguacccucauagacgcucugcuuggggauccacagugcgacggauuucaaaacaaaaagugggaucuguucguggagagaucuaaagccuauucgaauuguuacccguaugacguccccgauuacgcaucauugaggagccucguggccaguuccggcacucuggaauuuaacaaugagucuuucaacuggacagguguuacccagaaugggacgagcuccgcuugcauccggcgcucaaacaauagcuuuuucagccgacugaacuggcucacucauuuaaaguuuaaguauccugcacugaaugugaccaugccaaacaacgagaaauucgacaaacuuuacauuuggggaguccaccaucccggcacagauaaugaccagaucuuuuuguaugcccaggcuucuggccguauuacuguguccaccaagagaucacaacagacaguaaucccuaacauagggagcaggccacggguucgcaauauucccaguagaaucucuauuuacuggaccaucgugaagccuggagauauccugcuaauuaacuccacggguaaucucauagccccaaggggcuacuucaaaauccggagcgggaagucgucuauuaugcgcuccgacgcgccgaucggaaaguguaacucagaaugcauaacucccaauggcaguauuccuaacgacaaaccauuucagaaugucaaccgaaucacauauggugcaugucccagauacgugaagcagaauacccugaaacuugccacugggaugaggaacgugccugagaagcaaacacggggaaucuucggcgcuauugccggcuuuaucgaaaaugggugggagggaauggucgaugguugguauggcuuccgucaccagaacagcgaggggauuggacaggcagcugaccugaaauccacccaagccgcgauagaucagaucaauggcaaguugaaccgccucauugguaaaacgaacgaaaaguuccaccagaucgagaaggaauuuucugagguugaagggagaauccaggaccuggagaaauacguggaggauaccaagauugacuuauggagcuauaaugccgaacugcucguagcacuugagaaccaacauacaauagaucugacugacucagaaaugaauaaauuguucgagaagaccaaaaagcagcuaagggaaaacgcugaggauaugggcaauggaugcuuuaagaucuaccacaaaugugacaacgccugcauuggcaguauccggaaugggacauaugaucaugacguguaccgagacgaggcucugaacaaucgcuuccagauuaagggagucgaacucaaauccgguuacaaggauuggauccuguggauaaguuuugccaucucuugcuuccuucuguguguggcauugcucggcuuuauuaugugggccugccagaaagggaacaucagauguaauauuugcaucuga

SEQ ID NO: 136165 - RNA, 1701 nt, Artificial Sequence; identical to SEQ ID NO: 129976
  derived and/or modified CDS sequence (opt3) from hemagglutinin__InfluenzaA__AEX36377

SEQ ID NO: 136166 - RNA, 1701 nt, Artificial Sequence
  derived and/or modified CDS sequence (opt3) from hemagglutinin__InfluenzaA__AEX36388
augaagaccaucauugcccugagcuacauacucugccuuguguucgcucagaaacugcccggcaacgacaauuccacagcaacuuuguguuuagggcaccaugccgucccuaacggaacgaucguuaagaccauuacaaaugaucaaaucgaggugacuaacgcgaccgaacugguacagucuucaaguacaggugagauuugcgacagcccacaccagauccuagauggcgaaaauuguacccucauagacgcucugcuuggggauccgcagugcgacggauuucaaaacaaaaagugggaucuguucguggagagauccaaagccuauucuaauuguuaccccuaugacgucccugauuacgcaucguugaggucacucguggccagcaguggcacucuggaauuuaacaaugaguccuucaacuggacagguguuacccagaaugggacgucuagcgcuugcauccggcgcuccaacaauucauuuuucagucgacugaacuggcucacucauuuaaaguuuaaguauccagcacugaaugugaccaugcccaacaacgagaaauucgacaaacuuuacauuuggggaguccaccauccuggcacagauaaugaccagaucuuuuuguaugcccaggcuagcggccguauuacugugucuaccaagagaucccaacagacaguaaucccaaacauagggucaaggccccggguucgcaauauuccuagcagaaucaguauuuacuggaccaucgugaagccaggagauauccugcuaauuaacucuacggguaaucucauagccccgaggggcuacuucaaaauccgguccggaaagagcucgauuaugcgcucugacgcgcccaucgggaaguguaacuccgaaugcauaacuccuaauggcucaauuccaaacgacaaacccuuucagaaugucaaccgaaucacauauggugcauguccuagauacgugaagcagaauacccugaaacuugccacugggaugaggaacgugccagagaagcaaacacggggaaucuucggcgcuauugccggcuuuaucgaaaaugggugggagggaaugauggaugguugguauggcuuccgucaccagaacagugaggggauuggacaggcagcugaccugaaaagcacccaagccgcgauagaucagaucaauggcaaguugaaccgccucauugguaaaacgaacgaaaaguuccaccagaucgagaaggaauuuuccgaggucgaagggagaauccaggaccuggagaaauacguugaggauaccaagauugacuuauggucuuauaaugccgaacugcucguggcacuugagaaccaacauacaauagaucugacugacagcgaaaugaauaaauuguucgagaagaccaaaaagcagcuaagggaaaacgcugaggauaugggcaauggaugcuuuaagaucuaccacaaaugugacaacgccugcauuggcucaauccggaaugggacauaugaucaugacguauaccgagacgaggcucugaacaaucgcuuccagauuaagggaguggaacucaaaagugguuacaaggauuggauccuguggauauccuuugccaucagcugcuuccuucugugugucgcauugcucggcuuuauuaugugggccugccagaaagggaacaucagauguaauauuugcaucuga

SEQ ID NO: 136167 - RNA, 1701 nt, Artificial Sequence
  derived and/or modified CDS sequence (opt3) from hemagglutinin__InfluenzaA__AEX36399
augaagaccaucauugcccugagcuacauacucugccuuguguucgcucagaaacugcccggcaacgacaauuccacagcaacuuuguguuuagggcaccaugccgucccuaacggaacgaucguuaagaccauuacaaaugaucaaacugaggugaccaacgcgacagaacugguacagucuucaaguaccggugagaucugcgacagcccacaccagauucuagauggcgaaaauuguacucucaucgacgcucugcuuggggauccgcagugcgacggauuucaaaacaaaaagugggaucuguucguggagagauccaaagccuauucuaauuguuaccccuaugacgucccugauuacgcaucguugaggucacucguggccagcaguggcacacuggaauuuaacaaugaguccuucaacuggaccgguguuacgcagaaugggacuucuagcgcuugcauacggcgcuccaacaauucauuuuucagucgacugaacuggcucacccauuuaaaguuuaaguauccagcacugaaugugacaaugcccaacaacgagaaauucgacaaguuguacaucuggggaguccaccauccuggcacugauaaugaccagauuuuucuuuaugcccaggcuagcggccguaucaccgugucuacaaaaagaucccaacagaccguaauuccaaacaucgggucaaggccccggguucgcaauauaccuagcagaauuaguaucuacuggacgauugugaagccaggagauauccugcuaaucaacucuacugguaaucucauugccccgaggggcuacuucaaaauacgguccgggaaaagcucgaucaugcgcucugacgcgcccauuggaaaguguaacuccgaaugcaucacaccuaauggcucaauaccaaacgacaaacccuuucagaaugucaaccgaauuaccuauggugcauguccuagauacgugaagcagaauacucugaaacuugccacagggaugaggaacgugccagagaagcaaacccggggaaucuucggcgcuaucgccggcuuuauugaaaaugggugggagggaauggucgaugguugguauggcuuccgucaccagaacagugaggggaucggacaggcagcugaccugaaaagcacgcaagccgcgauugaucagauaaauggcaaguugaaccgccucaucgguaaaaccaacgaaaaguuccaccagauugagaaggaauuuuccgagguugaagggagaauccaggaccuggagaaauacguggaggauacaaagaucgacuuauggucuuauaaugccgaacugcucguagcacuugagaaccaacauacuauugaucugaccgacagcgaaaugaauaaauuguucgagaagacaaagaagcagcuaagggaaaacgcugaggauaugggcaauggaugcuuuaagauauaccacaaaugugacaacgccugcaucggcucaauucggaaugggacuuaugaucaugacguguaccgagacgaggcucugaacaaucgcuuccagaucaagggagucgaacucaaaagugguuacaaggauuggauucuguggaucuccuuugccauaagcugcuuccuucuguguguggcauugcucggcuuuaucaugugggccugccagaaagggaacauuagauguaauaucugcauuuga

SEQ ID NO: 136168 - RNA, 1701 nt, Artificial Sequence
  derived and/or modified CDS sequence (opt3) from hemagglutinin__InfluenzaA__AEX36410
augaagaccaucauugcccugagcuacauacucugccuuguguucgcucagaaacugcccggcaacgacaauuccacagcaacuuuguguuuagggcaccaugccgucccuaacggaacgaucguuaagaccauuacaaaugaucaaaucgaggugacuaacgcgaccgaacugguacaaaauucuucaacaggugagauuugcgacaguccacaccagauccuagauggcgaaaacuguacccucauagacgcucugcuuggggauccgcagugcgacggauuucagaauaaaaagugggaucuguucguggagagaagcaaagccuauuccaacuguuaccccuaugacgucccugauuacgcaucuuugaggucgcucguggccucaagcggcacucuggaauuuaauaacgagaguuucaauuggacagguguuacccagaacgggacguccucugcuugcauccggcgcagcaauaacuccuuuuucucacgacugaauuggcucacucauuuaaaguuuaaguauccagcacugaacgugaccaugcccaacaaugagaaauucgacaaacuuuacauuuggggaguccaccauccuggcacagauaacgaccagaucuuuuuguaugcccaggcuaguggccguauuacugugagcaccaagagaucucaacagacaguaaucccaaauauaggguccaggccccggguucgcaacauuccuucaagaaucagcauuuacuggaccaucgugaagccaggagauauccugcuaauuaauaguacggguaaccucauagccccgaggggcuacuucaaaauccggucugggaaguccagcauuaugcgcucggacgcgcccaucggaaaguguaauucugaaugcauaacuccuaacggcuccauuccaaaugacaaacccuuucagaacgucaaucgaaucacauauggugcauguccuagauacgugaagcagaacacccugaaacuugccacugggaugaggaaugugccagagaagcaaacacggggaaucuucggcgcuauugccggcuuuaucgaaaacgggugggagggaauggucgaugguugguauggcuuccgucaccaaaauucagaggggauuggacaggcagcugaccugaaaaguacccaggccgcgauagaucagaucaacggcaaguugaaccgccucauugguaaaacgaaugaaaaguuccaccagaucgagaaggaauuuagcgagguugaagggagaauccaggaccuggagaaauacguggaggauaccaagauugacuuaugguccuauaacgccgaacugcucguagcacuugagaaucaacauacaauagaucugacugacucugaaaugaacaaauuguucgagaagaccaaaaagcagcuaagggaaaaugcugaggauaugggcaacggaugcuuuaagaucuaccacaaaugugacaaugccugcauuggcagcauccggaacgggacauaugaucaugacguguaccgagacgaggcucugaauaaccgcuuccagauuaagggagucgaacucaaaucagguuacaaggauuggauccuguggauaaguuuugccaucuccugcuuccuucuguguguggcauugcucggcuuuauuaugugggccugccagaaagggaauaucagauguaacauuugcaucuga

SEQ ID NO: 136169 - RNA, 1701 nt, Artificial Sequence; identical to SEQ ID NO: 130482
  derived and/or modified CDS sequence (opt3) from hemagglutinin__InfluenzaA__AEX36421

SEQ ID NO: 136170 - RNA, 1701 nt, Artificial Sequence
  derived and/or modified CDS sequence (opt3) from hemagglutinin__InfluenzaA__AEX36432
augaagaccaucauugcccugagcuacauacucugccuuguguucgcucagaaacugcccggcaacgacaauuccacagcaacuuuguguuuagggcaccaugccgucccuaacggaacgaucguuaagaccauuacaaaugaucaaaucgaggugacuaacgcgaccgaacugguacagucuucaaguacaggugagauuugcgacagcccacaccaggugcuagauggcgaaaauuguacccucaucgacgcucugcuuggggauccgcagugcgacggauuucaaaacaaaaagugggaucuguucgucgagagauccaaagccuauucuaauuguuaccccuaugacgugccugauuacgcaucguugaggucacucguugccagcaguggcacucuggaauuuaacaaugaguccuucaacuggacaggugugacccagaaugggacgucuagcgcuugcauacggcgcuccaacaauucauuuuucagucgacugaacuggcucacucauuuaaaguuuaaguauccagcacugaaugucaccaugcccaacaacgagcaguucgacaaacuuuacaucuggggagugcaccauccuggcacagauaaugaccagaucuuuuuguaugcccaagcuagcggccguauuacuguaucuaccaagagaucccagcagacaguuauuccaaacaucgggucaaggccccgggugcgcaauauaccuagcagaauuaguaucuacuggaccauugucaaaccaggagauauccugcuaaucaacucuacggguaaucucauugccccgaggggcuacuucaagauacgguccgggaaaagcucgaucaugcgcucugacgcgcccauuggaaaguguaacuccgaaugcaucacuccuaauggcucaauaccaaacgacaagcccuuucagaaugugaaccgaauuacauauggugcauguccuagauacgugaaacaaaauacccugaagcuggccacugggaugaggaacgucccagagaaacagacacggggaaucuucggcgcuaucgccggcuuuauugaaaaugggugggagggaaugguugaugguugguauggcuuccgucaccagaacagugaggggcgcggacaagcagcugaccuuaagagcacccaggccgcgaucgaucagauuaauggcaaauugaacagacucauagguaagacgaacgaaaaauuccaccagaucgagaaggaauuuuccgagguggaagggaggauucaagaccuggagaaguacguagaggauaccaaaaucgacuuauggucuuauaaugccgaacugcucguggcacuugagaaccagcauacaaucgaucugacugacagcgaaaugaauaaguuguucgagaaaaccaagaaacagcuacgggaaaacgcugaggauaugggcaauggaugcuuuaagauuuaccacaagugugacaacgccugcauaggcucaauccgaaaugggacauaugaucaugacgucuaccgcgacgaggcucugaacaauagauuccagauuaaaggaguggaacucaagagugguuacaaagauuggauccuguggauuuccuuugccaucagcugcuuccuucuguguguugcauugcucggcuuuauaaugugggccugccaaaaggggaacaucagguguaauauuugcaucuga

SEQ ID NO: 136171 - RNA, 1701 nt, Artificial Sequence
  derived and/or modified CDS sequence (opt3) from hemagglutinin__InfluenzaA__AEX36443
augaagaccaucauugcccugagcuacauacucugccuuguguucgcucagaaacugcccggcaacgacaauuccacagcaacuuuguguuuagggcaccaugccgucccuaacggaacgaucguuaagaccauuacaaaugaucaaaucgaggugacuaacgcgaccgaacugguacagucuucaaguacaggugagauuugcaauagcccacaccagauccuagacggcgaaaacuguacccucauagaugcucugcuuggggacccgcagugcgauggauuucaaaauaaaaagugggaccuguucguggagagauccaaagccuauucuaacuguuaccccuaugaugucccugacuacgcaucguugaggucacucguggccagcaguggcacucuggaauuuaauaacgaguccuucaauuggacagguguuacccagaacgggacgucuagcgcuugcauccggcgcuccaauaacucauuuuucagucgacugaauuggcucacucauuuaaaguuuaaguauccagcacugaacgugaccaugcccaacaaugaggaguucgauaaacuuuacauuuggggaguccaccauccuggcacagacaacgaucagaucuuuuuguaugcccaggcuagcggccguauuacugugucuaccaagagaucccaacagacaguaaucccaaauauagggucaaggccccggguucgcaacauuccuagcagaaucaguauuuacuggaccaucgugaaaccaggagacauccugcuaauuaauucuacggguaaccucauagccccgaggggcuacuucaagauccgguccgggaaaagcucgauuaugcgcucugaugcgcccaucggaaaguguaauuccgaaugcauaacuccuaacggcucaauuccaaaugacaagcccuuucagaacgucaaucgaaucacauauggugcauguccuagauacgugaaacagaacacccugaagcuggccacugggaugaggaaugugccagaaaaacaaacacggggaaucuucggcgcuauugccggcuuuaucgagaacgggugggagggaauggucgacgguugguauggcuuccgucaccagaauagugaagggauuggacaggcagcugaucuuaagagcacccaagccgcgauagaccagaucaacggcaaauugaaccgccucauugguaagacgaaugagaaauuccaccagaucgaaaaggaguuuuccgaaguugaggggagaauccaggaucuggagaaguacguggaagacaccaaaauugauuuauggucuuauaacgccgagcugcucguagcacuugaaaaucaacauacaauagaccugacugauagcgagaugaacaaguuguucgagaaaaccaagaaacagcuaagggaaaaugcugaggacaugggcaacggaugcuuuaagaucuaccacaagugugauaaugccugcauuggcucaauccggaacgggacauaugaccaugauguguaccgagacgaagcucugaauaaccgcuuccagauuaaaggagucgagcucaagagugguuacaaagacuggauccuguggauauccuuugccaucagcugcuuccuucuguguguggcauugcucggcuuuauuaugugggccugccagaaggggaauaucagauguaacauuugcaucuga

SEQ ID NO: 136172 - RNA, 1701 nt, Artificial Sequence
  derived and/or modified CDS sequence (opt3) from hemagglutinin__InfluenzaA__AEX36454
augaagaccaucauugcccugagcuacauacucugccuuguguucgcucagaaacugcccggcaacgacaauuccacagcaacuuuguguuuagggcaccaugccgucccuaacggaacgaucguuaagaccauuacaaaugaucaaaucgaggugacuaacgcgaccgaacugguacagucuucaaguacaggugagauuugcaauagcccacaccagauccuagacggcgaaaacuguacccucauagaugcucugcuuggggacccgcagugcgauggauuucaaaauaaaaagugggaccuguucguggagagauccaaagccuauucuaacuguuaccccuaugaugucccugacuacgcaucguugaggucacucguggccagcaguggcacucuggaauuuaauaacgaguccuucaauuggacagguguuacccagaacgggacgucuagcgcuugcauccggcgcuccaauaacucauuuuucagucgacugaauuggcucacucauuuaaaguuuaaguauccagcacugaacgugaccaugcccaacaaugaggaguucgauaaacuuuacauuuggggaguccaccauccuggcacagacaacgaucagaucuuuuuguaugcccaggcuagcggccguauuacugugucuaccaagagaucccaacagacaguaaucccaaauauagggucaaggccccggguucgcaacauuccuagcagaaucaguauuuacuggaccaucgugaaaccaggagacauccugcuaauuaauucuacggguaaccucauagccccgaggggcuacuucaagauccgguccgggaaaagcucgauuaugcgcucugaugcgcccaucggaaaguguaauuccgaaugcauaacuccuaacggcucaauuccaaaugacaagcccuuucagaacgucaaucgaaucacauauggugcauguccuagauacgugaaacagaacacccugaagcuggccacugggaugaggaaugugccagaaaaacaaacacggggaaucuucggcgcuauugccggcuuuaucgagaacgggugggagggaauggucgacgguugguauggcuuccgucaccagaauagugaagggauuggacaggcagcugaucuuaagagcacccaagccgcgauagaccagaucaacggcaaauugaaccgccucauugguaagacgaaugagaaauuccaccagaucgaaaaggaguuuuccgaaguugaggggagaauccaggaucuggagaaguacguggaagacaccaaaauugauuuauggucuuauaacgccgagcugcucguagcacuugaaaaucaacauacaauagaccugacugauagcgagaugaacaaguuguucgagaaaaccaagaaacagcuaagggaaaaugcugaggacaugggcaacggaugcuuuaagaucuaccacaagugugauaaugccugcauuggcucaauccggaacgggacauaugaccaugauguguaccgagacgaagcucugaauaaccgcuuccagauuaaaggagucgagcucaagagugguuacaaagacuggauccuguggauauccuuugccaucagcugcuuccuucugugugugguuuugcucggcuuuauuaugugggcaugccagaaggggaauaucagauguaacauuugcaucuga

SEQ ID NO: 136173 - RNA, 1701 nt, Artificial Sequence; identical to SEQ ID NO: 129777
  derived and/or modified CDS sequence (opt3) from hemagglutinin__InfluenzaA__AEX36465

SEQ ID NO: 136174 - RNA, 1701 nt, Artificial Sequence
  derived and/or modified CDS sequence (opt3) from hemagglutinin__InfluenzaA__AEX36476
augaagaccaucauugcccugagcuacauacucugccuuguguucgcucagaaacugcccggcaucgacaacuccacagcaacuuuguguuuagggcaccaugccgucccuaauggaacgauuguuaagaccaucacaaacgaucaaauugaggugacuaaugcgaccgaacugguacagucuucaaguacagguggcaucugcgacagcccacaccagauacuagauggggagaacuguacccucaucgacgcucugcuuggagauccgcagugcgacggcuuucaaaauaaaaagugggaucuguucguggaaagauccaaagccuauucuaacuguuaccccuaugacgucccugauuacgcaucguugaggucacucguggccagcagugguacucuggaguuuaauaacgaauccuucaauuggacagggguuacccagaacggaacgucuagcgcuugcaagcggggcuccaauaacucauuuuucagucgccugaauuggcucacucauagcaaguuuaaauauccagcauuaaacgugaccaugcccaauaacgaggaguucgacaagcuguacauuuggggcguccaccauccugggacagauaacgaccagaucuuuccauaugcccaggcuucuggacgaauuacuguguccaccaaacguucacaacagacaguaauccccaauauagguagcagaccuaggauucggaacaucccaagucgcauuucuaucuacuggaccaucguuaagccgggcgauauucuuuugauaaauuccacggggaaccugaucgcccccagaggauacuucaaaauuaggagcggcaagucgucuaucaugcgguccgacgcgccuauagguaagugugacucagaaugcauuacuccaaaugggaguauccccaacgauaaaccuuuucagaaugugaaccgcaucacauauggagcauguccacgauacgucaagcagaauacccuaaaacucgccacuggcaugagaaacgugcccgagaagcaaacaaggggcauuuucggggcuaucgccggauuuauugaaaaugguugggagggcaugguggacgggugguauggauuccggcaccagaacagcgagggcauaggucaggcagcugaucugaaauccacccaagccgcgaucgaccagauuaaugggaaacuuaaccgucugaucggcaagacgaaugaaaaguuccaccagaucgagaaggaauuuucugaggucgaaggacgcauucaggauuuggagaaauacguugaggacaccaagauagaucucuggagcuauaacgccgaacuguuaguggcacuggagaaccaacauacaaucgaccucacugauucagaaaugaauaaacuuuucgagaagaccaaaaagcagcugagagaaaacgcugaggacaugggcaaugggugcuuuaagauuuaccacaaaugugauaacgccugcaucggaaguauuaggaaugguacauaugaccaugacguauaccgggaugaggcuuugaacaaucgauuccagaucaagggcguggaacuaaaauccggguacaaggacuggauacuguggaucagcuuugccauuucuugcuuccuccugugugucgcacuucugggauuuaucaugugggccugccagaaaggcaacauucgcuguaauaucugcauauga

SEQ ID NO: 136175 - RNA, 1701 nt, Artificial Sequence
  derived and/or modified CDS sequence (opt3) from hemagglutinin__InfluenzaA__AEX36487
augaagaccaucauugcccugagcuacauacucugccuuguguucgcucagaaacugcccggcaucgacaacuccacagcaacuuuguguuuagggcaccaugccgucccuaauggaacgauuguuaagaccaucacaaacgaucaaauugaggugacuaaugcgaccgaacugguacagucuucaaguacagguggcaucugcgacagcccacaccagauacuagauggggagaacuguacccucaucgacgcucugcuuggagauccgcagugcgacggcuuucaaaauaaaaagugggaucuguucguggaaagauccaaagccuauucuaacuguuaccccuaugacgucccugauuacgcaucguugaggucacucguggccagcagugguacucuggaguuuaauaacgaauccuucaauuggacagggguuacccagaacggaacgucuagcgcuugcaagcggggcuccaauaacucauuuuucagucgccugaauuggcucacucauagcaaguuuaaauauccagcauuaaacgugaccaugcccaauaacgaggaguucgacaagcuguacauuuggggcguccuucacccugggacagauaacgaccagaucuuuuuguaugcccaggcuucuggacgaauuacuguguccaccaaacguucacaacagacaguaaucccaaauauagguagcagacccaggguucggaacauuccuagucgcaucucuauuuacuggaccaucgugaagccaggcgauauccugcuaauuaauuccacggggaaccucauagccccgagaggauacuucaaaaucaggagcggcaagucgucuauuaugcgguccgacgcgcccaucgguaaguguaauucagaaugcauaacuccuaacgggaguauuccaaaugacaaacccuuucagaacgucaaucgcaucacauauggagcauguccucgauacgugaagcagaacacccugaaacuugccacuggcaugagaaaugugccagagaagcaaacaaggggcaucuucggggcuauugccggauuuaucgaaaacgguugggagggcauggucgaugggugguauggauuccggcaucagaauagcgagggcauuggucaggcagcugaccugaaauccacccaagccgcgauagaucagaucaacgggaaguugaaucgucucauuggcaaaacgaacgaaaaguuccaccagaucgagaaggaauuuucugagguugaaggacgcauccaggaccuggagaaauacguggaggauaccaagauugacuuauggagcuauaacgccgaacugcucguagcacuugagaaucaacacacaauagaucugacugacucagaaaugaacaaauuguucgagaagaccaaaaagcagcuaagagaaaaugcugaggauaugggcaacgggugcuuuaagaucuaccauaaaugugacaaugccugcauuggaaguaucaggaacgguacauaugaucacgacguguaccgggacgaggcucugaauaaccgauuccagauuaagggcgucgaacucaaauccggguacaaggauuggauccuguggaucagcuuugccauaucuugcuuccuucuguguguggcauugcucggauuuauuaugugggccugccagaaaggcaauauccgcuguaacauuugcaucuga

SEQ ID NO: 136176 - RNA, 1701 nt, Artificial Sequence; identical to SEQ ID NO: 136026
  derived and/or modified CDS sequence (opt3) from hemagglutinin__InfluenzaA__AEX36498

SEQ ID NO: 136177 - RNA, 1701 nt, Artificial Sequence
  derived and/or modified CDS sequence (opt3) from hemagglutinin__InfluenzaA__AEX36509
augaagaccaucauugcccugagcuacauacucugccuuguguucgcucagaaacugcccggcaucgacaacuccacagcaacuuuguguuuagggcaccaugccgucccuaauggaacgauuguuaagaccaucacaaacgaucaaauugaggugacuaaugcgaccgaacugguacagaacucuucaacagguggcaucugcgacaguccacaccagauacuagauggggagaauuguacccucaucgacgcucugcuuggagauccgcagugcgacggcuuucaaaacaaaaagugggaucuguucguggaaagaagcaaagccuauuccaauuguuaccccuaugacgucccugauuacgcaucuuugaggucgcucguggccucaagcgguacucuggaguuuaacaaugaaaguuucaacuggacagggguuacccagaauggaacguccucugcuugcaagcggggcagcaacaauuccuuuuucucacgccugaacuggcucacucauaguaaguuuaaauauccagcauuaaaugugaccaugcccaacaacgaggaguucgacaagcuguacauuuggggcguccaccauccugggacagauaaugaccagaucuuuccauaugcccaggcuagcggacgaauuacugugucuaccaaacguucccaacagacaguaauccccaacauagguucaagaccuaggguucggaauauuccaagccgcaucaguauuuacuggaccaucgugaagccgggcgauauccuuuugauuaacucuacggggaaucugauagcccccagaggauacuucaaaaucagguccggcaagagcucgauuaugcggucugacgcgccuaucgguaaguguaacuccgaaugcauaacuccaaaugggucaauucccaacgacaaaccuuuucagaaugucaaccgcaucacauauggagcauguccacgauacgugaagcagaauacccuaaaacucgccacuggcaugagaaacgugcccgagaagcaaacaaggggcaucuucggggcuauugccggauuuaucgaaaaugguugggagggcauggucgaugggugguauggauuccggcaccagaacagugagggcauuggucaggcagcugaccugaaaagcacccaagccgcgauagaucagaucaaugggaaacuuaaccgucugauuggcaagacgaacgaaaaguuccaccagaucgagaaggaauuuuccgagguugaaggacgcauccaggacuuggagaaauacguggaggauaccaagauugaccucuggucuuauaaugccgaacuguuaguagcacuggagaaccaacauacaauagaucucacugacagcgaaaugaauaaacuuuucgagaagaccaaaaagcagcugagagaaaacgcugaggauaugggcaaugggugcuuuaagaucuaccacaaaugugacaacgccugcauuggaucaaucaggaaugguacauaugaucaugacguguaccgggacgaggcuuugaacaaucgauuccagauuaagggcgucgaacuaaaaaguggguacaaggauuggauccuguggauauccuuugccaucagcugcuuccuccuguguguggcacuucugggauuuauuaugugggccugccagaaaggcaacauccgcuguaauauuugcaucuga

SEQ ID NO: 136178 - RNA, 1701 nt, Artificial Sequence
  derived and/or modified CDS sequence (opt3) from hemagglutinin__InfluenzaA__AEX36520
augaagaccaucauugcccugagcuacauacucugccuuguguucgcucagaaacugcccggcaacgacaauuccacagcaacuuuguguuuagggcaccaugccgucccuaacggaacgaucguuaagaccauuacaaaugaucaaaucgaggugacuaacgcgaccgaacugguacagucuucaaguacaggugagauuugcgacagcccacaccagauccuagauggcgaaaauuguacccucauagacgcucugcuuggggauccgcagugcgacggauuucaaaacaaaaagugggaucuguucguggagagauccaaagccuauucuaauuguuaccccuaugacgucccugauuacgcaucguugaggucacucguggccagcaguggcacucuggaauuuaacaaugaguccuucaacuggacagguguuacccagaaugggacgucuagcgcuugcauccggcgcuccaacaauucauuuuucagucgacugaacuggcucacucauuuaaaguuuaaguauccagcacugaaugugaccaugcccaacaacgagcaguucgacaaacuuuacauuuggggaguccaccauccuggcacagauaaugaccagaucuuuuuguaugcccaagcuagcggccguauuacugugucuaccaagagaucccagcagacaguaaucccaaacauagggucaaggccccggguucgcaauauuccuagcagaaucaguauuuacuggaccaucgugaaaccaggagauauccugcuaauuaacucuacggguaaucucauagccccgaggggcuacuucaagauccgguccgggaaaagcucgauuaugcgcucugacgcgcccaucggaaaguguaacuccgaaugcauaacuccuaauggcucaauuccaaacgacaagcccuuucagaaugucaaccgaaucacauauggugcauguccuagauacgugaaacaaaauacccugaagcuggccacugggaugaggaacgugccagagaaacagacacggggaaucuucggcgcuauugccggcuuuaucgaaaaugggugggagggaauggucgaugguugguauggcuuccgucaccagaacagugaggggcgcggacaagcagcugaccuuaagagcacccaggccgcgauugaucagauaaauggcaaauugaacagacucaucgguaagacgaacgaaaaauuccaccagauugagaaggaauuuuccgagguugaagggaggauccaagaccuggagaaguacguggaggauaccaaaaucgacuuauggucuuauaaugccgaacugcucguagcacuugagaaccagcauacaauugaucugacugacagcgaaaugaauaaguuguucgagaaaaccaagaaacagcuacgggaaaacgcugaggauaugggcaauggaugcuuuaagauauaccacaagugugacaacgccugcaucggcucaauucgaaaugggacauaugaucauaacguguaccgcgacgaggcucugaauaacagauuccagaucaaaggagucgaacucaagagugguuacaaagacuggauucuguggaucuccuuugccauaagcugcuuccuucuguguguggcauugcucggcuuuaucaugugggccugccaaaaggggaauauuagguguaacaucugcauuuga

SEQ ID NO: 136179 - RNA, 1701 nt, Artificial Sequence
  derived and/or modified CDS sequence (opt3) from hemagglutinin__InfluenzaA__AEX36531
augaagaccaucauugcccugagcuacauacucugccuuguguucgcucagaaacugcccggcaacgacaauuccacagcaacuuuguguuuagggcaccaugccgucccuaacggaacgaucguuaagaccauuacaaaugaucaaaucgaggugacuaacgcgaccgaacugguacagucuucaaguacaggugagauuugcgacagcccacaccagauccuagauggcgaaaauuguacccucauagacgcucugcuuggggauccgcagugcgacggauuucaaaacaaaaagugggaucuguucguggagagauccaaagccuauucuaauuguuaccccuaugacgucccugauuacgcaucguugaggucacucguggccagcaguggcacucuggaauuuaacaaugaguccuucaacuggacagguguuacccagaaugggacgucuagcgcuugcauccggcgcuccaacaauucauuuuucagucgacugaacuggcucacucauuuaaaguuuaaguauccagcacugaaugugaccaugcccaacaacgagcaguucgacaaacuuuacauuuggggaguccaccauccuggcacagauaaugaccagaucuuuuuguaugcccaagcuagcggccguauuacugugucuaccaagagaucccagcagacaguaaucccaaacauagggucaaggccccggguucgcaauauuccuagcagaaucaguauuuacuggaccaucgugaaaccaggagauauccugcuaauuaacucuacggguaaucucauagccccgaggggcuacuucaagauccgguccgggaaaagcucgauuaugcgcucugacgcgcccaucggaaaguguaacuccgaaugcauaacuccuaauggcucaauuccaaacgacaagcccuuucagaaugucaaccgaaucacauauggugcauguccuagauacgugaaacaaaauacccugaagcuggccacugggaugaggaacgugccagagaaacagacacggggaaucuucggcgcuauugccggcuuuaucgaaaaugggugggagggaauggucgaugguugguauggcuuccgucaccagaacagugaggggcgcggacaagcagcugaccuuaagagcacccaggccgcgauugaucagauaaauggcaaauugaacagacucaucgguaagacgaacgaaaaauuccaccagauugagaaggaauuuuccgagguugaagggaggauccaagaccuggauaaguacguggaggacaccaaaaucgauuuauggucuuauaaugccgagcugcucguagcacuugaaaaccagcauacaauugaccugacugauagcgagaugaauaaguuguucgagaaaaccaagaaacagcuacgggaaaacgcugaagacaugggcaauggaugcuuuaagauauaccacaagugugauaacgccugcaucggcucaauucgaaaugggacauaugaccaugacguguaccgcgaugaggcucugaacaauagauuccagaucaaaggagucgagcucaagagugguuacaaagacuggauucuguggaucuccuuugccauaagcugcuuccuucuguguguggcauugcucggcuuuaucaugugggccugccaaaaggggaacauuagguguaauaucugcauuuga

SEQ ID NO: 136180 - RNA, 1701 nt, Artificial Sequence
  derived and/or modified CDS sequence (opt3) from hemagglutinin__InfluenzaA__AEX36542
augaagaccaucauugcccugagcuacauacucugccuuguguucgcucagaaacugcccggcaacgacaauuccacagcaacuuuguguuuagggcaccaugccgucccuaacggaacgaucguuaagaccauuacaaaugaucaaaucgaggugacuaacgcgaccgaacugguacaaaauucuucaacaggugagauuugcgacaguccacaccagauccuagauggcgaaaacuguacccucauagacgcucugcuuggggauccgcagugcgacggauuucagaauaaaaagugggaucuguucguggagagaagcaaagccuauuccaacuguuaccccuaugacgucccugauuacgcaucuuugaggucgcucguggccucaagcggcacucuggaauuuaauaacgagaguuucaauuggacagguguuacccagaacgggacguccucugcuugcauccggcgcagcaauaacuccuuuuucucacgacugaauuggcucacucauuuaaaguuuaaguauccagcacugaacgugaccaugcccaacaaugagcaguucgacaaacuuuacauuuggggaguccaccauccuggcacagauaacgaccagaucuuuuuguaugcccaagcuaguggccguauuacugugagcaccaagagaucucagcagacaguaaucccaaauauaggguccaggccccggguucgcaacauuccuucaagaaucagcauuuacuggaccaucgugaaaccaggagauauccugcuaauuaauaguacggguaaccucauagccccgaggggcuacuucaagauccggucugggaaauccagcauuaugcgcucggacgcgcccaucggaaaguguaauucugaaugcauaacuccuaacggcuccauuccaaaugacaagcccuuucagaacgucaaucgaaucacauauggugcauguccuagauacgugaaacaaaacacccugaaacuugccacugggaugaggaaugugccagagaagcagacacggggaaucuucggcgcuauugccggcuuuaucgaaaacgggugggagggaauggucgaugguugguauggcuuccgucaccaaaauucagaggggcgcggacaggcagcugaccugaagaguacccaggccgcgauugaucagauaaacggcaaauugaacagacucaucgguaagacgaaugaaaaauuccaccagauugagaaggaauuuagcgagguugaagggaggauccaagaccuggagaaguacguggaggauaccaaaaucgacuuaugguccuauaacgccgaacugcucguagcacuugagaaucagcauacaauugaucugacugacucugaaaugaacaaguuguucgagaaaaccaagaaacagcuacgggaaaaugcugaggauaugggcaacggaugcuuuaagauauaccacaagugugacaaugccugcaucggcagcauucgaaacgggacauaugaucaugacguguaccgcgacgaggcucugaauaacagauuccagaucaaaggagucgaacucaagucagguuacaaagauuggauucuguggaucaguuuugccauauccugcuuccuucuguguguggcauugcucggcuuuaucaugugggccugccaaaaggggaauauuagguguaacaucugcauuuga

SEQ ID NO: 136181 - RNA, 1701 nt, Artificial Sequence; identical to SEQ ID NO: 136180
  derived and/or modified CDS sequence (opt3) from hemagglutinin__InfluenzaA__AEX36553

SEQ ID NO: 136182 - RNA, 1701 nt, Artificial Sequence; identical to SEQ ID NO: 136180
  derived and/or modified CDS sequence (opt3) from hemagglutinin__InfluenzaA__AEX36564

SEQ ID NO: 136183 - RNA, 1701 nt, Artificial Sequence
  derived and/or modified CDS sequence (opt3) from hemagglutinin__InfluenzaA__AEX36575
augaagaccaucauugcccugagcuacauacucugccuuguguucgcucagaaacugcccggcaacggaaauuccacagcaacuuuguguuuagggcaccaugccgucccuaacgguacgaucguuaagaccauuacaaaugaccaaaucgaggugacuaacgcgaccgaacugguacagucuucaaguacaggcgagauuugcgauagcccacaccagauccuagacggggaaaauuguacccucauagaugcucugcuuggagacccgcagugcgauggcuuucaaaacaaaaagugggaccuguucguggagagauccaaagccuauucuaauuguuaccccuaugaugucccugacuacgcaucguugaggucacucguggccagcagugguacucuggaauuuaacaaugaguccuucaacuggacagggguuacccagaauggaacgucuagcgcuugcauccggcgcuccaacaauucauuuuucagucgacugaacuggcucacucauuuaaaguuuaaguauccagcacugaaugugaccaugcccaacaacgagcaguucgauaaacuuuacauuuggggcguccaccauccuggcacagacaaugaucagaucuuuuuguaugcccaagcuagcgggcguauuacugugucuaccaagagaucccagcagacaguaaucccaaacauaggaucaaggccccggguucgcaauauuccuagcagaaucaguauuuacuggaccaucgugaaaccaggugacauccugcuaauuaacucuacgggcaaucucauagccccgaggggguacuucaagauccgguccggaaaaagcucgauuaugcgcucugaugcgcccaucggcaaguguaacuccgaaugcauaacuccuaaugguucaauuccaaacgacaagcccuuucagaaugucaaccgaaucacauauggggcauguccuagauacgugaaacaaaauacccugaagcuggccacuggaaugaggaacgugccagagaaacagacacggggcaucuucggcgcuauugccggguuuaucgaaaauggaugggaggguauggucgacggcugguauggguuccgucaccagaacagugagggacgcggccaagcagcugaucuuaagagcacccaggccgcgauugaccagauaaaugguaaauugaacagacucaucgggaagacgaacgaaaaauuccaccagauugagaaggaauuuuccgagguugaaggcaggauccaagaucuggagaaguacguggaggacaccaaaaucgauauuuggucuuauaaugccgaauuacugguagcacucgagaaccagcauacaauagaccuuacugauagcgaaaugaauaagcuguucgagaaaaccaagaaacaguugcgggaaaacgcugaggacaugggaaauggcugcuuuaagaucuaccacaagugugauaacgccugcauugggucaauccgaaauggaacauaugaccaugauguguaccgcgacgaggcucuaaacaauagauuccagauuaaaggugucgaacugaagaguggcuacaaagacuggauccucuggauauccuuugccaucagcugcuuccugcuuuguguggcacuguugggguuuauuaugugggccugccaaaagggaaacaucagguguaauauuugcaucuga

SEQ ID NO: 136184 - RNA, 1701 nt, Artificial Sequence
  derived and/or modified CDS sequence (opt3) from hemagglutinin__InfluenzaA__AEX36586
augaagaccaucauugcccugagcuacauacucugccuuguguucgcucagaaacugcccggcaacgacaauaacacagcaacuuuguguuuagggcaccaugccgucccuaauggaacgaucguuaagaccauuacaaacgaucaaaucgaggugacuaaugcgaccgaacugguacaguccucuucaacaggugagauuugcgacaguccacaccagauccuagauggcgaaaacuguacccucauagacgcucugcuuggggauccgcagugcgacggauuucaaaauaaaaagugggaucuguucguggagagaagcaaagccuauuccaacuguuaccccuaugacgucccugauuacgcaucuuugaggucgcucguggccucaagcggcacucuggaauuuaauaacgagaguuucaauuggacagguguuacccagaacgggacguccucugcuugcauccggcgcagcaauaacuccuuuuucucacgacugaauuggcucacucauuuaaaguuuaaguauccagcacugaacgugaccaugcccaacaaugagcaguucgacaaacuuuacauuuggggaguccaccauccuggcacagauaacgaccagaucuuuuuguaugcccaagcuaguggccguauuacugugagcaccaagagaucucagcagacaguaaucccaaauauaggguccaggccccggguucgcaacauuccuucaagaaucagcauuuacuggaccaucgugaaaccaggagauauccugcuaauuaauaguacggguaaccucauagccccgaggggcuacuucaagauccggucugggaaauccagcauuaugcgcucggacgcgcccaucggaaaguguaauucugaaugcauaacuccuaacggcuccauuccaaaugacaagcccuuucagaacgucaaucgaaucacauauggugcauguccuagauacgugaaacaaaacacccugaaacuugccacugggaugaggaaugugccagagaagcagacacggggaaucuucggcgcuauugccggcuuuaucgaaaacgggugggagggaauggucgaugguugguauggcuuccgucaccaaaauucagaggggcgcggacaggcagcugaccugaagaguacccaggccgcgauugaucagauaaacggcaaauugaacagacucaucgguaagacgaaugaaaaauuccaccagauugagaaggaauuuagcgagguugaagggaggauccaagaccuggagaaguacguggaggauaccaaaaucgacuuaugguccuauaacgccgaacugcucguagcacuugagaaucagcauacaauugaucugacugacucugaaaugaacaaguuguucgagaaaaccaagaaacagcuacgggaaaaugcugaggauaugggcaacggaugcuuuaagauauaccacaagugugacaaugccugcaucggcagcauucgaaacgggacauaugaucaugacguguaccgcgacgaggcucugaauaacagauuccagaucaaaggagucgaacucaagucagguuacaaagauuggauucuguggaucaguuuugccauauccugcuuccuucuguguguggcauugcucggcuuuaucaugugggccugccaaaaggggaauauuagguguaacaucugcauuuga

SEQ ID NO: 136185 - RNA, 1701 nt, Artificial Sequence
  derived and/or modified CDS sequence (opt3) from hemagglutinin__InfluenzaA__AEX36597
augaagaccaucauugcccugagcuacauacucugccuuguguucgcucagaaacugcccggcaacgacaauuccauggcaacauuguguuuagggcaccaugccgucccuaacggaacuaucguuaagacgauuaccaaugaucaaaucgaggugacaaacgcgacugaacugguacagucuucaaguaccggugagauuugcgacagcccacaccagauccuagauggcgaaaauuguacacucauagacgcucugcuuggggauccgcagugcgacggauuucaaaacaaaaagugggaucuguucguggagagauccaaagccuauucuaauuguuaccccuaugacgucccugauuacgcaucguugaggucacucguggccagcaguggcacccuggaauuuaacaaugaguccuucaacuggacugguguuacacagaaugggaccucuagcgcuugcauccggcgcuccaacaauucauuuuucagucgacugaacuggcucacgcauuuaaaguuuaaguauccagcacugaaugugacuaugcccaacaacgagcaguucgacaaacuuuacauuuggggaguccaccauccuggcaccgauaaugaccagaucuuuuuguaugcccaagcuagcggccguauuacagugucuacuaagagaucccagcagaccguaaucccaaacauagggucaaggccccggguucgcaauauuccuagcagaaucaguauuuacuggacaaucgugaaaccaggagauauccugcuaauuaacucuaccgguaaucucauagccccgaggggcuacuucaagauccgguccgggaaaagcucgauuaugcgcucugacgcgcccaucggaaaguguaacuccgaaugcauaacgccuaauggcucaauuccaaacgacaagcccuuucagaaugucaaccgaaucacuuauggugcauguccuagauacgugaaacaaaauacacugaagcuggccaccgggaugaggaacgugccagagaaacagacucggggaaucuucggcgcuauugccggcuuuaucgaaaaugggugggagggaauggucgaugguugguauggcuuccgucaccagaacagugaggggcgcggacaagcagcugaccuuaagagcacacaggccgcgauugaucagauaaauggcaaauugaacagacucaucgguaagaccaacgaaaaauuccaccagauugagaaggaauuuuccgagguugaagggaggauccaagaccuggagaaguacguggaggauacgaaaguagacuuauggucuuauaaugccgaacugcucguggcacuugagaaccagcauaccaucgaucugacagacagcgaaaugaauaaguuguucgagaaaacuaagaaacagcuacgggaaaacgcugaggauaugggcaauggaugcuuuaagauuuaccacaagugugacaacgccugcauaggcucaauccgaaaugggaccuaugaucaugacgucuaccgcgacgaggcucugaacaauagauuccagauuaaaggaguggaacucaagagugguuacaaagauuggauccuguggauuuccuuugccaucagcugcuuccuucuguguguugcauugcucggcuuuauaaugugggccugccaaaaggggaacaucagguguaauauuugcaucuga

SEQ ID NO: 136186 - RNA, 1701 nt, Artificial Sequence
  derived and/or modified CDS sequence (opt3) from hemagglutinin__InfluenzaA__AEX36608
augaagaccaucauugcccugagcuacauacucugccuuguguucgcucagaaacugcccggcaacgacaauuccacagcaacuuuguguuuagggcaccaugccgucccuaacggaacgaucguuaagaccauuacaaaugaucaaaucgaggugacuaacgcgaccgaacugguacagucuucaaguacagguggcauuugcgacagcccacaccagauccuagauggggagaauuguacccucauagacgcucugcuuggagauccgcagugcgacggcuuucaaaacaaaaagugggaucuguucguggaaagauccaaagccuauucuaauuguuaccccuaugacgucccugauuacgcaucguugaggucacucguggccagcagugguacucuggaguuuaacaaugaaaacuucaauuggacagggguuacccagaacggaacguccucugcuugcaagcggcgcagcaauaacuccuuuuucucacgacugaauuggcucacucauuuaaaguuuaaauauccagcacugaacgugaccaugcccaacaaugagaaguucgacaaacuuuacaucuggggcguccaccauccuggcacagauaacgaccagauuuuucuuuaugcccaggcuagugggcguaucacugugagcaccaagagaucucaacagacaguaauuccaaauaucggauccaggccccggguucgcaacauaccuucaagaauuagcaucuacuggaccauugugaaaccaggugauauccugcuaaucaauaguacgggcaaccucauugccccgaggggguacuucaagauacggucuggaaaguccagcaucaugcgcucggacgcgcccauuggcaaauguaauucugagugcaucacuccuaacgguuccauaccaaaugacaagcccuuucagaacgucaaucgaauuacauauggggcauguccuagauacgugaaacagaacacccugaaguuggccacuggaaugaggaaugugccagaaaaacaaacacggggcaucuucggcgcuaucgccggguuuauugagaacggaugggaagguauggucgauggcugguauggguuccgucaccaaaauucagagggaaucggccaggcagcugaccugaagaguacccaggccgcgauuaaccagauaaacgguaaauugaaucgccucaucgggaagacgaacgagaaguuccaccagauugaaaaagaguuuagcgaaguugagggcagaauccaggaucuggaaaaguacguggaggacaccaaaaucgauuuaugguccuauaaugccgagcugcucguagcacuugaaaaccaacauacaauugaccugacugauucugagaugaauaaguuguucgaaaggaccaaaaagcagcuacgggagaacgcugaagacaugggaaauggcugcuuuaagauauaccacaaaugugauaacgccugcaucgggagcauucgaaauggaacauaugaccaugauguguaccgcgacgaggcucugaacaagagauuccagaucaaaggugucgagcucaagucaggcuacaaagacuggauucuguggaucaguuuugccauauccugcuuccuucuguguguggcauugcucggguuuaucaugugggccugccagaagggaaauauuagguguaacaucugcauuuga

SEQ ID NO: 136187 - RNA, 1701 nt, Artificial Sequence; identical to SEQ ID NO: 136009
  derived and/or modified CDS sequence (opt3) from hemagglutinin__InfluenzaA__AEX36619

SEQ ID NO: 136188 - RNA, 1701 nt, Artificial Sequence
  derived and/or modified CDS sequence (opt3) from hemagglutinin__InfluenzaA__AEX63617
auggaggccaagcuguucgugcucuuuugcgcuuucaccgcacuuaaagccgacacaaucugugucggcuaccacgcgaacaauagcacugauacgguugacaccauucuggaaaagaacgugacaguaacucauuccgugaauuuguuagagaacucucacaaugggaaacugugcucacuaaacggaaagauaccccuccagcuggguaauuguaacgucgcuggcuggauccuugggaauccuaaaugcgaucuguugcucaccgccaacaguuggagcuauauuaucgaaacauccaauucuaagaacggagcauguuacccaggcgaguuugccgacuaugaagaacugaaggagcaacugucgaccgugaguagcuucgaaagauuugagauuuucccgaaagcuacuucauggcccaaucaugauacaaccagggguacgacuguugcaugcucccacucuggggccaacagcuuuuaccggaaucucuuauggaucgugaagaaaggaaacuccuauccuaagcugucaaaaaguuacaccaacaauaagggcaaggaaguccuugugauauggggcguacaucacccacccacagacagcguucagcagacuuuguaucagaacaaucacaccuacgugucugucggguccucaaaauacuauaagcgcuucacaccugagaucguggcucgaccaaaagugcgugagcaagccggaagaaugaacuacuauuggacccugcuagaucagggugacacgauuacuuuugaagcgacaggcaaucucaucgcacccuggcaugccuucgcucugaagaaagggagcaguucuggaauuaugagguccgaugcccagguccacaacuguaccacuaagugccagacaccucauggcgcacuuaaagguaaucugccauuucaaaacguucacccggugaccaucggggagugucccaaguacguaaagagcacgcaguugcggauggcuaccggacuccgcaauauaccuucgauucagucuagaggccuguucggcgccaucgcgggguuuauugaaggagguuggacaggcaugguggacgggugguauggauaccaccauaggaacgagcagggcuccgguuaugccgcagaucaaaaaucaacucagaucgcuaucgacgggauuaguaauaaggucaacagcgugauagagaaaaugaauauccaguucaccuccguuggcaaggaguucaacucuuuagagaaacggauggaaaaucugaacaagaagguggaugacggauuucucgacgucuggacauacaacgccgagcuucugauuuugcuagaaaaugagcgcacucuggauuuccacgaccucaacgugaaaaaucuguacgaaaagguaaaaagccaacuucgaaacaaugcuaaggagaucggcaacgggugcuuugaguucuaucauaaaugugauaaugaaugcauggagucaguuaagaacggaaccuacaauuaucugaaguacagugaagaguccaaauugaacagagaagagauagacggugugaagcucgagagcaugggcauucaccagauccuggccaucuauucuacagucgcaucaaguuuagugcugcuagucagccucggggccauuuccuuuuggaugugcucuaauggaucgcugcaguguagggugugcaucuga

SEQ ID NO: 136189 - RNA, 1698 nt, Artificial Sequence; identical to SEQ ID NO: 131326
  derived and/or modified CDS sequence (opt3) from hemagglutinin__InfluenzaA__AEX92873

SEQ ID NO: 136190 - RNA, 1701 nt, Artificial Sequence; identical to SEQ ID NO: 131881
  derived and/or modified CDS sequence (opt3) from hemagglutinin__InfluenzaA__AEY69088

SEQ ID NO: 136191 - RNA, 1701 nt, Artificial Sequence; identical to SEQ ID NO: 131478
  derived and/or modified CDS sequence (opt3) from hemagglutinin__InfluenzaA__AEY69098

SEQ ID NO: 136192 - RNA, 1701 nt, Artificial Sequence; identical to SEQ ID NO: 131459
  derived and/or modified CDS sequence (opt3) from hemagglutinin__InfluenzaA__AEY69120

SEQ ID NO: 136193 - RNA, 1701 nt, Artificial Sequence; identical to SEQ ID NO: 131661
  derived and/or modified CDS sequence (opt3) from hemagglutinin__InfluenzaA__AEY69131

SEQ ID NO: 136194 - RNA, 1701 nt, Artificial Sequence; identical to SEQ ID NO: 135036
  derived and/or modified CDS sequence (opt3) from hemagglutinin__InfluenzaA__AEY69153

SEQ ID NO: 136195 - RNA, 1701 nt, Artificial Sequence; identical to SEQ ID NO: 131661
  derived and/or modified CDS sequence (opt3) from hemagglutinin__InfluenzaA__AEY69164

SEQ ID NO: 136196 - RNA, 1701 nt, Artificial Sequence; identical to SEQ ID NO: 131661
  derived and/or modified CDS sequence (opt3) from hemagglutinin__InfluenzaA__AEY69175

SEQ ID NO: 136197 - RNA, 1701 nt, Artificial Sequence; identical to SEQ ID NO: 131661
  derived and/or modified CDS sequence (opt3) from hemagglutinin__InfluenzaA__AEY69186

SEQ ID NO: 136198 - RNA, 1701 nt, Artificial Sequence; identical to SEQ ID NO: 131661
  derived and/or modified CDS sequence (opt3) from hemagglutinin__InfluenzaA__AEY69197

SEQ ID NO: 136199 - RNA, 1701 nt, Artificial Sequence; identical to SEQ ID NO: 131661
  derived and/or modified CDS sequence (opt3) from hemagglutinin__InfluenzaA__AEY69208

SEQ ID NO: 136200 - RNA, 1701 nt, Artificial Sequence; identical to SEQ ID NO: 131661
  derived and/or modified CDS sequence (opt3) from hemagglutinin__InfluenzaA__AEY69219

SEQ ID NO: 136201 - RNA, 1701 nt, Artificial Sequence; identical to SEQ ID NO: 131459
  derived and/or modified CDS sequence (opt3) from hemagglutinin__InfluenzaA__AEY69258

SEQ ID NO: 136202 - RNA, 1701 nt, Artificial Sequence; identical to SEQ ID NO: 131661
  derived and/or modified CDS sequence (opt3) from hemagglutinin__InfluenzaA__AEY69269

SEQ ID NO: 136203 - RNA, 1701 nt, Artificial Sequence; identical to SEQ ID NO: 131459
  derived and/or modified CDS sequence (opt3) from hemagglutinin__InfluenzaA__AEY69291

SEQ ID NO: 136204 - RNA, 1701 nt, Artificial Sequence; identical to SEQ ID NO: 131459
  derived and/or modified CDS sequence (opt3) from hemagglutinin__InfluenzaA__AEY69302

SEQ ID NO: 136205 - RNA, 1701 nt, Artificial Sequence; identical to SEQ ID NO: 131459
  derived and/or modified CDS sequence (opt3) from hemagglutinin__InfluenzaA__AEY69313

SEQ ID NO: 136206 - RNA, 1701 nt, Artificial Sequence; identical to SEQ ID NO: 131459
  derived and/or modified CDS sequence (opt3) from hemagglutinin__InfluenzaA__AEY69785

SEQ ID NO: 136207 - RNA, 1701 nt, Artificial Sequence
  derived and/or modified CDS sequence (opt3) from hemagglutinin__InfluenzaA__AEY69807
augaagaccaucauugcccugagcuacauacucugccuuguguucgcucagaaacugcccggcaacgacaauuccacagcaacuuuguguuuagggcaccaugccgucccuaacggaacgaucguuaagaccauuacaaaugaucaaaucgaggugacuaacgcgaccgaacugguacagucuucaaguacaggugagauuugcgacagcccacaccagauccuagauggcaaaaauuguacccucauagacgcucugcuuggggauccgcagugcgacggacugcaaaacaagaaaugggauuuguuuguggaaagauccaaggccuauucuaauuguuaccccuaugacgucccugauuacgcaucgcucaggucacugguggccagcaguggcacucuggaguucaacaaugaauccuuuaacuggacagguguuacccagaaugggacgucuagcgcuugcauccggcgcuccaagaacucauucuuuagucgacucaauugguuaacucaucugaacuucaaauauccagcacuuaaugugaccaugcccaacaacgagcaguuugacaaguuguacauuuggggaguccaccauccuggcacagauaaagaccagaucuuccuguaugcccaagcuagcggccguauuacugugucuaccaagagaucccagcagacagccaucccaaauauagggucaaggccccggguacgcaacauuccuagcagaaucaguauuuacuggaccaucguuaaaccaggagauauccuacucauuaauucuacggguaaccugauagcgccgaggggcuacuuuaaacuucgguccggaaagagcucgaucaugcgcucugacgcacccauugggaaauguaauuccgagugcaucacuccuaacggcucaauaccaaaugacaagcccuuccagaacgugaaucgaauuacauauggugccuguccuagauacgucaaacaaaacacccugaaguuggcuacugggaugaggaaugugccagaaaaacagacacggggaaucuuuggcgccaucgcaggcuucauugagaacgggugggaaggaaugguggaugguugguauggcuuucgucaccagaauagugaggggcgcggacaagcugccgaccucaagagcacccaggcggccaucgaucagauuaacggcaaacugaauagauuaauagguaagacgaacgagaaguuccaccagaucgaaaaagaguucuccgaagucgaggggaggauucaagaccuggaaaaguacguugaggauaccaaaaucgaccucuggucuuauaacgcagagcuucugguggcuuuggaaaaucagcauacaaucgaucuaacugacagcgagaugaacaagcuguuugaaaagaccaagaagcagcuccgggagaaugccgaagauaugggcaacggaugcuucaaaauuuaccacaagugugacaaugcuugcauaggcucaauccgaaacgggacauaugaucaugacguauaccgcgacgaggcccugaauaacagauuucagauuaaaggaguggagcuuaagagugguuacaaagauuggauccuguggauuuccuucgcaaucagcugcuuuuugcucugugucgcccuguuaggcuucauaaugugggcuugccaaaaggggaauaucagguguaacauuugcaucuga

SEQ ID NO: 136208 - RNA, 1701 nt, Artificial Sequence; identical to SEQ ID NO: 131661
  derived and/or modified CDS sequence (opt3) from hemagglutinin__InfluenzaA__AEY69818

SEQ ID NO: 136209 - RNA, 1701 nt, Artificial Sequence; identical to SEQ ID NO: 131661
  derived and/or modified CDS sequence (opt3) from hemagglutinin__InfluenzaA__AEY69829

SEQ ID NO: 136210 - RNA, 1701 nt, Artificial Sequence; identical to SEQ ID NO: 131661
  derived and/or modified CDS sequence (opt3) from hemagglutinin__InfluenzaA__AEY69840

SEQ ID NO: 136211 - RNA, 1701 nt, Artificial Sequence; identical to SEQ ID NO: 131661
  derived and/or modified CDS sequence (opt3) from hemagglutinin__InfluenzaA__AEY69851

SEQ ID NO: 136212 - RNA, 1701 nt, Artificial Sequence; identical to SEQ ID NO: 131661
  derived and/or modified CDS sequence (opt3) from hemagglutinin__InfluenzaA__AEY69873

SEQ ID NO: 136213 - RNA, 1701 nt, Artificial Sequence; identical to SEQ ID NO: 131661
  derived and/or modified CDS sequence (opt3) from hemagglutinin__InfluenzaA__AEY69884

SEQ ID NO: 136214 - RNA, 1701 nt, Artificial Sequence; identical to SEQ ID NO: 131661
  derived and/or modified CDS sequence (opt3) from hemagglutinin__InfluenzaA__AEY69895

SEQ ID NO: 136215 - RNA, 1701 nt, Artificial Sequence; identical to SEQ ID NO: 135036
  derived and/or modified CDS sequence (opt3) from hemagglutinin__InfluenzaA__AEY69906

SEQ ID NO: 136216 - RNA, 1701 nt, Artificial Sequence; identical to SEQ ID NO: 131661
  derived and/or modified CDS sequence (opt3) from hemagglutinin__InfluenzaA__AEY69917

SEQ ID NO: 136217 - RNA, 1701 nt, Artificial Sequence
  derived and/or modified CDS sequence (opt3) from hemagglutinin__InfluenzaA__AEY69939
augaagaccaucauugcccugagcuacauacucugccuuguguucgcucagaaaauccccggcaacgacaauuccacagcaacucuguguuuggggcaccaugccgucccuaacggaacgauuguuaagaccaucacaaaugaucaaauugaggugacuaacgcgaccgaauuaguacagucuucaaguacaggugagaucugcgacagcccacaccagauacuggauggcaaaaauuguacccuaaucgacgcucuccugggggauccgcagugcgacggauuucaaaacaagaaaugggaucuuuucguggaaagauccaaggccuauucuaauuguuaccccuaugacgucccugauuacgcaucgcugaggucauugguggccagcaguggcacucucgaguuuaacaaugaauccuucaacuggacagguguuacccagaaugggacgucuagcgcuugcauucggcgcuccaagaacucauuuuucagucgacugaauuggcugacucaucucaacuuuaaauauccagcauuaaaugugaccaugcccaacaacgagcaguucgacaagcuguacaucuggggaguccaccauccuggcacagauaaagaccagauuuuucuuuaugcccaagcuagcggccguaucacugugucuaccaagagaucccagcagacagccauaccaaauauugggucaaggccccggguacgcaacaucccuagcagaauuaguaucuacuggaccaucguuaaaccaggagauauuuugcugauaaauucuacggguaaccuaaucgcgccgaggggcuacuucaagauucgguccggaaagagcucgaucaugcgcucugacgcacccauagggaaauguaauuccggcugcauuacuccuaacgguucaaucccaaaugacaagcccuuucagaacgugaaucgaaucacauauggggucuguccuagauacgugaaacaaaacacccucaagcuggccacuggaaugaggaaugugccagagaaacagacacggggcauuuucggcgcuaucgccggguuuauugaaaacggaugggaggguauggucgauggcugguauggguuccgucaccagaauagugaaggacgcggccaagcagcugaccuuaagagcacccaggccgcgauagaucagaucaacgguaaacugaauagauugauugggaagacgaacgagaaguuccaccagaucgagaaagaauuuuccgagguugaaggcaggauccaagaccucgagaaguacguggaagauaccaaaauugaccuguggucuuauaacgccgaguuacugguagcacucgagaaucagcauacaauagaucuuacugacagcgaaaugaacaagcuguucgagaaaaccaagaagcaguugcgggaaaaugcugaggauaugggaaacggcugcuuuaaaaucuaccacaagugugacaaugccugcauugggucaauccgaaacggaacauaugaucaugacguguaccgcgacgaagcucuaaauaacagauuccagauuaaaggugucgagcugaagaguggcuacaaagauugguuucucuggaucuccuucgccauaagcugcuuucugcuuuguguggcacuguugggguucaucaugugggccugccaaaagggaaauauuagguguaacaucugcauuuga

SEQ ID NO: 136218 - RNA, 1701 nt, Artificial Sequence; identical to SEQ ID NO: 136217
  derived and/or modified CDS sequence (opt3) from hemagglutinin__InfluenzaA__AEY69950

SEQ ID NO: 136219 - RNA, 1701 nt, Artificial Sequence; identical to SEQ ID NO: 136217
  derived and/or modified CDS sequence (opt3) from hemagglutinin__InfluenzaA__AEY69961

SEQ ID NO: 136220 - RNA, 1701 nt, Artificial Sequence
  derived and/or modified CDS sequence (opt3) from hemagglutinin__InfluenzaA__AEY69994
augaagaccaucauugcccugagcuacauacucugccuuguguucgcucagaaaauccccggcaacgacaauuccacagcaacucuguguuuggggcaccaugccgucccuaacggaacgauuguuaagaccaucacaaaugaucaaauugaggugacuaacgcgaccgaauuaguacagucuucaaguacaggugagaucugcgacagcccacaccagauacuggauggcaaaaauuguacccuaaucgacgcucuccugggggauccgcagugcgacggauuucaaaacaagaaaugggaucuuuucguggaaagauccaaggccuauucuaauuguuaccccuaugacgucccugauuacgcaucgcugaggucauugguggccagcaguggcacucucgaguuuaacaaugaauccuucaacuggacagguguuacccagaaugggacgucuagcgcuugcauucggcgcuccaagaacucauuuuucagucgacugaauuggcugacucaucucaacuuuaaauauccagcauuaaaugugaccaugcccaacaacgagcaguucgacaagcuguacaucuggggaguccaccauccuggcacagauaaagaccagauuuuucuuuaugcccaagcuagcggccguaucacugugucuaccaagagaucccagcagacagccauaccaaauauugggucaaggccccggguacgcaacaucccuagcagaauuaguaucuacuggaccaucguuaaaccaggagauauuuugcugauaaauucuacggguaaccuaaucgcgccgaggggcuacuucaagauucgguccggaaagagcucgaucaugcgcucugacgcacccauagggaaauguaauuccggcugcauuacuccuaacgguucaaucccaaaugacaagcccuuucagaacgugaaucgaaucacauauggggccuguccuagauacgucaaacaaaacacccucaagcuggcuacuggaaugaggaaugugccagagaaacagacacggggcauuuucggcgccaucgcaggguuuauugaaaacggaugggaggguaugguggauggcugguauggguuccgucaccagaauagugaaggacgcggccaagcugccgaccuuaagagcacccaggcggccauagaucagaucaacgguaaacugaauagauugauugggaagacgaacgagaaguuccaccagaucgagaaagaauuuuccgaggucgaaggcaggauccaagaccucgagaaguacguugaagauaccaaaauugaccuguggucuuauaacgcagaguuacugguggcucucgagaaucagcauacaauagaucuuacugacagcgaaaugaacaagcuguucgagaaaaccaagaagcaguugcgggaaaaugccgaggauaugggaaacggcugcuuuaaaaucuaccacaagugugacaaugcuugcauugggucaauccgaaacggaacauaugaucaugacguauaccgcgacgaagcccuaaauaacagauuccagauuaaagguguggagcugaagaguggcuacaaagauugguuucucuggaucuccuucgcaauaagcugcuuucugcuuugugucgcccuguugggguucaucaugugggcuugccaaaagggaaauauuagguguaacaucugcauuuga

SEQ ID NO: 136221 - RNA, 1701 nt, Artificial Sequence; identical to SEQ ID NO: 136220
  derived and/or modified CDS sequence (opt3) from hemagglutinin__InfluenzaA__AEY70005

SEQ ID NO: 136222 - RNA, 1701 nt, Artificial Sequence; identical to SEQ ID NO: 131661
  derived and/or modified CDS sequence (opt3) from hemagglutinin__InfluenzaA__AEY70016

SEQ ID NO: 136223 - RNA, 1701 nt, Artificial Sequence
  derived and/or modified CDS sequence (opt3) from hemagglutinin__InfluenzaA__AEY70256
augaagaccaucauugcccugagcuacauacucugccuuguguucgcucagaaacugcccggcaacgacaauuccacagcaacuuuguguuuagggcaccaugccgucccuaacggaacgaucguuaagaccauuacaaaugaucaaaucgaggugacuaacgcgaccgaacugguacagucuucaaguacaggugagauuugcgacagcccacaccagauccuagauggcaaaaauuguacccucauagacgcucugcuuggggauccgcagugcgacggauuucaaaacaagaaaugggaucuguucguggaaagauccaaggccuauggcaauuguuaccccuaugacgucccugauuacgcaucuuugaggucgcucguggccucaagcgguacucuggaguuuaacaaugaaaguuucaacuggacagggguuacccagaauggaacguccucugcuugcauccggcgcagcaagaacuccuuuuucucacgacugaauuggcucacucauuuaaacuuuaaauauccagcacugaaugugaccaugcccaacaacgagcaguucgacaaacuuuacauuuggggcguccaccauccuggcacagauaaagaccagaucuuuuuguaugcccaagcuagugggcguauuacugugagcaccaagagaucucagcagacagccaucccaaauauaggauccaggccccggguacgcaacauuccuucaagaaucagcauuuacuggaccaucguuaaaccaggugauaugcugcuaaucaauaguacgggcaaccucauugcgccgaggggguacuucaagauacggucuggaaaguccagcaucaugcgcucggacgcacccauuggcaaauguaauucugagugcaucacuccuaacgguuccauaccaaaugacaagcccuuucagaacgugaaucgaauuacauauggggccuguccuagauacgucaaacaaaacacccugaaacuugcuacuggaaugaggaaugugccagaaaagcagacacggggcaucuucggcgccaucgcaggguuuauugagaacggaugggaagguaugguggauggcugguauggguuccgucaccaaaauucagagggacgcggccaggcugccgaccugaagaguacccaggcggccaucgaucagauuaacgguaaauugaauagacucauagggaagacgaacgagaaguuccaccagaucgaaaaagaguuuagcgaagucgagggcaggauucaagaccuggaaaaguacguugaggauaccaaaaucgacuuaugguccuauaacgcagagcugcucguggcucuugaaaaucagcauacaaucgaucugacugacucugagaugaacaaguuguucgaaaagaccaagaagcagcuacgggagaaugccgaagauaugggaaacggcugcuuuaaaauuuaccacaagugugacaaugcuugcauagggagcauccgaaacggaacauaugaucaugacguauaccgcgacgaggcccugaauaacagauuccagauuaaagguguggagcucaagucaggcuacaaagauuggauccuguggauuaguuuugcaaucuccugcuuccuucugugugucgccuugcucggguuuauaaugugggcuugccaaaagggaaauaucagguguaacauuugcaucuga

SEQ ID NO: 136224 - RNA, 1701 nt, Artificial Sequence; identical to SEQ ID NO: 131661
  derived and/or modified CDS sequence (opt3) from hemagglutinin__InfluenzaA__AEY70267

SEQ ID NO: 136225 - RNA, 1701 nt, Artificial Sequence; identical to SEQ ID NO: 131661
  derived and/or modified CDS sequence (opt3) from hemagglutinin__InfluenzaA__AEY70278

SEQ ID NO: 136226 - RNA, 1701 nt, Artificial Sequence; identical to SEQ ID NO: 131459
  derived and/or modified CDS sequence (opt3) from hemagglutinin__InfluenzaA__AEY70289

SEQ ID NO: 136227 - RNA, 1701 nt, Artificial Sequence; identical to SEQ ID NO: 131661
  derived and/or modified CDS sequence (opt3) from hemagglutinin__InfluenzaA__AEY70300

SEQ ID NO: 136228 - RNA, 1701 nt, Artificial Sequence; identical to SEQ ID NO: 131661
  derived and/or modified CDS sequence (opt3) from hemagglutinin__InfluenzaA__AEY70311

SEQ ID NO: 136229 - RNA, 1701 nt, Artificial Sequence; identical to SEQ ID NO: 131661
  derived and/or modified CDS sequence (opt3) from hemagglutinin__InfluenzaA__AEY70333

SEQ ID NO: 136230 - RNA, 1701 nt, Artificial Sequence; identical to SEQ ID NO: 136220
  derived and/or modified CDS sequence (opt3) from hemagglutinin__InfluenzaA__AEY70344

SEQ ID NO: 136231 - RNA, 1701 nt, Artificial Sequence; identical to SEQ ID NO: 133272
  derived and/or modified CDS sequence (opt3) from hemagglutinin__InfluenzaA__AEY70355

SEQ ID NO: 136232 - RNA, 1701 nt, Artificial Sequence; identical to SEQ ID NO: 131459
  derived and/or modified CDS sequence (opt3) from hemagglutinin__InfluenzaA__AEY70365

SEQ ID NO: 136233 - RNA, 1701 nt, Artificial Sequence; identical to SEQ ID NO: 131661
  derived and/or modified CDS sequence (opt3) from hemagglutinin__InfluenzaA__AEY70376

SEQ ID NO: 136234 - RNA, 1701 nt, Artificial Sequence
  derived and/or modified CDS sequence (opt3) from hemagglutinin__InfluenzaA__AFB18656
augaaggccauccuggugguccuccuuuacaccuucgcuacagcaaacgccgacacucugugcauuggcuaucacgcgaauaacagcacggauaccguugacacaguguuggagaaaaauguaacugugacccauuccgucaacuuacuggaagauaagcacaaugggaaacuauguaagcucagaggaguggcuccccugcaucuugguaaaugcaacauagccggcuggauccuggggaauccugagugugaaacauugucuaccgcaucaaguuggagcuacauuguugagacuuccucuucggacaacggaacaugcuauccaggcgauuuuaucgacuacgaagaacucagggagcagcugucaagcgugaguuccuucgaacgguuugagauuuucccgaagaccucuagcuggcccaaucacgauuccaacaagggugucacggccgcuuguccucaugcaggggccaaaggauuuuauaagaaucugaucuggcucgugaaaaagggcaacucauacccaaaauuaaguaagagcuauauaaaugacaagggcaaagaaguacugguucuuugggggauccaccaccccucuacuaccgcugaucaacaguccuuguaccagaacgccgacacauacguguucgucggaacuucacgcuauagcaagaaauuuaagccugagauugcgauccgaccaaaagugcgugaucaggaggguagaaugaauuacuauuggacccugguggaacccggcgacaagauuacauucgaggcaaccgggaaccuagucguuccuagguacgccuuugcuauggaacgggaugccggaaguggcaucauaauuucugacacgccagugcaugacugcaacacuacaugucaaaccccgaaaggugcaaucaauacuucccuccccuuccagaacauucacccuaucacaaucgggaagugcccaaaguauguaaaaagcaccaagcugcgccuugcuacgggacugagaaaugugcccucgauucagucuaggggcuuguuuggcgccauagcgggguucaucgagggagguuggaccggcauggucgaugggugguacggauaucaucaccagaacgaacaaggcuccgguuacgccgcagaccucaaaucaacacagaaugcuauugauaagaucacuaacaaagugaauaguguuauagagaagaugaacacccaguuuacagccguggggaaggaguucaaucaccuggaaaaacggauugagaacuuaaauaagaaagucgacgauggcuuccuggacaucuggacuuacaacgcugaacuccuugugcuguuggagaaugaacgcacccuagauuaucaugacagcaacguaaagaaucuguacgagaaaguucgaaaccagcucaagaacaaugccaaggagaucggaaacggcuguuuugaguucuaucacaaaugcgauaauacauguauggaguccgugaagaacgggaccuacgacuauccuaaauacucugaagaggcaaagcugaauagagaagagauugauggagucaaacuugagagcacuaggaucuaucaaauucuggccauauacucaacggcugcgaguuccuuggugcucgucgugagccugggugcaaucucuuuuuggaugugcucaaacggcaguuuacagugccggauuuguaucuga

SEQ ID NO: 136235 - RNA, 1701 nt, Artificial Sequence; identical to SEQ ID NO: 135098
  derived and/or modified CDS sequence (opt3) from hemagglutinin__InfluenzaA__AFB40597

SEQ ID NO: 136236 - RNA, 1701 nt, Artificial Sequence; identical to SEQ ID NO: 135098
  derived and/or modified CDS sequence (opt3) from hemagglutinin__InfluenzaA__AFB40598

SEQ ID NO: 136237 - RNA, 1701 nt, Artificial Sequence
  derived and/or modified CDS sequence (opt3) from hemagglutinin__InfluenzaA__AFB40599
augaaggccauccuggugguccuccuuuacaccuucgcuacagcaaacgccgacacucugugcauuggcuaucacgcgaauaacagcacggauaccguugacacaguguuggagaaaaauguaacugugacccauuccgucaacuuacuggaagauaagcacaaugggaaacuauguaagcucagaggaguggcuccccugcaucuugguaaaugcaacauagccggcuggauccuggggaauccugagugugaaucuuugucaacagcaaguagcugguccuacauuguugagaccucuucgucagacaacggaacuugcuauccaggcgauuuuaucgacuacgaggagcucagggagcagcugagcaguguguccucuuucgaacgguuugagauuuucccgaagacaagcuccuggcccaaucacgaucugaacaagggugucaccgccgcuuguccucaugcaggggccaaaucauuuuauaagaaucucaucugguuagugaaaaagggaaacaguuacccaaaacugagcaagucuuauauaaaugacaagggcaaagaaguacuuguuuuguggggcauccaccaccccuccacgucagcugaucaacagagccuguaccagaacgccgacgcguacguguucgucgggaccagucgcuauucuaagaaauuuaagccugagauugcaauccgaccaaaagugcgugaucaggagggaagaaugaauuacuauuggacucuaguggaacccggugacaagauuacauucgaggccacuggcaaccucgucguuccuagguacgcuuuugccauggaacggaacgcaggguccggaaucauaauuagcgauaccccagugcaugacugcaauacaaccugucaaacgccgaaaggcgcuaucaacacuucgcugcccuuccagaauauucacccuaucacaaucgguaagugcccaaaguauguaaaaucuaccaagcugcgccuugccacuggguugagaaacgugcccuccauucagucaaggggacucuuuggcgcgauagccggcuucaucgaagggggauggacagguauggucgacggcugguacggguaucaucaccagaaugaacaaggaaguggcuacgcagcugaucugaaaagcacccagaacgccauugacaagaucacgaauaaagugaacuccguuauagagaagaugaauacccaguuuacagcuguggguaaggaguucaaccacuuagaaaaacggauugagaaucugaacaagaaagucgaugacggguuccucgauaucuggacuuacaaugccgaacuucugguguugcuagagaacgaacgcacccuggacuaucaugauucuaauguaaagaaccucuacgagaaaguucgaagccagcugaagaacaaugcaaaggagaucggcaacggauguuuugaguucuaucacaaaugcgacaauacauguauggaaucagugaagaacggcacuuacgauuauccuaaauacagugaagaggccaaacuuaauagagaagagauugacggggucaagcuggaguccaccaggaucuaucaaauuuuggcuauauacagcacaguggcgucuucacucguccuggugguuaguuuaggagcaaucagcuuuuggaugugcuccaacgguucucugcagugccggauuuguaucuga

SEQ ID NO: 136238 - RNA, 1701 nt, Artificial Sequence; identical to SEQ ID NO: 131881
  derived and/or modified CDS sequence (opt3) from hemagglutinin__InfluenzaA__AFB40600

SEQ ID NO: 136239 - RNA, 1701 nt, Artificial Sequence
  derived and/or modified CDS sequence (opt3) from hemagglutinin__InfluenzaA__AFB40601
augaaggccauccuggugguccuccuuuacaccuucgcuacagcaaacgccgacacucugugcauuggcuaucacgcgaauaacagcacggauaccguugacacaguguuggagaaaaauguaacugugacccauuccgucaacuuacuggaagauaagcacaaugggaaacuauguaagcucagaggaguggcuccccugcaucuugguaaaugcaacauagccggcuggauccuggggaauccugagugugaaucuuugucaacagcaaguagcugguccuacauuguugagaccucuucgucagacaacggaacuugcuauccaggcgauuuuaucgacuacgaagaacucagggagcagcugagcaguguguccucuuucgaacgguuugagauuuucccggaaacaagcuccuggcccaaucacgauucaaacaagggugucaccgccgcuuguccucaugcaggggccaagaguuuuuauaaaaaucugaucuggcucgugaagaaaggaaacagcuacccaaaguuaucuaaauccuauauaaaugacaagggcaaggagguacugguucuuuggggcauccaccaccccucaacgagcgcugaucaacagaguuuguaccagaacgccgacgcguacguguucgucgggacuucucgcuauuccaaaaaguuuaaaccugagauugcaauccgaccaaaggugcguggacaggaagguagaaugaauuacuauuggacccugguggagcccggcgauaaaauuacauucgaagccacugggaaccuagucguuccuagguacgcuuuugccauggagcggaacgcaggaagcggcaucauaauuucggacaccccagugcaugauugcaauacaaccugucaaacgccgaagggugcuaucaacacuucucuccccuuccagaauauucacccuaucacaaucgggaaaugcccaaaguauguaaaguccaccaaacugcgccuugccacuggacugagaaacgugcccucaauucagaguaggggcuuguuuggcgcgauagccggguucaucgaaggagguuggacaggcauggucgacgggugguacggauaucaucaccagaaugagcaaggcagcgguuacgcagcugaccucaaguccacccagaacgccauugaugagaucacgaauaaagugaacucuguuauagaaaagaugaauacccaguuuacagcuguggggaaagaguucaaccaccuggaaaagcggauugagaauuuaaacaagaaagucgacgauggcuuccuggacaucuggacuuacaaugccgaacuccuugugcuguuggagaacgagcgcacccuagauuaucaugacagcaauguaaagaaccuguacgaaaaaguucgaucacagcucaagaacaaugcaaaagagaucggaaacggcuguuuugaguucuaucacaagugcgauaauacauguauggagagugugaagaacgggacuuacgacuauccuaaauacuccgaagaggccaagcugaauagagaggaaauugauggagucaaacuugagagcaccaggaucuaucaaauucuggcuauauacucuacaguggcgucaaguuugguccucgugguuagccugggugcaaucuccuuuuggaugugcucuaacggcucguuacagugccggauuuguaucuga

SEQ ID NO: 136240 - RNA, 1701 nt, Artificial Sequence; identical to SEQ ID NO: 130717
  derived and/or modified CDS sequence (opt3) from hemagglutinin__InfluenzaA__AFB40602

SEQ ID NO: 136241 - RNA, 1701 nt, Artificial Sequence; identical to SEQ ID NO: 131881
  derived and/or modified CDS sequence (opt3) from hemagglutinin__InfluenzaA__AFB40603

SEQ ID NO: 136242 - RNA, 1701 nt, Artificial Sequence
  derived and/or modified CDS sequence (opt3) from hemagglutinin__InfluenzaA__AFB40604
augaaggccauccuggugguccuccuuuacaccuucgcuacagcaaacgccgacacucugugcauuggcuaucacgcgaauaacagcacggauaccguugacacaguguuggagaaaaauguaacugugacccauuccgucaacuuacuggaagauaagcacaaugggaaacuauguaagcucagaggaguggcuccccugcaucuugguaaaugcaacauagccggcuggauccuggggaauccugagugugaaucuuugucaacagcaaguagcugguccuacauuguugagaccucuucgucagacaacggaacuugcuauccaggcgauuuuaucgacuacgaagaacucagggagcagcugagcaguguguccucuuucgaacgguuugagauuuucccgaagacaagcuccuggcccaaucacgauucaaacaagggugucaccgccgcuuguccucaugcaggggccaaaaguuuuuauaagaaucugaucuggcucgugaaagaaggaaacagcuacccaaaguuaucuaaauccuauauaaaugacaagggcaaggagguacugguucuuuggggcauccaccaucccccuacgacugcugaucaacagucauuguaccagaacgccgacaccuacguguucgucgggacaagccgcuauaguaaaaaguuuaaaccagagauugcgauccgacccaaggugcgugaucaggaaggaagaaugaauuacuauuggacucugguggagccuggugacaaaauuaccuucgaagcaacaggcaaccuagucguuccaagguacgccuuugcuauggagcggaacgccgggucuggaaucauaauuuccgauaccccggugcacgacugcaauacgacuugucaaacacccaagggcgcaaucaacaccagccucccuuuccagaauauucacccaaucacuaucgguaaaugccccaaguauguaaagucgacaaaacugcgccuugcuaccgggcugagaaacgugccuucuauucaguccaggggauuguuuggcgccauagcgggcuucaucgaagggggauggacggguauggucgacggcugguacggguaucaucaccagaaugagcaaggaucaggcuacgccgcagaucucaagaguacccagaacgcuauugacaaaaucacaaauaaggugaacagcguuauagagaaaaugaauacucaguuuaccgccguggauaaggaguucaaccaccuggagaagcggauugguaauuuaaacaaaaaggucgacgauggguuccuggacaucuggacauacaaugcugaacuccuugugcuguuggagaacgaacgcacucuagauuaucaugacuccaauguaaagaaccuguacgagaagguucgaaaccagcucaaaaauaacgccaaggagaucggcaauggauguuuugaguucuaucacaagugcgauaacaccuguauggaaucugugaaaaauggcacauacgacuauccaaaguacagcgaagaggcaaaacugaacagagaagagauugauggggucaaacuugagucaaccaggaucuaucaaauucuggccauauacaguacuguggcuuccagcuugguccucgugguuucucugggagcgaucucauuuuggaugugcaguaaugguagcuuacagugccggauuuguaucuga

SEQ ID NO: 136243 - RNA, 1701 nt, Artificial Sequence; identical to SEQ ID NO: 130717
  derived and/or modified CDS sequence (opt3) from hemagglutinin__InfluenzaA__AFB70138

SEQ ID NO: 136244 - RNA, 1701 nt, Artificial Sequence
  derived and/or modified CDS sequence (opt3) from hemagglutinin__InfluenzaA__AFB70145
augaaggccauccuggugguccuccuuuacaccuucgcuacagcaaacgccgacacucugugcauuggcuaucacgcgaauaacagcacggauaccguugacacaguguuggagaagaauguaacugugacccauuccgucaacuuacuggaagauaagcacaaugggaaacuauguaagcucagaggaguggcuccccugcaucuugguaaaugcaacauagccggcuggauccuggggaauccugagugugaaucuuugucaacagcaaguagcugguccuacauuguugagaccucuucgucagacaacggaacuugcuauccaggcgauuuuaucgacuacgaggagcucagggagcagcugagcaguguguccucuuucgaacgguuugagauuuucccgaagacaagcuccuggcccaaucacgauucaaacaaggguaucaccgccgcuuguccucaugcaggggccaaaaguuuuuauaagaaucugauauggcucgucaaaaagggaaacagcuacccaaaauuaucuaaguccuauaucaaugacaagggcaaagaagugcugguacuuuggggcauucaccaccccucaacgagcgcugaucaacagaguuuguaccagaacgccgacgcguacguuuucguggggacuucucgcuauuccaagaaauuuaagccugagaucgcaauucgaccaaaaguccgugaucaggagggaagaaugaauuacuauuggacccugguggaacccggugacaagaucacauucgaggccacuggcaaccuaguggucccuagguacgcuuuugccauggaacggaacgcagggagcggaauaauuaucucggauaccccaguucaugacugcaauacaaccugucaaacgccgaaaggcgcuauuaacacuucucuccccuuccagaauauccacccuaucacaauugguaagugcccaaaguaugugaaauccaccaagcugcgccuugccacugggcugagaaacguacccucaauacagaguaggggauuguuuggcgcgaucgccggcuucauugaagggggauggacagguaugguggacggcugguacggguaucaucaccagaaugaacaaggaagcggcuacgcagcugaucucaaauccacccagaacgccaucgacgagauaacgaauaaggucaacucugugauugagaaaaugaauacccaguuuacagcuguugguaaggaguucaaccaccuggaaaagcggaucgaaaauuuaaacaaaaagguggaugacggguuccuggauaucuggacuuacaaugccgagcuccuuguccuguuggaaaacgagcgcacccuagacuaucaugauagcaaugugaaaaaccuguacgagaagguacgaucacagcucaaaaacaaugcaaaggaaauuggcaacggauguuuugaguucuaucacaagugcgacaauacauguauggaaaguguuaaaaacggcacuuacgauuauccuaaguacuccgaggaagccaaacugaauagagaggagaucgacggggugaaacuugaaagcaccaggauuuaucaaauacuggcuaucuacucuacagucgcgucaaguuuggugcucgucgugagccugggagcaauuuccuuuuggaugugcucuaacgguucguuacagugccggaucuguaucuga

SEQ ID NO: 136245 - RNA, 1701 nt, Artificial Sequence
  derived and/or modified CDS sequence (opt3) from hemagglutinin__InfluenzaA__AFB70154
augaaggccauccuggugguccuccuuuacaccuucgcuacagcaaacgccgacacucugugcauuggcuaucacgcgaauaacagcacggauaccguugacacaguguuggagaaaaauguaacugugacccauuccgucaacuuacuggaagauaagcacaaugagaaacuauguaagcucagagggguggcuccccugcaucuuggaaaaugcaacauagccgguuggauccugggcaauccugaaugugagucuuugucaacagcaaguagcugguccuacauuguugaaaccucuucgucagacaacgggacuugcuauccaggagauuuuaucgacuacgaggagcucagggaacagcugagcaguguguccucuuucgagcgguuugaaauuuucccgaagacaagcuccuggcccaaucacgauucaaacaagggcgucaccgccgcuuguccucaugccggugcaaaaaguuuuuauaagaaucugaucuggcucgugaaaaaggggaacagcuacccaaaauuaucuaaguccuauauaaaugacaagggaaaagagguacugguucuuuggggcauccaccaccccucaacgagcgcugaucaacagaguuuguaccagaacgccgacgcguacguguucgucggcacuucucgcuauuccaagaaauuuaagccugagauugcaauccgaccaaaagugcgugaucaggaagggagaaugaauuacuauuggacccugguggagcccggagacaagauuacauucgaagccacugguaaccuagucguuccuagguacgcuuuugccauggagcggaacgcaggcagcgggaucauaauuucggauaccccagugcaugacugcaauacaaccugucaaacgccgaaaggagcuaucaacacuucucuccccuuccagaauauucacccuaucacaaucggcaagugcccaaaguauguaaaauccaccaagcugcgccuugccacuggucugagaaacgugcccucaauucagaguaggggguuguuuggagcgauagccggcuucaucgaaggcggguggacaggaauggucgacgguugguacggcuaucaucaccagaaugagcaagggagcggauacgcagcugaucucaaauccacccagaacgccauugacgagaucacgaauaaggugaacucuguuauagaaaagaugaauacccaguuuacagcugugggcaaggaguucaaccaccuggaaaagcggauugagaauuuaaacaaaaaggucgaugacgguuuccuggauaucuggacuuacaaugccgaacuccuugugcuguuggagaacgagcgcacccuagacuaucaugauagcaauguuaaaaaccuguacgaaaagguacgaucacagcucaaaaacaaugcaaaggagaucgggaacggcuguuuugaguucuaucacaagugcgacaauacauguauggaaagugugaaaaacggaacuuacgauuauccuaaguacuccgaagaggccaaacugaauagagaggaaauugacggcgucaaacuugagagcaccaggaucuaucaaauucuggcuauauacucuacaguggcgucaaguuugguccucgugguuagccugggggcaaucuccuuuuggaugugcucuaacggaucguuacagugccggauuuguaucuga

SEQ ID NO: 136246 - RNA, 1701 nt, Artificial Sequence; identical to SEQ ID NO: 130717
  derived and/or modified CDS sequence (opt3) from hemagglutinin__InfluenzaA__AFB70156

SEQ ID NO: 136247 - RNA, 1701 nt, Artificial Sequence; identical to SEQ ID NO: 130717
  derived and/or modified CDS sequence (opt3) from hemagglutinin__InfluenzaA__AFB70158

SEQ ID NO: 136248 - RNA, 1701 nt, Artificial Sequence; identical to SEQ ID NO: 136244
  derived and/or modified CDS sequence (opt3) from hemagglutinin__InfluenzaA__AFB70160

SEQ ID NO: 136249 - RNA, 1701 nt, Artificial Sequence; identical to SEQ ID NO: 131911
  derived and/or modified CDS sequence (opt3) from hemagglutinin__InfluenzaA__AFB70162

SEQ ID NO: 136250 - RNA, 1701 nt, Artificial Sequence
  derived and/or modified CDS sequence (opt3) from hemagglutinin__InfluenzaA__AFB70167
augaaggccauccuggugguccuccuuuacaccuucgcuacagcaaacgccgacacucugugcauuggcuaucacgcgaauaacagcacggauaccguugacacaguguuggagaaaaauguaacugugacccauuccgucaacuuacuggaagauaagcacaaugggaaacuauguaagcucagaggaguggcuccccugcaucuugguaaaugcaacauagccggcuggauccuggggaauccugagugugaaucuuugucaacagcaaguagcugguccuacauuguugagaccucuucgucagacaacggaacuugcuauccaggcgauuuuaucgacuacgaggagcucagggagcagcugagcaguguguccucuuucgaacgguuugagauuuucccgaagacaagcuccuggcccaaucacgauucaaacaagggugucaccgccgcuuguccucaugcaggggccaaaaguuuuuauaagaaucugaucuggcucgugaaaaagggaaacagcuacccaaaauuaucuaaguccuauauaaaugacaagggcaaagaaguacugguucuuuggggcauccaccaccccucaacgagcgcugaucaacagaguuuguaccagaacgccgacgcguacguguucgucgggacuucucgcuauuccaagaaauuuaagccugagauugcaaugcgaccaaaagugcgugaucaggagggaagaaugaauuacuauuggacccugguggaacccggugacaagaucacauucgaggccacuggcaaccuagucguuccuagguacgcuuuugccauggaacggaacgcagggagcggaauuaucauaucggauaccccagugcaugacugcaauacaaccugucaaacgccgaaaggcgcuauuaacacuucucuccccuuccagaauauccacccuauuacaaucgguaagugcccaaaguauguaaaauccaccaagcugcgccuugccacugggcugagaaacgugcccucaauccagaguaggggauuguuuggcgcgauugccggcuucauagaagggggauggacagguauggucgacggcugguacggguaucaucaccagaaugaacaaggaagcggcuacgcagcugaucucaaauccacccagaacgccaucgacgagauuacgaauaaggugaacucuguuaucgagaaaaugaauacccaguuuacagcuguggguaaggaguucaaccaccuggaaaagcggauagaaaauuuaaacaaaaaggucgaugacggguuccuggauauuuggacuuacaaugccgagcuccuugugcuguuggaaaacgagcgcacccuagacuaucaugauagcaauguaaagaaccuguacgagaagguucgaucacagcucaaaaacaaugcaaaggaaaucggcaacggauguuuugaguucuaucacaagugcgacaauacauguauggaaagugugaaaaacggcacuuacgauuauccuaaguacuccgaggaagccaaacugaauagagaggagaucgacggggucaaacuugaaagcaccaggauuuaucaaauccuggcuauuuacucuacaguggcgucaaguuugguccucgugguuagccugggagcaauauccuuuuggaugugcucuaacgguucguuacagugccggaucuguauuuga

SEQ ID NO: 136251 - RNA, 1701 nt, Artificial Sequence; identical to SEQ ID NO: 130717
  derived and/or modified CDS sequence (opt3) from hemagglutinin__InfluenzaA__AFB70177

SEQ ID NO: 136252 - RNA, 1701 nt, Artificial Sequence; identical to SEQ ID NO: 131286
  derived and/or modified CDS sequence (opt3) from hemagglutinin__InfluenzaA__AFB70187

SEQ ID NO: 136253 - RNA, 1701 nt, Artificial Sequence; identical to SEQ ID NO: 131911
  derived and/or modified CDS sequence (opt3) from hemagglutinin__InfluenzaA__AFB70197

SEQ ID NO: 136254 - RNA, 1701 nt, Artificial Sequence; identical to SEQ ID NO: 130717
  derived and/or modified CDS sequence (opt3) from hemagglutinin__InfluenzaA__AFB70207

SEQ ID NO: 136255 - RNA, 1701 nt, Artificial Sequence; identical to SEQ ID NO: 130717
  derived and/or modified CDS sequence (opt3) from hemagglutinin__InfluenzaA__AFB70217

SEQ ID NO: 136256 - RNA, 1701 nt, Artificial Sequence; identical to SEQ ID NO: 130717
  derived and/or modified CDS sequence (opt3) from hemagglutinin__InfluenzaA__AFB70227

SEQ ID NO: 136257 - RNA, 1701 nt, Artificial Sequence
  derived and/or modified CDS sequence (opt3) from hemagglutinin__InfluenzaA__AFB70247
augaaggccauccuggugguccuccuuuacaccuucgcuacagcaaacgccgacacucugugcauuggcuaucacgcgaauaacagcacggauaccguugacacaguguuggagaaaaauguaacugugacccauuccgucaacuuacuggaagauaagcacaaugggaaacuauguaagcucagaggaguggcuccccugcaucuugguaaaugcaacauagccggcuggauccuggggaauccugagugugaaucuuugucaacagcaaguagcugguccuacauuguugagaccucuucgucagacaacggaacuugcuauccaggcgauuuuaucgacuacgaagaacucagggagcagcugagcaguguguccucuuucgaacgguuugagauuuucccgaagacaagcuccuggcccaaucacgauucaaacaagggugucaccgccgcuuguccucaugcaggggccaaaaguuuuuauaagaaucugaucuggcucgugaaaaagggaaacagcuacccaaaauuaucuaaguccuauauaaaugacaagggcaaagaaguacugguucuuuggggcauccaccaccccucaacgagcgcugaucaacagaguuuguaccagaacgccgacgcguacguguucgucgggacuucucgcuauuccaaggaguuuaaaccugagauugcaauccgaccaaaggugcgugaucaggaaggaagaaugaauuacuauuggacccugguggagcccggugacaaaauuacauucgaagccacuggcaaccuagucguuccuagguacgcuuuugccauggagcggaacgcagggagcggaaucauaauuucggauaccccagugcaugacugcaauacaaccugucaaacgccgaagggcgcuaucaacacuucucuccccuuccagaauauucacccuaucacaaucgguaaaugcccaaaguauguaaaguccaccaaacugcgccuugccacugggcugagaaacgugcccucaauucagaguaggggauuguuuggcgcgauagccggcuucaucgaagggggauggacagguauggucgacggcugguacggguaucaucaccagaaugagcaaggaagcggcuacgcagcugaucucaaguccacccagaacgccauugacgagaucacgaauaaagugaacucuguuauagaaaagaugaauacccaguuuacagcuguggguaaagaguucaaccaccuggaaaagcggauugagaauuuaaacaagaaagucgaugacggguuccuggauaucuggacuuacaaugccgaacuccuugugcuguuggagaacgagcgcacccuagacuaucaugauagcaauguaaagaaccuguacgaaaaaguucgaucacagcucaagaacaaugcaaaagagaucggcaacggauguuuugaguucuaucacaagugcgacaauacauguauggagagugugaagaacggcacuuacgauuauccuaaauacuccgaagaggccaagcugaauagagaggaaauugacggggucaaacuugagagcaccaggaucuaucaaauucuggcuauauacucuacaguggcgucaaguuugguccucgugguuagccugggagcaaucuccuuuuggaugugcucuaacgguucguuacagugccggauuuguaucuga

SEQ ID NO: 136258 - RNA, 1701 nt, Artificial Sequence
  derived and/or modified CDS sequence (opt3) from hemagglutinin__InfluenzaA__AFB70257
augaaggccauccuggugguccuccuuuacaccuucgcuacagcaaacgccgacacucugugcauuggcuaucacgcgaauaacagcacggauaccguugacacaguguuggagaaaaauguaacugugacccauuccgucaacuuacuggaagauaagcacaaugggaaacuauguaagcucagaggaguggcuccccugcaucuugguaaaugcaacauagccggcuggauccuggggaauccugagugugaaucuuugucaacagcaaguagcugguccuacauuguugagaccucuucgucagacaacggaacuugcuauccaggcgauuuuguggacuacgaggagcucagggagcagcugagcagugucuccucuuucgaacgguuugagaucuucccgaagacaagcuccuggcccaaucacgauucaaacaagggugugaccgccgcuuguccucaugcaggggccaaaaguuuuuauaagaaucugauuuggcucguaaagaagggaaacagcuacccaaaauuaucuaaguccuauaucaaugacaagggcaaagaaguucuggugcuuuggggcauacaccaccccucaacgagcgcugaucaacagaguuuguaccagaacgccgacgcguacgucuucguggggacuucucgcuauuccaagaaauuuaagccugagaucgcaauucgaccaaaagugcgugaucaggagggaagaaugaauuacuauuggacccuggucgaacccggugacaagaucacauucgaggccacuggcaaccuaguugugccuagguacgcuuuugccauggaacggaacgcagggagcggaauuaucauaucggauaccccaguacaugacugcaauacaaccugucaaacgccgaaaggcgcuauuaacacuucucuccccuuccagaauauccacccuauuacaaucgguaagugcccaaaguaugugaaauccaccaagcugcgccuugccacugggcugagaaacguccccucaauccagaguaggggauuguuuggcgcgauugccggcuucauagaagggggauggacagguaugguggacggcugguacggguaucaucaccagaaugaacaaggaagcggcuacgcagcugaucucaaauccacccagaacgccaucgacgagauuacgaauaagguuaacucugugaucgagaaaaugaauacccaguuuacagcugucgguaaggaguucaaccaccuggaaaagcggauagaaaauuuaaacaaaaagguggaugacggguuccuggauauuuggacuuacaaugccgagcuccuuguacuguuggaaaacgagcgcacccuagacuaucaugauagcaauguuaaaaaccuguacgagaaggugcgaucacagcucaaaaacaaugcaaaggaaaucggcaacggauguuuugaguucuaucacaagugcgacaauacauguauggaaagugucaaaaacggcacuuacgauuauccuaaguacuccgaggaagccaaacugaauagagaggagaucgacggggugaaacuugaaagcaccaggauuuaucaaauccuggcuauuuacucuacagucgcgucaaguuuggugcucguugugagccugggagcaauauccuuuuggaugugcucuaacgguucguuacagugccggaucuguauuuga

SEQ ID NO: 136259 - RNA, 1701 nt, Artificial Sequence; identical to SEQ ID NO: 135124
  derived and/or modified CDS sequence (opt3) from hemagglutinin__InfluenzaA__AFB70267

SEQ ID NO: 136260 - RNA, 1701 nt, Artificial Sequence; identical to SEQ ID NO: 131187
  derived and/or modified CDS sequence (opt3) from hemagglutinin__InfluenzaA__AFB70277

SEQ ID NO: 136261 - RNA, 1701 nt, Artificial Sequence; identical to SEQ ID NO: 130717
  derived and/or modified CDS sequence (opt3) from hemagglutinin__InfluenzaA__AFB70287

SEQ ID NO: 136262 - RNA, 1701 nt, Artificial Sequence; identical to SEQ ID NO: 130717
  derived and/or modified CDS sequence (opt3) from hemagglutinin__InfluenzaA__AFB70297

SEQ ID NO: 136263 - RNA, 1701 nt, Artificial Sequence; identical to SEQ ID NO: 130717
  derived and/or modified CDS sequence (opt3) from hemagglutinin__InfluenzaA__AFB70307

SEQ ID NO: 136264 - RNA, 1701 nt, Artificial Sequence; identical to SEQ ID NO: 136244
  derived and/or modified CDS sequence (opt3) from hemagglutinin__InfluenzaA__AFB70317

SEQ ID NO: 136265 - RNA, 1701 nt, Artificial Sequence
  derived and/or modified CDS sequence (opt3) from hemagglutinin__InfluenzaA__AFB70327
augaaggccauccuggugguccuccuuuacaccuucgcuacagcaaacgccgacacucugugcauuggcuaucacgcgaauaacagcacggauaccguugacacaguguuggagaaaaauguaacugugacccauuccgucaacuuacuggaagauaagcacaaugggaaacuauguaagcucagaggaguggcuccccugcaucuugguaaaugcaacauagccggcuggauccuggggaauccugagugugaaucuuugucaacagcaaguagcugguccuacauuguugagaccucuucgucagacaacggaacuugcuauccaggcgauuuuaucgacuacgaagaacucagggagcagcugagcaguguguccucuuucgaacgguuugagauuuucccgaagacaagcuccuggcccaaucacgauucaaacaagggugucaccgccgcuuguccucaugcaggggccaaaaguuuuuauaagaaucugaucuggcucgugaaaaagggaaacagcuacccaaaauuaucuaaguccuauauaaaugacaagggcaaagaaguacugguucuuuggggcauccaccaccccucaacgagcgcugaucaacagaguuuguaccagaacgccgacgcguacguguucgucgggacuucucgcuauuccaagaaauuuaagccugagauugcaauccgaccaaaagugcgugaucaggagggaagaaugaauuacuauuggacccugguggaacccggugacaagauuacauucgaggccacuggcaaccuagucguuccuagguacgcuuuugccauggaacggaacgcagggagcggaaucauaauuucggauaccccagugcaugacugcaauacaaccugucaaacgccgaaaggcgcuaucaacacuucucuccccuuccagaauauucacccuaucacaaucgguaagugcccaaaguauguaaaauccaccaagcugcgccuugccacugggcugagaaacgugcccucaauucagaguaggggauuguuuggcgcgauagccggcuucaucgaagggggauggacagguauggucgacggcugguacggguaucaucaccagaaugaacaaggaagcggcuacgcagcugaucucaaauccacccagaacgccauugacgagaucacgaauaaggugaacucuguuauagagaaaaugaauacccaguuuacagcuguggguaaggaguucaaccaccuggggaagcggauugagaauuuaaacaaaaaggucgaugacggcuuccuggauaucuggacuuacaaugccgaacuccuugugcuguuggagaacgaacgcacccuagacuaucaugauagcaauguaaagaaccuguacgagaagguucgaucacagcucaaaaacaaugcaaaggagaucggaaacggcuguuuugaguucuaucacaagugcgacaauacauguauggagagugugaaaaacgggacuuacgauuauccuaaguacuccgaagaggccaaacugaauagagaagagauugacggagucaaacuugagagcaccaggaucuaucaaauucuggcuauauacucuacaguggcgucaaguuugguccucgugguuagccugggugcaaucuccuuuuggaugugcucuaacggcucguuacagugccggauuuguaucuga

SEQ ID NO: 136266 - RNA, 1701 nt, Artificial Sequence; identical to SEQ ID NO: 130717
  derived and/or modified CDS sequence (opt3) from hemagglutinin__InfluenzaA__AFB70337

SEQ ID NO: 136267 - RNA, 1701 nt, Artificial Sequence; identical to SEQ ID NO: 132687
  derived and/or modified CDS sequence (opt3) from hemagglutinin__InfluenzaA__AFB70347

SEQ ID NO: 136268 - RNA, 1701 nt, Artificial Sequence; identical to SEQ ID NO: 130717
  derived and/or modified CDS sequence (opt3) from hemagglutinin__InfluenzaA__AFB70367

SEQ ID NO: 136269 - RNA, 1701 nt, Artificial Sequence; identical to SEQ ID NO: 130717
  derived and/or modified CDS sequence (opt3) from hemagglutinin__InfluenzaA__AFB70377

SEQ ID NO: 136270 - RNA, 1701 nt, Artificial Sequence; identical to SEQ ID NO: 131286
  derived and/or modified CDS sequence (opt3) from hemagglutinin__InfluenzaA__AFB70387

SEQ ID NO: 136271 - RNA, 1701 nt, Artificial Sequence; identical to SEQ ID NO: 130717
  derived and/or modified CDS sequence (opt3) from hemagglutinin__InfluenzaA__AFB70397

SEQ ID NO: 136272 - RNA, 1701 nt, Artificial Sequence; identical to SEQ ID NO: 130717
  derived and/or modified CDS sequence (opt3) from hemagglutinin__InfluenzaA__AFB70407

SEQ ID NO: 136273 - RNA, 1701 nt, Artificial Sequence
  derived and/or modified CDS sequence (opt3) from hemagglutinin__InfluenzaA__AFB77618
augaaggccauccuggugguccuccuuuacaccuucgcuacagcaaacgccgacacucugugcauuggcuaucacgcgaauaacagcacggauaccguugacacaguguuggagaagaauguaacugugacccauuccgucaacuuacuggaagauaagcacaaugggaaacuauguaagcucagaggaauagcuccccugcaucuugguaaaugcaacaucgccggcuggauucuggggaauccugagugugaaucuuugucaacagcaaguagcugguccuacaucguggagaccucuucgucagacaacggaacuugcuauccaggcgauuuuauuaauuacgaagaacucagggagcagcugagcaguguuuccucuuucgaacgguuugagaucuucccgaagacaagcuccuggcccaaccacgacucaaauaagggugugaccgccgcuuguccucaugcaggggccaaaaguuuuuauaagaaccugauauggcucgucaaaaagggaaauagcuacccaaaauuaucuaaguccuauaucaacgauaagggcaaagaagugcugguacuuuggggcauucaccaccccacgacuaccggggaccaacagucauuguaccagaaugcugauggauacguuuucguggguacaacucgcuauagcaagaaauuuaagccugagaucggcauucgaccaaaagucaaggaccaggaggggcguaugaacuacuauuggacccugguggaacccggagauaaaaucacauucgaggccaccggcaaccuaguggucccuagauacgcguuugcaauggaaaggaaugccgguagugggauaauuaucucugacacgccaguucaugauugcaacacuacaugucaaaccccgaagggagcuauuaauacuucccuccccuuccagaacauccacccuaucacaauuggcaagugcccaaaauauguaaagagcaccaaacugcggcuugccacgggccugcgcaaugugcccucgauacagucuagaggguuguuuggagcaaucgcugguuucauugagggcggguggaccggaaugguggacggcugguacgguuaucaucaccagaacgaacaaggguccggcuacgccgcggaccucaagucaacacagaaugccaucgauaaaauaacuaacaaggucaauagugugauugagaagaugaacacccaguuuacagcaguuggaaaagaguucaaucaccuggaaaagaggaucgagaacuuaaauaaaaagguggacgauggcuuccuggacaucuggacuuacaacgcugaacuccuuguccuguuggagaaugaacggacccuagauuaucaugacagcaacgugaaaaaccuguacgagaagguacgcaaucagcucaagaacaaugccaaagagauugggaacggauguuuugaguucuaucacaagugcgauaauacauguauggaguccguuaaaaacgguaccuacgacuauccuaaguacucugaagaggcuaaacugaaucgagaagagaucgauggcgugaaacuugagagcacuagaauuuaucaaauacuggccaucuacucaacggucgcaaguuccuuggugauggucgugagccucggggccauuucuuuuuggaugugcucaaacggaagucugcagugcaggaucuguaucuga

SEQ ID NO: 136274 - RNA, 1701 nt, Artificial Sequence; identical to SEQ ID NO: 134915
  derived and/or modified CDS sequence (opt3) from hemagglutinin__InfluenzaA__AFB77619

SEQ ID NO: 136275 - RNA, 1701 nt, Artificial Sequence; identical to SEQ ID NO: 134915
  derived and/or modified CDS sequence (opt3) from hemagglutinin__InfluenzaA__AFB77620

SEQ ID NO: 136276 - RNA, 1701 nt, Artificial Sequence
  derived and/or modified CDS sequence (opt3) from hemagglutinin__InfluenzaA__AFB77621
augaaggccauccuggugguccuccuuuacaccuucgcuacagcaaacgccgacacucugugcauuggcuaucacgcgaauaacagcacggauaccguugacacaguguuggagaaaaauguaacugugacccauuccgucaacuuacuggaagauaagcacaaugggaaacuauguaagcucagaggagugacaccccugcaucuugguaaaugcaacauagcuggcuggauccuggggaauccugagugugaaucuuugucaaccgccaguagcugguccuacauuguugagacuucuucgucagacaacggaacaugcuauccaggcgauuuuaucaauuacgaggagcucagggagcagcugagcaguguguccucuuucgaacgguuugagauuuucccgaagaccagcuccuggcccaaccacgacucaaauaagggugucacggcagccuguccucaugcuggggcaaaaaguuuuuauaagaaccugaucuggcucgugaaaaagggaaauagcuacccaaaauuaucuaaguccuauauaaacgauaagggcaaagaaguacugguucuuuggggcauccaccaccccucaacuaccgccgaccaacagagcuuguaccagaaugcugaugccuacguguucgucgggacaagucgcuauucuaagaaauuuaagccugagauugcgauccgaccaaaagugcgugaccaggagggaagaaugaacuacuauuggacucugguggaacccggugauaagauuaccuucgaggcaacaggcaaccuagucguuccuagguacgccuuugcuauggaacggaaugccggguccggaaucauaauuagcgacaccccagugcaugauugcaacacgacuugucaaacaccgaaaggcgcaaucaauaccucgcuccccuuccagaacauucacccuaucacuaucgguaagugcccaaaguauguaaaaucuacaaagcugcgccuugcuaccgggcugagaaauauucccuccauacagucaaggggauuguuuggcgccaucgcgggcuucauugaagggggauggacggguaugguggacggcugguacggguaucaucaccagaacgaacaaggaaguggcuacgccgcagaccucaaaagcacccagaaugcuaucgauaagauaacaaacaaagucaauuccgugauugagaagaugaacacucaguuuaccgccguugguaaggaguucaaucaccuggaaaaacggaucgagaacuuaaauaagaaaguggacgauggguuccuggacaucuggacauacaacgcugaacuccuuguccuguuggagaaugaacgcacucuagauuaucaugacucuaacgugaagaaccuguacgagaaaguacgaaaucagcucaagaacaaugccaaggagauuggcaacggauguuuugaguucuaucacaaaugcgauaauaccuguauggaaagcguuaagaacggcacauacgacuauccuaaauacucagaagaggcaaagcugaauagagaagagaucgauggggugaaacuugagaguaccaggauuuaucaaauacuggccaucuacuccacugucgcuagcucuuuggugcucgucgugucacugggagcgauuaguuuuuggaugugcagcaacgguuccuuacagugccggaucuguaucuga

SEQ ID NO: 136277 - RNA, 1701 nt, Artificial Sequence
  derived and/or modified CDS sequence (opt3) from hemagglutinin__InfluenzaA__AFB77622
augaaggccauccuggugguccuccuuuacaccuucgcuacagcaaacgccgacacucugugcauuggcuaucacgcgaauaacagcacggauaccguugacacaguguuggagaaaaauguaacugugacccauuccgucaacuuacuggaagauaagcacaaugggaaacuauguaagcucagaggaguggcuccccugcaucuugguaaaugcaacauagccggcuggauccuggggaauccugagugugaaucuuugucaacagcaaguagcugguccuacauuguugagaccucuucgucagacaacggaacuugcuauccaggcgauuuuaucaauuacgaggagcucagggagcagcugagcaguguguccucuuucgaacgguuugagauuuucccgaagacaagcuccuggcccaaccacgacccuaauaagggugucaccgccgcuuguccacaugcaggggccaaaucauuuuauaagaaccugaucuggcucgugaaaaagggaaauaguuaccccaaauuaagcaagucuuauauaaacgauaagggcaaagaaguacugguucuuuggggcauccaccacccuuccacgacugcugaccaacagucauuguaccagaaugccgaugcguacguguucgucgggaccagccgcuauaguaagaaauuuaagccagagauugcaauccgacccaaagugcgugaccaggagggaagaaugaacuacuauuggacacugguggaaccuggugauaagauuacuuucgaggccaccggcaaccuagucguuccaagguacgcuuuugccauggaacggaaugcagggucuggaaucauaauuuccgacacaccggugcaugauugcaacaccacgugucaaacucccaaaggcgcuaucaauacaagccucccuuuccagaacauucacccaaucaccaucgguaagugccccaaguauguaaaaucgacuaagcugcgccuugccacagggcugagaaaugugccuucuauucaguccaggggauuguuuggcgcgauagccggcuucaucgaagggggauggaccgguauggucgacggcugguacggguaucaucaccagaacgaacaaggaucaggcuacgcagcugaccucaaaaguacgcagaaugccauugauaagaucaccaacaaagugaauagcguuauagagaagaugaacacacaguuuacugcuguggguaaggaguucaaucaccuggaaaaacggauugagaacuuaaauaagaaagucgacgauggguuccuggacaucuggaccuacaacgccgaacuccuugugcuguuggagaaugaacgcacacuagauuaucaugacuccaacguaaagaaccuguacgagaaaguucgaaaucagcucaagaacaaugcaaaggagaucggcaacggauguuuugaguucuaucacaaaugcgauaauacuuguauggaaucugugaagaacggcaccuacgacuauccaaaauacagcgaagaggccaagcugaauagagaagagauugauggggucaaacuugagucaacaaggaucuaucaaauucuggcuauauacaguaccguggcguccagcuugguccucgugguuucucugggagcaaucucauuuuggaugugcaguaacgguagcuuacagugccggauuuguaucuga

SEQ ID NO: 136278 - RNA, 1701 nt, Artificial Sequence; identical to SEQ ID NO: 134915
  derived and/or modified CDS sequence (opt3) from hemagglutinin__InfluenzaA__AFB77623

SEQ ID NO: 136279 - RNA, 1701 nt, Artificial Sequence; identical to SEQ ID NO: 134915
  derived and/or modified CDS sequence (opt3) from hemagglutinin__InfluenzaA__AFB77624

SEQ ID NO: 136280 - RNA, 1701 nt, Artificial Sequence
  derived and/or modified CDS sequence (opt3) from hemagglutinin__InfluenzaA__AFB77625
augaaggccauccuggugguccuccuuuacaccuucacaacugcuaacgcagacacgcugugcauuggcuaucacgccaauaacagcaccgauacaguugacacuguguuggagaaaaauguaaccgugacacauuccgucaacuuacuggaagauaagcacaaugggaaacuauguaagcucagaggaguggcgccccugcaucuugguaaaugcaacauagcuggcuggauccuggggaauccugagugugaaucuuugucaaccgccaguagcugguccuacauuguugagacuucuucgucagacaacggaacaugcuauccaggcgauuuuaucaauuacgaggagcucagggagcagcugagcaguguguccucuuucgaacgguuugagauuuucccgaagaccagcuccuggcccaaccacgacucaaauaagggugucacggcagccuguccucaugcuggggcaaaaaguuuuuauaagaaccugaucuggcucgugaaaaagggaaauagcuacccaaaauuaucuaaguccuauauaaacgauaagggcaaagaaguacugguucuuuggggcauccaccaccccucaacuaccgccgaccaacagagcuuguaccagaaugcugaugccuacguguucgucgggacaagucgcuauucuaagaaauuuaagccugagauugcgauccgaccaaaagugcgugaccaggagggaagaaugaacuacuauuggacucugguggaacccggugauaagauuaccuucgaggcaacaggcaaccuagucguuccuagguacgccuuugcuauggaacggaaugccggguccggaaucauaauuagcgacaccccagugcaugauugcaacacgacuugucaaacaccgaaaggcgcaaucaauaccucgcuccccuuccagaacauucacccuaucacuaucgguaagugcccaaaguauguaaaaucuacaaagcugcgccuugcuaccgggcugagaaaugugcccuccauucagucaaggggauuguuuggcgccauagcgggcuucaucgaagggggauggacggguauggucgacggcugguacggguaucaucaccagaacgaacaaggaaguggcuacgccgcagaccucaaaagcacccagaaugcuauugauaagaucacaaacaaaguuaauuccgugauagagaagaugaacacucaguuuaccgccguggguaaggaguucaaucaccuggaaaaacggauugagaacuuaaauaagaaagucgacgauggguuccuggacaucuggacauacaacgcugaacuccuugugcuguuggagaaugaacgcacucuagauuaucaugacucuaacguaaagaaccuguacgagaaaguucgaaaucagcucaagaacaaugccaaggagaucggcaacggauguuuugaguucuaucacaaaugcgauaauaccuguauggaaagcgugaagaacggcacauacgacuauccuaaauacucagaagaggcaaagcugaauagagaagagauugauggggucaaacuugagaguaccaggaucuaucaaauucuggccauauacuccacuguggcuagcucuuugguccucgugguuucacugggagcgaucaguuuuuggaugugcagcaacgguuccuuacagugccggauuuguaucuga

SEQ ID NO: 136281 - RNA, 1701 nt, Artificial Sequence
  derived and/or modified CDS sequence (opt3) from hemagglutinin__InfluenzaA__AFB77627
augaaggccauccuggugguccuccuuuacaccuucgcuacagcaaacgccgacacucugugcauuggcuaucacgcgaauaacagcacggauaccguugacacaguguuggagaaaaauguaacugugacccauuccgucaacuuacuggaagauaagcacaaugggaaacuauguaagcucagaggaguggcuccccugcaucuugguaaaugcaacauagccggcuggauccuggggaauccugagugugaaucuuugucaacagcaaguagcugguccuacauuguugagaccucuucgucagacaacggaacuugcuauccaggcgauuuuaucaauuacgaggagcucagggagcagcugagcaguguguccucuuucgaacgguuugagauuuucagcaagacauccucauggccgaaccacgacaguaauaagggugucaccgccgcuuguccccaugcaggggccaaaucuuuuuauaagaaccugaucuggcucgugaaaaagggaaauucuuacccuaaauuauccaagucauauauaaacgauaagggcaaagaaguacugguucuuuggggcauccaccacccaagcacgacugcugaccaacagaguuuguaccagaaugccgaugcguacguguucgucgggaccucucgcuauuccaagaaauuuaagcccgagauugcaauccgaccuaaagugcgugaccaggagggaagaaugaacuacuauuggacacugguggaaccaggugauaagauuacuuucgaggccaccggcaaccuagucguucccagguacgcuuuugccauggaacggaaugcagggagcggaaucauaauuucggacacaccugugcaugauugcaacaccacgugucaaacuccaaaaggcgcuaucaauacaucucucccguuccagaacauucaccccaucaccaucgguaagugcccuaaguauguaaaauccacuaagcugcgccuugccacagggcugagaaaugugccaucaauucagaguaggggauuguuuggcgcgauagccggcuucaucgaagggggauggaccgguauggucgacggcugguacggguaucaucaccagaacgaacaaggaagcggcuacgcagcugaccucaaauccacgcagaaugccauugauaagaucaccaacaaagugaauagcguuauagagaagaugaacacacaguuuacugcuguggguaaggaguucaaucaccuggaaaaacggauugagaacuuaaauaagaaagucgacgauggguuccuggacaucuggaccuacaacgccgaacuccuugugcuguuggagaaugaacgcacacuagauuaucaugacagcaacguaaagaaccuguacgagaaaguucgaaaucagcucaagaacaaugcaaaggagaucggcaacggauguuuugaguucuaucacaaaugcgauaauacuuguauggaaucagugaagaacggcaccuacgacuaucccaaauacagugaagaggccaagcugaauagagaagagauugauggggucaaacuugaguccacaaggaucuaucaaauucuggcuauauacagcaccguggcgucuucauugguccucgugguuagucugggagcaaucagcuuuuggaugugcuccaacgguucuuuacagugccggauuuguaucuga

SEQ ID NO: 136282 - RNA, 1701 nt, Artificial Sequence; identical to SEQ ID NO: 134915
  derived and/or modified CDS sequence (opt3) from hemagglutinin__InfluenzaA__AFB77628

SEQ ID NO: 136283 - RNA, 1701 nt, Artificial Sequence
  derived and/or modified CDS sequence (opt3) from hemagglutinin__InfluenzaA__AFB77629
augaaggccauccuggugguccuccuuuacaccuucacaacugcuaacgcagacacgcugugcauuggcuaucacgccaauaacagcaccgauacaguugacacuguguuggagaaaaauguaaccgugacacauuccgucaacuuacuggaagauaagcacaaugggaaacuauguaagcucagaggaguggcgccccugcaucuugguaaaugcaacauagcuggcuggauccuggggaauccugagugugaaucuuugucaaccgccaguagcugguccuacauuguugagacuucuucgucagacaacggaacaugcuauccaggcgauuuuaucaauuacgaggagcucagggagcagcugagcaguguguccucuuucgaacgguuugagauuuucccgaagaccagcuccuggcccaaccacgacucaaauaagggugucacggcagccuguccucaugcuggggcaaaaaguuuuuauaagaaccugaucuggcucgugaaaaagggaaauagcuacccaaaauuaucuaaguccuauauaaacgauaagggcaaagaaguacugguucuuuggggcauccaccaccccucaacuaccgccgaccaacagagcuuguaccagaaugcugaugccuacguguucgucgggacaagucgcuauucuaagaaauuuaagccugagauugcgauccgaccaaaagugcgugaccaggagggaagaaugaacuacuauuggacucugguggaacccggugauaagauuaccuucgaggcaacaggcaaccuagucguuccuagguacgccuuugcuauggaacggaaugccggguccggaaucauaauuagcgacaccccagugcaugauugcaacacgacuugucaaacaccgaaaggcgcaaucaauaccucgcuccccuuccagaacauucacccuaucacuaucgguaagugcccaaaguauguaaaaucuacaaagcugcgccuugcuaccgggcugagaaaugugcccuccauucagucaaggggauuguuuggcgccauagcgggcuucaucgaagggggauggacggguauggucgacggcugguacggguaucaucaccagaacgaacaaggaaguggcuacgccgcagaccucaaaagcacccagaaugcuauugauaagaucacaaacaaaguuaauuccgugauagagaagaugaacacucaguuuaccgccguggguaaggaguucaaucaccuggaaaaacggauugagaacuuaaauaagaaagucgacgauggguuccuggacaucuggacauacaacgaggaacuccuugugcuguuggaaaaugagcgcacucuagauuaucaugacucuaacguaaagaaccuguacgagaaaguucgaaaucagcucaagaacaaugcuaaggaaaucggcaacggauguuuugaguucuaucacaaaugcgauaauaccuguauggaaagcgugaagaacggcacauacgacuauccuaaauacucagaggaagccaagcugaauagagaggagauugauggggucaaacuugaaaguaccaggaucuaucaaauucuggcaauauacuccacuguggccagcucuuugguccucgugguuucacugggagcuaucaguuuuuggaugugcagcaacgguuccuuacagugccggauuuguaucuga

SEQ ID NO: 136284 - RNA, 1701 nt, Artificial Sequence
  derived and/or modified CDS sequence (opt3) from hemagglutinin__InfluenzaA__AFB77630
augaaggccauccuggugguccuccuuuacaccuucgcuacagcaaacgccgacacucugugcauuggcuaucacgcgaauaacagcacggauaccguugacacaguguuggagaaaaauguaacugugacccauuccgucaacuuacuggaagauaagcacaaugggaaacuauguaagcucagaggaguggcuccccugcaucuugguaaaugcaacauagccggcuggauccuggggaauccugagugugaaucuuugucaacagcaaguagcugguccuacauuguugagaccucuucgucagacaacggaacuugcuauccaggcgauuuuaucaauuacgaagaacucagggagcagcugagcaguguguccucuuucgaacgguuugagauuuucccgaagacaagcuccuggcccaaccacgaaucaaauaagggugucaccgccgcuuguccucaugcaggggccaaaaguuuuuauaagaaccugaucuggcucgugaaaaagggaaauagcuacccaaaauuaucuaaguccuauauaaacgacaagggcaaagagguacugguucuuuggggcauccaccaccccucaacgacugcugaucaacagagcuuguaccagaaugccgacgcguacguguucgucgggaccagucgcuauucuaagaaauuuaagccugagauugcaauccgaccaaaagugcgugaucaggaaggaagaaugaacuacuauuggacacugguggagcccggugacaagauuacuuucgaagccaccggcaaccuagucguuccuagguacgcuuuugccauggagcggaaugcaggguccggaaucauaauuagcgauacaccagugcaugacugcaacaccacgugucaaacuccgaaaggcgcuaucaauacaucgcuccccuuccagaacauucacccuaucaccaucgguaagugcccaaaguauguaaaaucuacuaagcugcgccuugccacagggcugagaaaugugcccuccauucagucaaggggauuguuuggcgcgauagccggcuucaucgaagggggauggaccgguauggucgauggcugguacggguaucaucaccagaacgagcaaggaaguggcuacgcagcugaccucaaaagcacgcagaaugccauugacaagaucaccaacaaaguuaauuccgugauagagaagaugaacacacaguuuacugcuguggguaaggaguucaaucaccuggagaaacggauugaaaacuuaaauaagaaagucgaugacggguuccuggauaucuggaccuacaacgccgagcuccuugugcuguuggaaaaugagcgcacacuagacuaucaugauucuaacguaaagaaccuguacgagaaaguucgaaaucagcucaagaacaaugcaaaggaaaucggcaacggauguuuugaguucuaucacaaaugcgacaauacuuguauggaaagcgugaagaacggcaccuacgauuauccuaaauacucagaggaagccaagcugaauagagaggagauugacggggucaaacuugaaaguacaaggaucuaucaaauucuggcuauauacuccaccguggcgagcucuuugguccucgugguuucacugggagcaaucaguuuuuggaugugcagcaacgguuccuuacagugccggauuuguaucuga

SEQ ID NO: 136285 - RNA, 1701 nt, Artificial Sequence
  derived and/or modified CDS sequence (opt3) from hemagglutinin__InfluenzaA__AFB77631
augaaggccauccuggugguccuccuuuacaccuucacaacugcuaacgcagacacgcugugcauuggcuaucacgccaauaacagcaccgauacaguugacacuguguuggagaaaaauguaaccgugacacauuccgucaacuuacuggaagauaagcacaaugggaaacuauguaagcucagaggaguggcgccccugcaucuugguaaaugcaacauagcuggcuggauccuggggaauccugagugugaaucuuugucaaccgccaguagcugguccuacauuguugagacuucuucgucagacaacggaacaugcuauccaggcgauuuuaucaauuacgaggagcucagggagcagcugagcaguguguccucuuucgaacgguuugagauuuucccgaagaccagcuccuggcccaaccacgacucaaauaagggugucacggcagccuguccucaugcuggggcaaaaaguuuuuauaagaaccugaucuggcucgugaaaaagggaaauagcuacccaaaauuaucuaaguccuauauaaacgauaagggcaaagaaguacugguucuuuggggcauccaccaccccucaacuaccgccgaccaacagagcuuguaccagaaugcugaugccuacguguucgucgggacaagucgcuauucuaagaaauuuaagccugagauugcgauccgaccaaaagugcgugaccaggagggaagaaugaacuacuauuggacucugguggaacccggugauaagauuaccuucgaggcaacaggcaaccuagucguuccuagguacgccuuugcuauggaacggaaugccggguccggaaucauaauuagcgacaccccagugcaugauugcaacacgacuugucaaacaccgaaaggcgcaaucaauaccucgcuccccuuccagaacauucacccuaucacuaucgguaagugcccaaaguauguaaaaucuacaaagcugcgccuugcuaccgggcugagaaaugugcccuccauucagucaaggggauuguuuggcgccauagcgggcuucaucgaagggggauggacggguauggucgacggcugguacggguaucaucaccagaacgaacaaggaaguggcuacgccgcagaccucaaaagcacccagaaugcuauugauaagaucacaaacaaaguuaauuccgugauagagaagaugaacacucaguuuaccgccguggguaaggaguucaaucaccuggaaaaacggauugagaacuuaaauaagaaagucgacgauggguuccuggacaucuggacauacaacgcugaacuccuugugcuguuggagaaugaacgcacucuagauuaucaugacucuaacguaaagaaccuguacgagaaaguucgaaaucagcucaagaccaacgccaaggagaucggcaauggauguuuugaguucuaucacaaaugcgauaacacauguauggaaagcgugaagaauggcaccuacgacuauccuaaauacucagaagaggcaaagcugaacagagaagagauugauggggucaaacuugagaguacuaggaucuaucaaauucuggccauauacuccacgguggcuagcucuuugguccucgugguuucacugggagcgaucaguuuuuggaugugcagcaaugguuccuuacagugccggauuuguaucuga

SEQ ID NO: 136286 - RNA, 1701 nt, Artificial Sequence
  derived and/or modified CDS sequence (opt3) from hemagglutinin__InfluenzaA__AFB77632
augaaggccauccuggugguccuccuuuacaccuucgcuacagcaaacgccgacacucugugcauuggcuaucacgcgaauaacagcacggauaccguugacacaguguuggagaaaaauguaacugugacccauuccgucaacuuacuggaagauaagcacaaugggaaacuauguaagcucagaggaguggcuccccugcaucuugguaaaugcaacauagccggcuggauccuggggaauccugagugugaaucuuugacaaccgcaucaaguuggagcuacauuguugagacuuccucuucggacaacggaacaugcuauccaggcgauuuuaucaauuacgaggagcucagggagcagcugucaagcgugaguuccuucgaacgguuugagauuuucccgaagaccucuagcuggcccaaccacgacuccaauaagggugucacggccgcuuguccucaugcaggggccaaaucauuuuauaagaaccugaucuggcucgugaaaaagggaaauaguuacccaaaauuaagcaagucuuauauaaacgauaagggcaaagaaguacugguucuuuggggcauccaccaccccuccacuaccgcugaccaacagucauuguaccagaaugccgaugcguacguguucgucgggacaagccgcuauaguaagaaauuuaagccugagauugcaauccgaccaaaagugcgugaccaggagggaagaaugaacuacuauuggacucugguggaacccggugauaagauuaccuucgaggccacaggcaaccuagucguuccuagguacgcuuuugccauggaacggaaugcagggucuggaaucauaauuuccgacaccccagugcaugauugcaacacgacuugucaaacaccgaaaggcgcuaucaauaccagccuccccuuccagaacauucacccuaucacuaucgguaagugcccaaaguauguaaaaucgacaaagcugcgccuugccaccgggcugagaaaugugcccucuauucaguccaggggauuguuuggcgcgauagccggcuucaucgaagggggauggacggguauggucgacggcugguacggguaucaucaccagaacgaacaaggaucaggcuacgcagcugaccucaaaaguacccagaaugccauugauaagaucacaaacaaagugaauagcguuauagagaagaugaacacucaguuuaccgcuguggguaaggaguucaaucaccuggaaaaacggauugagaacuuaaauaagaaagucgacgauggguuccuggacaucuggacauacaacgccgaacuccuugugcuguuggagaaugaacgcacucuagauuaucaugacuccaacguaaagaaccuguacgagaaaguucgaaaucagcucaagaacaaugcaaaggagaucggcaacggauguuuugaguucuaucacaaaugcgauaauaccuguauggaaucugugaagaacggcacauacgacuauccuaaauacagcgaagaggccaagcugaauagagaagagauugauggggucaaacuugagucaaccaggaucuaucaaauucuggcuauauacaguacuguggcguccagcuugguccucgugguuucucugggagcaaucucauuuuggaugugcaguaacgguagcuuacagugcaagauuuguaucuga

SEQ ID NO: 136287 - RNA, 1701 nt, Artificial Sequence
  derived and/or modified CDS sequence (opt3) from hemagglutinin__InfluenzaA__AFB77633
augaaggccauccuggugguccuccuuuacaccuucgcuacagcaaacgccgacacucugugcauuggcuaucacgcgaauaacagcacggauaccguugacacaguguuggagaaaaauguaacugugacccauuccgucaacuuacuggaagauaagcacaaugggaaacuauguaagcucagaggaguggcuccccugcaucuugguaaaugcaacauagccggcuggauccuggggaauccugagugugaaucuuugucaacagcaaguagcugguccuacauuguugagaccucuucgucagacaacggaacuugcuauccaggcgauuuuaucaauuacgaggagcucagggagcagcugagcaguguguccucuuucgaacgguuugagauuuucccgaagacaagcuccuggcccaaccacgacucaaauaagggugucaccgccgcuuguagucaugcaggggccaagagcuuuuauaagaaccugaucuggcucgugaaaaagggaaauucuuacccuaaauuauccaagucauauauaaacgauaagggcaaagaaguacugguucuuuggggcauccaccacccaagcacgacugcugaccaacagaguuuguaccagaaugccgaugcguacguguucgucgggaccucucgcuauuccaagaaauuuaagcccgagauugcaauccgaccuaaagugcgugaccaggagggaagaaugaacuacuauuggacacugguggaaccaggugauaagauuacuuucgaggccaccggcaaccuagucguucccagguacgcuuuugccauggaacggaaugcagggagcggaaucauaauuucggacacaccugugcaugauugcaacaccacgugucaaacuccaaaaggcgcuaucaauacaucucucccguuccagaacauucaccccaucaccaucgguaagugcccuaaguauguaaaauccacuaagcugcgccuugccacagggcugagaaaugugccaucaauucagaguaggggauuguuuggcgcgauagccggcuucaucgaagggggauggaccgguauggucgacggcugguacggguaucaucaccagaacgaacaaggaagcggcuacgcagcugaccucaaauccacgcagaaugccauugauaagaucaccaacaaaguuaauucugugauagagaagaugaacacacaguuuacugcuguggguaaggaguucaaucaccuggaaaaacggauugagaacuuaaauaagaaagucgacgauggguuccuggacaucuggaccuacaacgccgaacuccuugugcuguuggagaaugaacgcacacuagauuaucaugacagcaacguaaagaaccuguacgagaaaguuaagaaucagcucaagaacaaugcaaaagagaucggcaacggauguuuugaguucuaucacaagugcgauaauacucccauuaaaaacgugaagaauggcaccuacgacuauccuaaauacucagaagaagccaagcugaaccgagaggaaaucgauggggucaaacuugagaguacaagaauuuaucaaauacuggcuaucuacuccaccguggcgagcucuuugguccucgugguuucacugggagcaauuaguuuuuggauguguagcaaugguuccuuacagugcaggaucugcaucuga

SEQ ID NO: 136288 - RNA, 1701 nt, Artificial Sequence
  derived and/or modified CDS sequence (opt3) from hemagglutinin__InfluenzaA__AFB77634
augaaggccauccuggugguccuccuuuacaccuucgcuacagcaaacgccgacacucugugcauuggcuaucacgcgaauaacagcacggauaccguugacacaguguuggagaaaaauguaacugugacccauuccgucaacuuacuggaagauaagcacaaugggaaacuauguaagcucagaggaguggcuccccugcaucuugguaaaugcaacauagccggcuggauccuggggaauccugagugugaaucuuugucaacagcaaguagcugguccuacauuguugagaccucuucgucagacaacggaacuugcuauccaggcgauuuuaucaauuacgaagaacucagggagcagcugagcaguguguccucuuucgaacgguuugagauuuucccgaagacaagcuccuggcccaaccacgacucaaauaagggugucaccgccgcuuguccucaugcaggggccaaaaguuuuuauaagaaccugaucuggcucgugaaaaagggaaauagcuacccaaaauuaucuaaguccuauauaaacgauaagggcaaagaaguacugguucuuuggggcauccaccaccccucaacgacugcugaccaacagagcuuguaccagaaugccgaugcguacguguucgucgggaccagucgcuauucuaagaaauuuaagccugagauugcaauccgaccaaaagugcgugaccaggagggaagaaugaacuacuauuggacacugguggaacccggugagaagauuacuuucgaagccaccggcaaccuagucguuccuagguacgcuuuugccauggagcggaaugcaggguccggaaucauaauuagcgauacaccagugcaugacugcaacaccacgugucaaacuccgaaaggcgcuaucaauacaucgcuccccuuccagaacauucacccuaucaccaucgguaagugcccaaaguauguaaaaucuacuaagcugcgccuugccacagggcugagaaaugugcccuccauucagucaaggggauuguuuggcgcgauagccggcuucaucgaagggggauggaccgguauggucgauggcugguacggguaucaucaccagaacgagcaaggaaguggcuacgcagcugaccucaaaagcacgcagaaugccauugacaagaucaccaacaaaguuaauuccgugauagagaagaugaacacacaguuuacugcuguggguaaggaguucaaucaccuggagaaacggauugaaaacuuaaauaagaaagucgaugacggguuccuggauaucuggaccuacaacgccgagcuccuugugcuguuggaaaaugagcgcacacuagacuaucaugauucuaacguaaagaaccuguacgagaaaguucgaaaucagcucaagaacaaugcaaaggaaaucggcaacggauguuuugaguucuaucacaaaugcgacaauacuuguauggaaagcgugaagaacggcaccuacgauuauccuaaauacucagaggaagccaagcugaauagagaggagauugacggggucaaacuugaaaguacaaggaucuaucaaauucuggcuauauacuccaccguggcgagcucuuugguccucgugguuucacugggagcaaucaguuuuuggaugugcagcaacgguuccuuacagugccggauuuguaucuga

SEQ ID NO: 136289 - RNA, 1701 nt, Artificial Sequence
  derived and/or modified CDS sequence (opt3) from hemagglutinin__InfluenzaA__AFB77635
augaaggccauccuggugguccuccuuuacaccuucgcuacagcaaacgccgacacucugugcauuggcuaucacgcgaauaacagcacggauaccguugacacaguguuggagaaaaauguaacugugacccauuccgucaacuuacuggaagauaagcacaaugggaaacuauguaagcucagaggaguggcuccccugcaucuugguaaaugcaacauagccggcuggauccuggggaauccugagugugaaucuuugucaacagcaaguccauggagcuacauuguugagaccuccucuucggacaacggaacuugcuauccgggcgauuuuaucaauuacgaggagcucagggagcagcugucaagcgugaguuccuucgaacgguuugagauuuuccccaagacaucuagcuggccuaaccacgacuccaauaagggugucaccgccgcuuguccacaugcaggggccaaaucauuuuauaagaaccugaucuggcucgugaaaaagggaaauaguuaccccaaauuaagcaagucuuauauaaacgauaagggcaaagaaguacugguucuuuggggcauccaccacccuuccacgacugcugaccaacagucauuguaccagaaugccgaugcguacguguucgucgggaccagccgcuauaguaagaaauuuaagccagagauugcaauccgacccaaagugcgugaccaggagggaagaaugaacuacuauuggacacugguggaaccuggugauaagauuacuuucgaggccaccggcaaccuagucguuccaagguacgcuuuugccauggaacggaaugcagggucuggaaucauaauuuccgacacaccggugcaugauugcaacaccacgugucaaacucccaaaggcgcuaucaauacaagccucccuuuccagaacauucacccaaucaccaucgguaagugccccaaguauguaaaaucgacuaagcugcgccuugccacagggcugagaaaugugccuucuauucaguccaggggauuguuuggcgcgauagccggcuucaucgaagggggauggaccgguauggucgacggcugguacggguaucaucaccagaacgaacaaggaucaggcuacgcagcugaccucaaaaguacgcagaaugccauugauaagaucaccaacaaagugaauagcguuauagagaagaugaacacacaguuuacugcuguggguaaggaguucaaucaccuggaaaaacggauugagaacuuaaauaagaaagucgacgauggguuccuggacaucuggaccuacaacgccgaacuccuugugcuguuggagaaugaacgcacacuagauuaucaugacuccaacguaaagaaccuguacgagaaaguucgaaaucagcucaagaacaaugcaaaggagaucggcaacggauguuuugaguucuaucacaaaugcgauaauacuuguauggaaucugugaagaacggcaccuacgacuauccaaaauacagcgaagaggccaagcugaauagagaagagauugauggggucaaacuugagucaacaaggaucuaucaaauucuggcuauauacaguaccguggcguccagcuugguccucgugguuucucugggagcaaucucauuuuggaugugcaguaacgguagcuuacagugccggauuuguaucuga

SEQ ID NO: 136290 - RNA, 1701 nt, Artificial Sequence
  derived and/or modified CDS sequence (opt3) from hemagglutinin__InfluenzaA__AFB77636
augaaggccauccuggugguccuccuuuacaccuucgcuacagcaaacgccgacacucugugcauuggcuaucacgcgaauaacagcacggauaccguugacacaguguuggagaaaaauguaacugugacccauuccgucaacuuacuggaagauaagcacaaugggaaacuauguaagcucagaggaguggcuccccugcaucuugguaaaugcaacauagccggcuggauccuggggaauccugagugugaaucuuugucaacagcaaguagcugguccuacauuguugagaccucuucgucagacaacggaacuugcuauccaggcgauuuuaucaauuacgaggagcucagggagcagcugagcaguguguccucuuucgaacgguuugagauuuucccgaagacaagcuccuggcccaaccacgacucaaauaagggugucaccgccgcuuguccucaugcaggggccaaaaguuuuuauaagaaccugaucuggcucgugaaaaagggaaauagcuacccaaaauuaucuaaguccuauauaaacgauaagggcaaagaaguacugguucuuuggggcauccaccaccccucaacgacugcugaccaacagagcuuguaccagaaugccgaugcguacguguucgucgggaccagucgcuauucuaagaaauuuaagccugagauugcaauccgaccaaaagugcgugaccaggagggaagaaugaacuacuauuggacacugguggaacccggugauaagauuacuuucgaggccaccggcaaccuagucguuccuagguacgcuuuugccauggaacggaaagcaggguccggaaucauaauuagcgacacaccagugcaugauugcaauaccacgugucaaacuccgaagggcgcuaucaacacaucgcuccccuuccagaauauucacccuaucaccaucgguaagugcccaaaauauguaaagucuacuaaacugcgccuugccacagggcugagaaacgugcccuccauucagucaaggggauuguuuggcgcgauagccggcuucaucgaagggggauggaccgguauggucgacggcugguacggguaucaucaccagaaugaacaaggaaguggcuacgcagcugaccucaagagcacgcagaacgccauugauaaaaucaccaauaaggugaacuccguuauagagaagaugaauacacaguuuacugcuguggguaaagaguucaaccaccuggaaaagcggauugagaauuuaaacaaaaaggucgacgauggguuccuggacaucuggaccuacaaugccgaacuccuugugcuguuggagaacgaacgcacacuagauuaucaugacucuaauguaaagaaccuguacgagaagguucgaaaccagcucaagaauaacgcaaaagagaucggcaauggauguuuugaguucuaucacaagugcgauaacacuuguauggaaagcgugaaaaauggcaccuacgacuauccuaaguacucagaagaggccaaacugaacagagaagagauugauggggucaaacuugagaguacaaggaucuaucaaauucuggcuauauacuccaccguggcgagcucuuuggucauggugguuucacucggagcaaucaguuuuuggaugugcagcaaugguucccugcagugccggauuuguaucuga

SEQ ID NO: 136291 - RNA, 1701 nt, Artificial Sequence
  derived and/or modified CDS sequence (opt3) from hemagglutinin__InfluenzaA__AFB77637
augaaggccauccuggugguccuccuuuacaccuucgcuacagcaaacgccgacacucugugcauuggcuaucacgcgaauaacagcacggauaccguugacacaguguuggagaaaaauguaacugugacccauuccgucaacuuacuggaagauaagcacaaugggaaacuauguaagcucagaggaguggcuccccugcaucuugguaaaugcaacauagccggcuggauccuggggaauccugagugugaaucuuugucaacagcaaguagcugguccuacauuguugagaccucuucgucagacaacggaacuugcuauccaggcgauuuuaucaauuacgaagaacucagggagcagcugagcaguguguccucuuucgaacgguuugagauuuucccgaagacaagcuccuggcccaaccacgacucaaauaagggugucaccgccgcuuguccucaugcaggggccaaaaguuuuuauaagaaccugaucuggcucgugaaaaagggaaauagcuacccaaaauuaucuaaguccuauauaaacgauaagggcaaagaaguacugguucuuuggggcauccaccaccccucaacgacugcugaccaacagagcuuguaccagaaugccgaugcguacguguucgucgggaccagucgcuauucuaagaaauuuaagccugagauugcaauccgaccaaaaggacgugaccaggaggguagaaugaacuacuauuggacacugguggaacccggcgauaagauuacuuucgaggccaccgggaaccuaguggucccuagguacgcuuuugccauggaacggaaugcaggauccggcaucauaauuagcgacacaccaguucaugauugcaacaccacgugucaaacuccgaaaggugcuaucaauacaucgcuccccuuccagaacauucacccuaucaccaucgggaagugcccaaaguaugugaaaucuacuaagcugcgccuugccacaggacugagaaauguacccuccauucagucaaggggcuuguuuggcgcgauagccggguucaucgagggagguuggaccggcaugguggacgggugguacggauaucaucaccagaacgaacaaggcagugguuacgcagcugaccucaaaagcacgcagaaugccauugauaagaucaccaacaaagucaauuccgugauagagaagaugaacacacaguuuacugcuguugggaaggaguucaaucaccuggaaaaacggauugagaacuuaaauaagaaaguggacgauggcuuccuggacaucuggaccuacaacgccgaacuccuuguccuguuggagaaugaacgcacacuagauuaucaugacucuaacgugaagaaccuguacgagaaaguacgaaaucagcucaagaacaaugcaaaggagaucggaaacggcuguuuugaguucuaucacaaaugcgauaauacuuguauggagagcguuaagaacgggaccuacgacuauccuaaauacucagaagaggccaagcugaauagagaagagauugauggagugaaacuugagaguacaaggaucuaucaaauucuggcuauauacuccaccgucgcgagcucuuuggugcucgucgugucacugggugcaaucaguuuuuggaugugcagcaacggcuccuuacagugccggauuuguaucuga

SEQ ID NO: 136292 - RNA, 1701 nt, Artificial Sequence
  derived and/or modified CDS sequence (opt3) from hemagglutinin__InfluenzaA__AFB77638
augaaggccauccuggugguccuccuuuacaccuucgcuacagcaaacgccgacacucugugcauuggcuaucacgcgaauaacagcacggauaccguugacacaguguuggagaaaaauguaacugugacccauuccgucaacuuacuggaagauaagcacaaugggaaacuauguaagcucagaggaguggcuccccugcaucuugguaaaugcaacauagccggcuggauccuggggaauccugagugugaaucuuugucaacagcaaguagcugguccuacauuguugagaccucuucgucagacaacggaacuugcuauccaggcgauuuuaucaauuacgaggagcucagggagcagcugagcaguguguccucuuucgaacgguuugagauuuucccgaagacaagcuccuggcccaaccacgacucaaauaagggugucaccgccgcuuguccucaugcaggggccaaaaguuuuuauaagaaccugaucuggcucgugaaaaagggaaauagcuacccaaaauuaucuaaguucuauauaaacgauaagggcaaagaaguacugguucuuuggggcauccaccaccccuccacgacugcugaccaacagucauuguaccagaaugccgaugcguacguguuugucgggaccagccgcuauaguaagaaauucaagccugagauugcaauccgaccaaaagugcgugaccaggagggaagaaugaacuacuauuggacacugguggaacccggugauaagauuacuuuugaggccaccggcaaccuagucguuccuagguacgcuuucgccauggaacggaaugcagggucuggaaucauaauuuccgacacaccagugcaugauugcaacaccacgugucaaacuccgaaaggcgcuaucaauacaagccuccccuuucagaacauucacccuaucaccaucgguaagugcccaaaguauguaaaaucgacuaagcugcgccuugccacagggcugagaaaugugcccucuauucaguccaggggauuguucggcgcgauagccggcuuuaucgaagggggauggaccgguauggucgacggcugguacggguaucaucaccagaacgaacaaggaucaggcuacgcagcugaccucaaaaguacgcagaaugccauugauaagaucaccaacaaagugaauagcguuauagagaagaugaacacacaguucacugcuguggguaaggaguucaaucaccuggaaaaacggauugagaacuuaaauaagaaagucgacgauggguuucuggacaucuggaccuacaacgccgaacuccuugugcuguuggagaaugaacgcacacuagauuaucaugacuccaacguaaagaaccuguacgagaaaguucgaaaucagcucaagaacaaugcaaaggagaucggcaacggauguuucgaauuuuaucacaaaugcgauaauacuuguauggagucugugaagaacggcaccuacgacuauccuaaauacagcgaagaggccaagcugaauagagaagagauugauggggucaaacuugagucaacaaggaucuaucaaauucuggcuauauacaguaccguggcguccagcuugguccucgugguuucucugggagcaaucucauucuggaugugcaguaacgguagcuuacagugccggauuuguaucuga

SEQ ID NO: 136293 - RNA, 1701 nt, Artificial Sequence; identical to SEQ ID NO: 134915
  derived and/or modified CDS sequence (opt3) from hemagglutinin__InfluenzaA__AFB77639

SEQ ID NO: 136294 - RNA, 1701 nt, Artificial Sequence
  derived and/or modified CDS sequence (opt3) from hemagglutinin__InfluenzaA__AFB77640
augaaggccauccuggugguccuccuuuacaccuucgcuacagcaaacgccgacacucugugcauuggcuaucacgcgaauaacagcacggauaccguugacacaguguuggagaaaaauguaacugugacccauuccgucaacuuacuggaagauaagcacaaugggaaacuauguaagcucagaggaguggcuccccugcaucuugguaaaugcaacauagccggcuggauccuggggaauccugagugugaaucuuugucaacagcaaguagcugguccuacauuguugagaccucuucgucagacaacggaacuugcuauccaggcgauuuuaucaauuacgaagaacucagggagcagcugagcaguguguccucuuucgaacgguuugagauuuucccgaagacaagcuccuggcccaaccacgacucaaauaagggugucaccgccgcuuguccucaugcaggggccaaaaguuuuuauaagaaccugaucuggcucgugaaaaagggaaauagcuacccaaaauuaucuaaguccuauauaaacgauaagggcaaagaaguacugguucuuuggggcauccaccaccccucaacgacugcugaccaacagggguuguaccagaaugccgaugcguacguguucgucggaaccagccgcuauaguaagaaauuuaagccugagauugcaauccgaccaaaagugcgugaccaggaggguagaaugaacuacuauuggacacugguggaacccggcgauaagauuacuuucgaggccaccgggaaccuagucguuccuagguacgcuuuugccauggaacggaaugcaggaucuggcaucauaauuuccgacacaccagugcaugauugcaacaccacgugucaaacuccgaaaggugcuaucaauacaagccuccccuuccagaacauucacccuaucaccaucgggaagugcccaaaguauguaaaaucgacuaagcugcgccuugccacaggacugagaaaugugcccucuauucaguccaggggcuuguuuggcgcgauagccggguucaucgagggagguuggaccggcauggucgacgggugguacggauaucaucaccagaacgaacaaggcucagguuacgcagcugaccucaaaaguacgcagaaugccauugauaagaucaccaacaaagugaauagcguuauagagaagaugaacacacaguuuacugcuguggggaaggaguucaaucaccuggaaaaacggauugagaacuuaaauaagaaagucgacgauggcuuccuggacaucuggaccuacaacgccgaacuccuugugcuguuggagaaugaacgcacacuagauuaucaugacuccaacguaaagaaccuguacgagaaaguucgaaaucagcucaagaacaaugcaaaggagaucggaaacggcuguuuugaguucuaucacaaaugcgauaauacuuguauggagucugugaagaacgggaccuacgacuauccuaaauacagcgaagaggccaagcugaauagagaagagauugauggagucaaacuugagucaacaaggaucuaucaaauucuggcuauauacaguaccguggcguccagcuugguccucgugguuucucugggugcaaucucauuuuggaugugcaguaacggcagcuuacagugccggauuuguaucuga

SEQ ID NO: 136295 - RNA, 1701 nt, Artificial Sequence
  derived and/or modified CDS sequence (opt3) from hemagglutinin__InfluenzaA__AFB77641
augaaggccauccuggugguccuccuuuacaccuucgcuacagcaaacgccgacacucugugcauuggcuaucacgcgaauaacagcacggauaccguugacacaguguuggagaaaaauguaacugugacccauuccgucaacuuacuggaagauaagcacaaugggaaacuauguaagcucagaggaguggcuccccugcaucuugguaaaugcaacauagccggcuggauccuggggaauccugagugugaaucuuugucaacagcaaguagcugguccuacauuguugagaccucuucgucagacaacggaacuugcuauccaggcgauuuuaucaauuacgaggagcucagggagcagcugagcaguguguccucuuucgaacgguuugagauuuucccgaagacaagcuccuggcccaaccacgacucaaauaagggugucaccgccgcuuguccucaugcaggggccaaaaguuuuuauaagaaccugaucuggcucgugaaaaagggaaauagcuacccaaaauuaucuaaguccuauauaaacgauaagggcaaagaaguacugguucuuuggggcauccaccaccccucaacgacugcugaccaacagagcuuguaccagaaugccgaugcguacguguucgucgggaccagucgcuauucuaagaaauuuaagccugagauugcaauccgaccaaaagugcgugaccaggagggaagaaugaacuacuauuggacacugguggaacccggugauaagauuacuuucgaggccaccggcaaccuagucguuccuagguacgcuuuugccauggaacggaaugcaggguccggaaucauaauuagcgacacaccagugcaugauugcaacaccacgugucaaacuccgaaaggcgcuaucaauacaucgcuccccuuccagaacauucacccuaucaccaucgguaagugcccaaaguauguaaaaucuacuaagcugcgccuugccacagggcugagaaaugugcccuccauucagucaaggggauuguuuggcgcgauagccggcuucaucgaagggggauggaccgguauggucgacggcugguacggguaucaucaccagaacgaacaaggaaguggcuacgcagcugaccucaaaagcacgcagaaugccauugauaagaucaccaacaaaguuaauuccgugauagagaagaugaacacacaguuuacugcuguggguaaggaguucaaucaccuggaaaaacggauugagaacuuaaauaagaaagucgacgauggguuccuggacaucuggaccuacaacgccgaacuccuugugcuguuggagaaugaacgcacacuagauuaucaugacucuaacguaaagaaccuguacgagaaaguucgaaaucagcucaagaacaaugcaaaggagaucggcaacggauguuuugaguucuaucacaaaugcgauaauauguguauggaaagcgugaagaacggcacuuacgacuauccuaaauacucagaagaggccaagcugaauagagaagagauugauggggucaaacuugagaguaccaggaucuaucaaauucuggcuauauacuccacaguggcgagcucuuugguccucgugguuucacugggagcaaucaguuuuuggaugugcagcaacgguuccuuacagugccggauuuguaucuga

SEQ ID NO: 136296 - RNA, 1701 nt, Artificial Sequence; identical to SEQ ID NO: 134915
  derived and/or modified CDS sequence (opt3) from hemagglutinin__InfluenzaA__AFB77642

SEQ ID NO: 136297 - RNA, 1701 nt, Artificial Sequence
  derived and/or modified CDS sequence (opt3) from hemagglutinin__InfluenzaA__AFB77643
augaaggccauccuggugguccuccuuuacaccuucgcuacagcaaacgccgacacucugugcauuggcuaucacgcgaauaacagcacggauaccguugacacaguguuggagaaaaauguaacugugacccauuccgucaacuuacuggaagauaagcacaaugggaaacuauguaagcucagaggaguggcuccccugcaucuugguaaaugcaacauagccggcuggauccuggggaauccugagugugaaucuuugucaacagcaaguagcugguccuacauuguugagaccucuucgucagacaacggaacuugcuauccaggcgauuuuaucaauuacgaggagcucagggagcagcugagcaguguguccucuuucgaacgguuugagauuuucccgaagcccagcuccuggccuaaccacgacucaaauaagggugucacagccgcuuguccacaugcaggggccaaaaguuuuuauaagaaccugaucuggcucgugaaaaagggaaauagcuaccccaaauuaucuaaguccuauauaaacgauaagggcaaagaaguacugguucuuuggggcauccaccacccuucaaccacggcugaccaacagagcuuguaccagaaugccgaugcguacguguucgucgggacuucccgcuauucuaagaaauuuaagccagagauugcaauccgacccaaagugcgugaccaggagggaagaaugaacuacuauuggacccugguggaaccuggugauaagauuacauucgaggccacuggcaaccuagucguuccaagguacgcuuuugccauggaacggaaugcaggguccggaaucauaauuagcgacaccccggugcaugauugcaacacaaccugucaaacgcccaaaggcgcuaucaauacuucgcucccuuuccagaacauucacccaaucacaaucgguaagugccccaaguauguaaaaucuaccaagcugcgccuugccacugggcugagaaaugugccuuccauucagucaaggggauuguuuggcgcgauagccggcuucaucgaagggggauggacagguauggucgacggcugguacggguaucaucaccagaacgaacaaggaaguggcuacgcagcugaccucaaaagcacccagaaugccauugauaagaucacgaacaaagugaauaguguuauagagaagaugaacacccaguuuacagcuguggguaaggaguucaaucaccuggaaaaacggauugagaacuuaaauaagaaagucgacgauggguuccuggacaucuggacuuacaacgccgaacuccuugugcuguuggagaaugaacgcacccuagauuaucaugacucuaacguaaagaaccuguacgagaaaguucgaaaucagcucaagaacaaugcaaaggagaucggcaacggauguuuugaguucuaucacaaaugcgauaauacauguauggaaagcgugaagaacggcacuuacgacgauaccaaagacucagaagaggccaagcugaauagagaagagauugauggggucaaacuugagaguacaaggaucuaucaaauucuggcuauauacuccaccguggcgagcucuuugguccucgugguuucacugggagcaaucaguuuuuggaugugcagcaacgguuccuuacagugccggauuuguaucuga

SEQ ID NO: 136298 - RNA, 1701 nt, Artificial Sequence
  derived and/or modified CDS sequence (opt3) from hemagglutinin__InfluenzaA__AFB77691
augaagaccaucauugcccugagcuacauacucugccuuguguucgcucagaaacugcccggcaacgacaauuccacagcaacuuuguguuuagggcaccaugccgucccuaacggaacgaucguuaagaccauuacaaaugaucaaaucgaggugacuaacgcgaccgaacugguacaaaauucuucaacaggugagauuugcgacaguccacaccagauccuagauggcgaaaacuguacccucauagacgcucugcuuggggauccgcagugcgacggauuucagaauaaaaagugggaucuguucguggagagaagcaaagccuauuccaacuguuaccccuaugacgucccugauuacgcaucuuugaggucgcucguggccucaagcggcacucuggaauuuaauaacgagaguuucaauuggacagguguuacccagaacgggacguccucugcuugcauccggcgcagcaauaacuccuuuuucucacgacugaauuggcucacucauuuaaacuuuaaguauccagcacugaacgugaccaugcccaauaacgagcaguucgaaaaacuuuacauuuggggaguccaccauccuggcacagacaaagaucagaucuuuuuguaugcccaagcuaguggccguauuacugugagcaccaagagaucucagcaggccguaaucccaaauauaggguccaggcugcggguucgcaacauucccucaagaaucagcauuuacuggacaaucgugaaaccuggagacauccuacucauuaauaguaccgguaaccugaaugcgccaaggggcuacuucaagauacggucugggaaauccagcaucaugcgcucggaugcaccgauuggaaaguguaacucugagugcaucacgcccaauggcuccauaccuaacgacaagccauuucagaaugucaaccgaauuacuuauggugccugucccagauacgugaaacaaaauacacuuaagcuggcuaccgggaugaggaacgugccugaaaaacagacucggggaaucuucggcgccaucgcaggcuuuauugagaaugggugggagggaauggucgacgguugguauggcuuccgucaccagaacucagaagggcgcggacaagcugccgauuugaagaguacacaggcggccaucgaccagauuaacggcaaacucaauagacugauagguaagaccaacgagaaauuccaccagaucgaaaaggaguuuagcgaaguugaggggaggauucaagauuuagagaaguacguggaagacacgaaaaucgaucugugguccuauaaugcagagcuccuuguagcucuggaaaaccagcauaccaucgacuugacagauucugagaugaauaagcuauucgaaaagacuaagaaccagcugcgggagaaugccgaggacaugggcaacggaugcuuuaaaauuuaccacaagugugauaauaccugcauaggcagcauccgaaacgggacauaugaccaugaugcuuaccgcgacgaagcccucaauaacagauuccagauuaagggaguggagcugaaaucagguuacaaggacuggauccuuuggauuaguuuugcaaucuccugcuuccuguugugugucgcccuccugggcuuuauaaugugggcuugccaaaaagggaauaucagguguaacauuugcaucuga

SEQ ID NO: 136299 - RNA, 1701 nt, Artificial Sequence
  derived and/or modified CDS sequence (opt3) from hemagglutinin__InfluenzaA__AFB77692
augaagaccaucauugcccugagcuacauacucugccuuguguucgcucagaaacugcccggcaacgacaauuccacagcaacuuuguguuuagggcaccaugccgucccuaacggaacgaucguuaagaccauuacaaaugaucaaaucgaggugacuaacgcgaccgaacugguacaaaauucuucaacaggugagauuugcgacaguccacaccagauccuagauggcgaaaacuguacccucauagacgcucugcuuggggauccgcagugcgacggauuucagaauaaaaagugggaucuguucguggagagaagcaaagccuauuccaacuguuaccccuaugacgucccugauuacgcaucuuugaggucgcucguggccucaagcggcacucuggaauuuaauaacgagaguuucaauuggacagguguuacccagaacgggacguccucugcuugcauccggcgcagcaauaacuccuuuuucucacgacugaauuggcucacucauuuaaacuuuaaguauccagcacugaacgugaccaugcccaauaacgagcaguucgacaaacuuuacauuuggggaguccaccauccuggcacagauaaggaccagaucuuuuuguaugcccaagcuaguggccguauuacugugagcaccaagagaucucagcaggccguaaucccaaauacaggguccaggccccggguucgcaacauaccuucaagaauuagcaucuacuggaccauugugaaaccaggagauauccugcuaaucaauaguacggguaaccucauugcgccgaggggcuacuucaagauacggucugggaaauccagcaucaugcgcucggacgcacccauuggaaaguguaauucugaaugcaucacuccuaacggcuccauaccaaaugacaagcccuuucagaacgucaaucgaauuacauauggugccuguccuagauacgugaaacaaaacacccugaaacuugcuacugggaugaggaaugugccagagaagcagacacggggaaucuucggcgccaucgcaggcuuuauugaaaacgggugggagggaauggucgaugguugguauggcuuccgucaccaaaauucagaggggcgcggacaggcugccgaccugaagaguacccaggcggccaucgaucagauuaacggcaaauugaacagacucauagguaagacgaaugaaaaauuccaccagaucgagaaggaauuuagcgagguugaagggaggauucaagaccuggagaaguacguggaggauaccaaaaucgacuuaugguccuauaacgcagaacugcucguagcucuugagaaucagcauacaaucgaucugacugacucugaaaugaacaaguuguucgagaaaaccaagaaacagcuacgggaaaaugccgaggauaugggcaacggaugcuuuaagauuuaccacaagugugacaaugcuugcauaggcagcauccgaaacgggacauaugaucaugacguguaccgcgacgaggcccugaauaacagauuccagauuaaaggagucgaacucaagucagguuacaaagauuggauccuguggauuaguuuugcaaucuccugcuuccuucuguguguggccuugcucggcuuuauaaugugggcuugccaaaaggggaauaucagguguaacauuugcaucuga

SEQ ID NO: 136300 - RNA, 1701 nt, Artificial Sequence; identical to SEQ ID NO: 135830
  derived and/or modified CDS sequence (opt3) from hemagglutinin__InfluenzaA__AFB77693

SEQ ID NO: 136301 - RNA, 1701 nt, Artificial Sequence
  derived and/or modified CDS sequence (opt3) from hemagglutinin__InfluenzaA__AFB77694
augaagaccaucauugcccugagcuacauacucugccuuguguucgcucagaaacugcccggcaacgacaauuccacagcaacuuuguguuuagggcaccaugccgucccuaacggaacgaucguuaagaccauugcgaaugaucaaaucgaggugacaaacgcuacugaacugguacaaaauucuucaaccggugagauuugcgacaguccacaccagauccuagauggcgaaaacuguacacucauagacgcccugcuuggggauccgcagugcgacgauuuucagaauaaaaagugggaccuguucguggagagaagcaaagcauauuccaacuguuaccccuaugaugucccugacuacgccucuuugaggucgcucguggcuucaagcggaacccuggaauuuaauaacgagaguuucaauuggacuggcguuacacagaacgguaccuccucugcaugcauccggcgcagcaauaacuccuuuuucucacgacugaauuggcucacgcauuuaaacuuuaaguauccagcccugaacgugacuaugcccaauaacgagcaguucgauaaacuuuacauuuggggaguccaccauccugggaccgacaaggaucagaucuuuuuguaugcucaagccaguggccguauuacagugagcacuaagagaucucagcaggcgguaaucccaaauauaggcuccaggccccggguucgcaacauuccuucaagaaucagcauuuacuggaccaucgugaaaccaggggacauccugcuaauuaauaguacaggaaaccucauagcaccgagggguuacuucaagauccggucuggcaaauccagcauuaugcgcucggacgcccccaucgggaaguguaauucugaaugcauaaccccuaacggauccauuccaaaugauaagcccuuucagaacgucaaucgaaucacguauggcgcuuguccuagauacgugaaacaaaacacucugaaacuugccacagguaugaggaaugugccagagaagcagacccgggggaucuucggagcaauugcuggcuuuaucgaaaacggcugggaggggauggucgacggaugguaugguuuccgucaccaaaauucagagggccgcgggcaggccgcggaucugaagaguacucaggccgcaauugaccagauaaacggaaaauugaacagacucaucggcaagacaaaugaaaaauuccaccagauugagaaggaauuuagcgagguugaagguaggauccaagaucuggagaaguacguggaggacaccaaaaucgauuuaugguccuauaacgcugaacugcucguagcccuugagaaucagcauacgauugaccugaccgauucugaaaugaacaaguuguucgagaaaacaaagaaacagcuacgggaaaaugcugaggacauggggaacggcugcuuuaagauauaccacaagugugauaauacuugcaucggaagcauucgaaacggcaccuaugaccaugacguguaccgcgaugaggcccugaauaacagauuccagaucaaaggggucgaacucaagucaggauacaaagacuggauucuguggaucaguuuugcaauauccugcuuccuucuguguguggccuugcucgguuuuaucaugugggcuugccaaaagggcaauauuagguguaacaucugcauuuga

SEQ ID NO: 136302 - RNA, 1701 nt, Artificial Sequence
  derived and/or modified CDS sequence (opt3) from hemagglutinin__InfluenzaA__AFB77695
augaagaccaucauugcccugagcuacauacucugccuuguguucgcucagaaacugcccggcaacgacaauuccacagcaacuuuguguuuagggcaccaugccgucccuaacggaacgaucguuaagaccauuacaaaugaucaaaucgaggugacuaacgcgaccgaacugguacaaaauucuucaacaggugagauuugcgacaguccacaccagauccuagauggcgaaaacuguacccucauagacgcucugcuuggggauccgcagugcgacgauuuucagaauaaaaagugggaccuguucguggagagaagcaaagccuauuccaacuguuaccccuaugaugucccugacuacgcaucuuugaggucgcucguggccucaagcggaacucuggaauuuaauaacgagaguuucaauuggacaggcguuacccagaacgguacguccucugcuugcauccggcgcagcaauaacuccuuuuucucacgacugaauuggcucacucauuuaaacuuuaaguauccagcacugaacgugaccaugcccaauaacgagcaguucgauaaacuuuacauuuggggaguccaccauccugggacagacaaggaucagaucuuuuuguaugcccaagcuaguggccguauuacugugagcaccaagagaucucagcaggccguaaucccaaauauaggcuccaggccccggguucgcaacauuccuucaagaaucagcauuuacuggacaaucgugaaaccaggggacauccugcuaauuaauaguaccggaaaccucauagcgccgagggguuacuucaagauccggucuggcaaauccagcauuaugcgcucggacgcacccaucgggaaguguaauucugaaugcauaacgccuaacggauccauuccaaaugauaagcccuuucagaacgucaaucgaaucacuuauggcgccuguccuagauacgugaaacaaaacacacugaaacuugcuaccgguaugaggaaugugccagagaagcagacucgggggaucuucggagccauugcaggcuuuaucgaaaacggcugggaggggauggucgacggaugguaugguuuccgucaccaaaauucagagggccgcgggcaggcugccgaucugaagaguacacaggcggccauugaccagauaaacggaaaauugaacagacucaucggcaagaccaaugaaaaauuccaccagauugagaaggaauuuagcgagguugaagguaggauccaagaucuggagaaguacguggaggacacgaaaaucgauuuaugguccuauaacgcagaacugcucguagcucuugagaaucagcauaccauugaccugacagauucugaaaugaacaaguuguucgagaaaacuaagaaacagcuacgggaaaaugccgaggacauggggaacggcugcuuuaagauauaccacaagugugauaaugcuugcaucggaagcauucgaaacggcaccuaugaccaugacguguaccgcgaugaggcccugaauaacagauuccagaucaaaggggucgaacucaagucaggauacaaagacuggauucuguggaucaguuuugcaauauccugcuuccuucuguguguggccuugcucgguuuuaucaugugggcuugccaaaagggcaauauuagguguaacaucugcauuuga

SEQ ID NO: 136303 - RNA, 1701 nt, Artificial Sequence
  derived and/or modified CDS sequence (opt3) from hemagglutinin__InfluenzaA__AFB78126
augaagaccaucauugcccugagcuacauacucugccuuguguucgcucagaaacugcccggcaacgacaauuccacagcaacuuuguguuuagggcaccaugccgucucuaacggaacgcugguuaagaccaucacaaaugaucaaauugaggugacuaacgcgaccgaacuuguacagucaaguagcacagguagaaucugcgacuccccucaccagauucucgauggcgagaauuguacccugaucgacgcccuucugggggauccacauugcgacggauuucagaacaaagaaugggauuuguucguggagaggucuaaggcuuauucgaauuguuacccguaugacguccccgauuacgcaucacuccggagccugguggccaguuccggcacucuggaauuuaacaaugagucuuucaacuggacagguguugcucaagacgggaccagcuccgcaugcaaacgccgaucaaauaagagcuuuuucagccgucucaacugguuacaccagcugaaguauaaauacccugcccuuaaugugacgaugccaaacaaugagaaguuugauaaauuguauauauggggaguccaucaccccucuacugacuccgaucagaucucaauuuacgcucaggccagcggcagagugaccguaaguacaaagaggucucaacagacuguuaucccuaacauuggcuccagcccaugggugcgcggggcgucgucucggaucuccauauacuggaccauugucaaacccggagacauccugcuaauuaacucaacagguaaucucaucgcaccuagaggcuauuucaagaucaggagugggaagaguuccauuaugcggucugacgccccaauaggaaaauguaacagcgaaugcaucaccccgaauggcucaauucccaacgauaagccuuuucagaaugugaaccgcaucacguacggugcuuguccacgauaugugaaacagaauacucugaagcuagccacagggaugagaaacguccccgagaaacaaaccaggggaauauucggcgcaauugcuggcuuuaucgaaaaugggugggagggaaugguugacgguugguacggcuuccggcaccagaacagugaggggacuggacaggccgcggaucugaaguccacacaagccgcaaccaaucagaucaacggcaaauugaaucgucucauugaaaagacgaacgagaaguuucaucagaucgaaaaagaguucagcgaaguggagggucgcauucaggaccuggagaaguauguagaagauaccaaaauagacuuauggucuuacaaugcugagcugcucguggcccuugaaaaccaacacacaaucgaucugacugacucagagaugaacaaguuguucgaaagaaccaaaaagcagcuaagggagaaugcugaggauauggggaacggcugcuuuaagauuuaucauaaaugugacaaugccugcaucggaaguauccggaacggcacauacgaucacgacgucuaccgagacgaagcacugaauaaccgcuuccagauuaaggggguggagcucaaaagcggauauaaggauuggauacuguggaucuccuuugccauuucuugcuuccuucuguguguuguguugcucgguuuuaucaugugggcuugccagaaaggcaauauuagauguaacaucugcauauga

SEQ ID NO: 136304 - RNA, 1701 nt, Artificial Sequence
  derived and/or modified CDS sequence (opt3) from hemagglutinin__InfluenzaA__AFC34056
augaagaccaucauugcccugagcuacauacucugccuuguguucgcucagaaacugcccggcaacgacaauuccacagcaacuuuguguuuagggcaccaugccgucccuaacggaacgaucguuaagaccauuacaaaugaucaaaucgaggugacuaacgcgaccgaacugguacagucuucaaguacaggugagauuugcgacagcccacaccagauccuagauggcgaaaauuguacccucauagacgcucugcuuggggauccgcagugcgacggauuucaaaacaaaaagugggaucuguucguggagagauccaaagccuauucuaauuguuaccccuaugacgucccugauuacgcaucguugaggucacucguggccagcaguggcacucuggaauuuaacaaugaguccuucaacuggacagguguuacccagaaugggacgucuagcgcuugcauccggcgcuccaacucaaguuucuuuagccgacugaauuggcucacucauuuaaacuuuaaguauccagcacugaaugugaccaugcccaacaacgagcaguucgacaaacuuuacauuuggggaguccaccauccuggcacagauaaggaccagaucuuuuuguaugcccaaucuuccggccguauuacugugucaaccaagagaagccagcaggcuguaaucccaaauauagggaguaggccccggauucgcaacaucccuucuagaauuuccaucuacuggacaaucguuaaaccaggagauauucugcuaauaaauagcaccgguaaccucaucgccccgaggggcuacuucaagauucggucggggaaaucuuccaucaugcgcucagacgcgcccauaggaaaguguaauagugaaugcauuacgccuaacggcagcaucccaaaugacaagcccuuucagaacgugaaucgaaucacuuauggugcauguccuagauacgucaaacaaaggacacugaaacuugccaccgggaugcggaacgugccagagaagcagacucguggaauuuucggcgcuaucgccggcuuuauugaaaaugggugggagggaaugguggaugguugguauggcuuccgccaccagaacuccgaggggagaggacaagcagcugaccugaagucuacacaggccgcgauagaucagaucaauggcaaauugaacaggcucauugguaagaccaaugaaaaauuccaccagaucgagaaggaauuuagcgaggucgaagggcggauccaagaccuggagaaguacguugaggauacgaaaauugacuuauggucauauaacgccgaacugcucguggcacuugagaaccagcauaccauagaucugacagacagugaaaugaauaaguuguucgagaaaacuaagaaacagcuacgagaaaacgcugaggauaugggcaauggaugcuuuaagaucuaccacaagugugacaacgccugcauuggcuccauccgcaaugggaccuauaaccaugauguauacagagacgaggcucugaauaacagguuccagauuaaaggaguggaacucaagagcgguuacaaagacuggauccuguggauaucuuuugccaucucaugcuuccuucugugugucgcauugcucggcuuuauuaugugggccugccaaaaggggaauauccgguguaacauuugcaucuga

SEQ ID NO: 136305 - RNA, 1701 nt, Artificial Sequence; identical to SEQ ID NO: 136304
  derived and/or modified CDS sequence (opt3) from hemagglutinin__InfluenzaA__AFC34057

SEQ ID NO: 136306 - RNA, 1701 nt, Artificial Sequence
  derived and/or modified CDS sequence (opt3) from hemagglutinin__InfluenzaA__AFD32426
augaaggccaaccugcucgugcuucugagcgcuuuggcagccgcggacgcugauaccaucugcauuggcuaccacgccaauaacuccacagacacugucgauacgguuuuagagaaaaaugugaccguaacacauucugugaaccugcuagaagacucacacaaugggaagcucuguaaacugagaggagucgcaccccuucaucuggguaagugcaacauagccggcaggaucuuggggaauccugagugugaaagucucagcacugcuuccucuuggucguauauuguggagaccccaucaagcgauaacggaacaugcuacccgggcgacuucaucgauuaugaagaacugcgggagcagcugaguuccguuucuagcuuugaacgcuucgagauuuuucccaaaaccuccucauggccuaaucacgacaguaacaagggugugacugcagccuguccacaugcuggggccaagagcuucuacaaaaaucucaucugguuagucaagaaaggaaacucuuaucccaagcuguccaaaucauacauaaaugauaagggcaaggaagugcuuguauuguggggcauccaccacccuagcacaagugcggaccaacagucucuguaucagaacgcagauaccuacguuuuugugggguccagccgauacucgaaaaaguucaaaccagagauugccauccgucccaaggucagagaccaggagggaaggaugaauuauuacuggacgcuaguggaaccuggugauaaaauuacuuuugaggcuaccggcaaccucguggucccacgguaugccuucgcaauggaacgcaacgcugggucuggaaucauaauuuccgacacaccgguucaugacugcaauacuaagugucaaacaccccugggcgccaucaacucaagucuuccuuaccagaauauucacccagugaccaucggugagugccccaaauauguaagaagcgcgaagcugaggauggugaccggguugcggaacacgccuuccauccagucucgcggacucuuuggcgccauugcaggcuucauagaagggggauggacugguaugaucgauggcugguacggguaucaucaccagaaugagcaaggaagcggcuacgcugccgaccagaagucaacacagaacgcuauuaaugguaucaccaacaaagucaauacugugauagagaagaugaacauucaguuuacagccguugggaaagaguucaauaagcuggagaaacgaauggaaaacuuaaauaagaagguggaugacggcuuucuggauaucuggaccuacaacgcagagcuccuuguccuguuggaaaaugagagaacgcuagacuuccacgauaguaacgugaaaaaccuguaugagaagguaaaaucccaacucaagaauaacgccaaagaaaucggaaauggcuguuucgaguuuuaccauaagugcgacaacgaauguauggagagcguuaggaaugggaccuaugauuacccaaaguauucugaagagucaaaacugaaccgggagaagguggacggagucaaacuugaaaguauggguauuuaccagauccuggcuauuuauagcacaguggcguccucuuugguccuccuggugucguuaggcgcaaucagcuucuggaugugcuccaaugggucacugcagugccguauauguauuuga

SEQ ID NO: 136307 - RNA, 1698 nt, Artificial Sequence
  derived and/or modified CDS sequence (opt3) from hemagglutinin__InfluenzaA__AFD32427
augaaggccaaccugcucgugcuucugagcgcuuuggcagccgcggacgcugauaccaucugcauuggcuaccacgccaauaacuccacagacacugucgauacgguuuuagagaaaaaugugaccguaacacauucugugaaccugcuagaagacucacacaaugggaagcucugugaucuggacggagucaaaccccuuauacugagagauugcaguguggcagguugguugcucggcaacccuaugugugacgaguucaucaauguuccagaauggagcuauauuguggagaaggccaacccggucaaugaucugugcuaccccggggacuuuaacgauuaugaagaacugaaacaucucuuauccaggaucaaucacuucgagaagauucagaucauaccuaagucuucguggucaagccaugaagcuagucugggaguguccucugcauguccauaccaaggcaaaagcuccuuuuuccggaacguaguuuggcuuaucaagaaaaauucaacuuaucccaccauuaagcgcaguuacaacaauacaaaccaggaggacuugcuggugcuaugggguauccaccacccuaacgaugccgcugaacagaccaaacucuaucagaauccaacuacauacauuagcgucgggaccucuacgcugaaccaacgacuugugccccguaucgccacuagauccaaggugaauggacagucaggcaggauggaguuuuucuggaccauacugaagccuaacgacgcgauuaauuuugagagcaacggcaauuucaucgcaccagaauacgccuauaaaauugucaagaaaggggacaguacaaucaugaagucugaguuggaauacggaaacugcaauacuaaaugucagaccccgcucggugcuaucaacuccagccugcccuaucagaauauucauccuguuacaauaggcgagugcccaaaguacgugcggucggccaaauuacgcaugguaaccgggcugagaaacacgcccucuauccaauccaggggacucuuuggcgcaauugcugguuucaucgaagggggauggacuggcaugauagauggcugguauggguaccaccaucagaaugagcagggaucagguuaugccgcggaccagaagaguacacaaaacgccauuaauggcaucaccaacaaggugaacacugucaucgagaaaaugaauauucaguuuacagcaguggggaaggaguucaacaaacuugagaagcggauggaaaaucugaacaaaaagguugaugacggauuuuuggauaucuggaccuacaaugcugagcuacuggugcuccuggaaaacgagcgcacgcuugacuuccacgauagcaaugucaagaaccuguacgagaaagugaagucccaguugaaaaauaacgccaaggaaauuggcaaugguuguuucgaguuuuaucacaaaugcgacaacgaauguauggagucuguacgaaaugggaccuacgauuauccuaaguacagcgaagagucaaagcucaacagagagaaaguugacggcgugaagcuggaaaguaugggaauauaucaaaucuuagcuauuuacuccacagucgccagcucucuggugcuacucgucucacugggcgcaaucaguuucuggaugugcagcaaugggucccuucagugcaggaucuguauuuga

SEQ ID NO: 136308 - RNA, 1722 nt, Artificial Sequence
  derived and/or modified CDS sequence (opt3) from hemagglutinin__InfluenzaA__AFD32428
augaagaccaucauugcccugagcuacauacucugccuuguguucgcucagaaacugcccggcaacgacaauuccacagcaacuuuguguuuagggcaccaugccgucccuaacggaacgaucguuaagaccauuacaaaugaucaaaucgaggugacuaacgcgaccgaacugguacagucuucaaguacaggugagauuugcgaccuagauggcgugaaaccacucauccugagagacuguagcgucgcuggguggcuucugggaaauccgaugugcgaugaauuuauaaacgugcccgagugguccuauaucguugaaaaggccaauccugugaacgacuuguguuacccaggcgauuucaaugacuaugaggagcucaaacaucugcugucuaggauuaaccacuuugaaaagauccagauuauccccaagucgucauggagcagucacgaggcaucccucggugucucuagcgccugcccuuaccaggggaaauccucauucuuucggaaugugguaugguuaauaaagaaaaacaguaccuauccaacuauuaagcgcagcuacaauaacacaaaucaagaagaucugcuuguuuuguggggaauccaucaccccaacgacgcugcagagcagaccaaacuguaucagaacccuacgacuuacauuucugugggcaccuccacacuaaaucagcgacucgucccacguaucgccacuagaucaaaggugaacggccaaagcgggaggauggaguucuuuuggaccauccugaagccgaaugaugcuauuaacuucgaaaguaauggaaacuuuauagcccccgaguacgcguauaaaaucgugaagaaaggugacucuacaauuaugaaguccgaacuugaguacggcaauuguaacagcgaaugcaucaccccuaaugggucgauaccaaacgauaaacccuuccagaaugucaaccggauuacguauggagcauguccucgcuacguuaagcagaauacucugaaauuggccacaggcaugagaaacgugccagagaagcagaccagggguaucuuuggggcuaucgccggauucauugagaauggcugggaaggcaugguagacgggugguauggauuucggcaccaaaacucugagggucgcggccaggcagcugaccucaaguccacucaggccgcgaucgaucaaauuaacgggaaacugaaucgauuaauaggaaagacaaacgaaaaauuccaucagaucgagaaggaguucucagaaguggagggcaggauucaggaccuggaaaaauacgucgaggauaccaagaucgaccucuggaguuauaaugccgaacuucugguggcauuggagaaccagcacacgaucgaucuaaccgacagcgaaaugaauaagcuguuugagaaaacaaagaaacaacucagagagaacgcugaagauauggguaaugggugcuucaagauuuaccauaaaugugacaacgccugcauaggcuccauccggaauggaacuuacgaucacgacguuuaucgugaugaggcucugaacaaucgcuuucagauuaagggcguggaacuuaagucuggguacaaagacuggauccuguggauuagcuucgccaucucaugcuuuuugcucugugucgcacuguuaggauucauaaugugggccugccagaaggguaacaucagauguaauauuugcaucuga

SEQ ID NO: 136309 - RNA, 1704 nt, Artificial Sequence
  derived and/or modified CDS sequence (opt3) from hemagglutinin__InfluenzaA__AFD32429
augaagaccaucauugcccugagcuacauacucugccuuguguucgcucagaaacugcccggcaacgacaauuccacagcaacuuuguguuuagggcaccaugccgucccuaacggaacgaucguuaagaccauuacaaaugaucaaaucgaggugacuaacgcgaccgaacugguacagucuucaaguacaggugagauuugcacccagggcaaaagaccaacugaccuagggcaguguggacuccugggcacacuuaucgguccgccccaaugcgaucaguuucuggaguucgacgcugauuugauaaucgaaaggcgggaagggaccgacguguguuauccuggaaaguuuacgaaugaggagagccuccgccagauucugcgaggcuccggcgggaucgauaaagaaucuaugggauucacuuacucggguauucguaccaacggcgccacaucagcaugcagaaggagcgggaguuccuuuuaugccgagaugaaguggcugcucucuaauagcgacaacgcugaguucccacagaugacuaaguccuaccggaauccccgcaacaaaccugcauuaaucauauggggaguccaccauucaggcagugccaccgaacaaacaaagcuguaugguagcgggaauaaacuuauuaccgugggaucuuccaaguaccagcagucauuuacgccaagccccggcgcuagaccucagguuaacggccaaagugggaggaucgauuuccacugguugcugcuagacccaaaugauacugugacauuuaccuucaacggagccuuuauugcgccggaccgggcaucuuucuuucgcggugagucccucggcguccagagcgaugugccccuggacucgggguguaauucugaaugcaucacuccuaacggauccaucccaaacgacaaacccuuccagaauguaaaccgaauuacauauggcgccuguccuagauacguuaagcaaaauacccuuaagcuggcuacggguaugaggaacgugccagagaaacagacccgggggauauucggcgccaucgcaggauuuauugaaaauggcugggaggggauggucgauggaugguacgguuuccgucaucagaacucagaaggccgcgggcaggcugccgacuugaagaguacacaagcggccaucgaucagauaaauggaaaacucaacagacugauuggcaagacuaaugagaaauuucaccagaucgagaaggaguucagcgaaguggaagguaggauccaggacuuagagaaauauguggaagauaccaagauugaccugugguccuacaacgcagagcuccuugucgcucuggagaaucaacacacaaucgauuugacugacucugaaaugaacaagcuauuugagaaaaccaagaaacagcugcgggaaaaugccgaggauauggggaacggcugcuucaagauuuaucauaaaugugacaaugcuugcauaggaagcauccgaaacggcacauacgaucacgacguuuaucgcgacgaagcccucaacaauagauuucagauuaaggggguggagcugaagucaggauacaaagauuggauccuuuggaucaguuucgcaauuuccugcuuucuguuguguguagcccuccuggguuucauaaugugggcuugccagaagggcaacaucagguguaauauuugcaucuga

SEQ ID NO: 136310 - RNA, 1701 nt, Artificial Sequence; identical to SEQ ID NO: 128121
  derived and/or modified CDS sequence (opt3) from hemagglutinin__InfluenzaA__AFD63527

SEQ ID NO: 136311 - RNA, 1701 nt, Artificial Sequence
  derived and/or modified CDS sequence (opt3) from hemagglutinin__InfluenzaA__AFD63538
augaagaccaucauugcccugagcuacauacucugccuuguguucgcucagaaacugcccggcaacgacaauuccacagcaacuuuguguuuagggcaccaugccgucccuaacggaacgaucguuaagaccauuacaaaugaucaaaucgaggugacuaacgcgaccgaacugguacagucuucaaguacagguggcauuugcgacagcccacaccagauccuagauggggagaauuguacccucauagacgcucugcuuggagauccgcagugcgacggcuuucaaaacaaaaagugggaucuguucguggaaagauccaaagccuauucuaauuguuaccccuaugacgucccugauuacgcaucguugaggucaaucguggccagcagugguacucucgaguuuaacaaugaauccuucaacuggacagggguuacccagaauggaacgucuagcgcuugcaagcggaaguccaacaaaucauuuuucagucgccugaauuggcugacucaucucaaguauaaauacccagcauuaaacgugaccaugcccaauaacgagaaguuugacaaacuguauauuuggggcguccaccauccuggcacagauaacgaccagaucagccuuuacgcccaggcuucugggcgaauuacuguguccaccaagcguucacaacagacaguaaucccaaauauaggaagcagacccaggguucgggaugugaguucucgcauuuccaucuacuggaccauugucaagccuggugacaucuugcugaucaacagcacgggcaaucuaauugccccaagaggguauuucaaaauaaggucgggaaagucuuccaucaugcggucagacgcgccgauuggcaaauguaacagugagugcaucacucccaaugguagcauaccuaacgauaagccauuucagaaugugaaccgcauuacauacggggcauguccccgauaugugaaacagaauacccucaagcuggccacuggaaugagaaacgucccugaaaaacaaacaaggggcaucuucggcgcuaucgccggguuuauugagaauggaugggaagguaugguugacggcugguacggguuccggcaccagaacuccgagggaaccggccaggcagcugaucuuaagucuacgcaagccgcgaucaaucagauuaacgguaagcugaaucguuugauagggaaaaccaacgagaaguuucaccagaucgaaaaagaguucagcgaaguggagggccgcauucaggaccucgaaaaguauguagaggauacaaaaaucgaccuguggucauacaacgccgaguuacugguggcacucgaaaaucaacauacuaucgaucuuaccgacagugagaugaacaagcuguucgaaagaacaaagaaacaguugagggagaaugcugaagauaugggaaacggcugcuuuaagauuuaucacaaaugugacaaugccugcauaggguccauccggaacggaacuuacgaucaugacgucuaccgagacgaggcucuaaauaaccgcuaucagauuaaggguguggagcugaaaagcggcuacaaggauuggauccucuggauuucuuucgccaucucaugcuuucugcuuuguguugcacuguugggguucauaaugugggccugccagaagggaaauaucagauguaacauuugcaucuga

SEQ ID NO: 136312 - RNA, 1701 nt, Artificial Sequence
  derived and/or modified CDS sequence (opt3) from hemagglutinin__InfluenzaA__AFD63549
augaagaccaucauugcccugagcuacauacucugccuuguguucgcucagaaacugcccggcaacgacaauuccacagcaacuuuguguuuagggcaccaugccgucccuaacggaacgaucguuaagaccauuacaaaugaucaaaucgaggugacuaacgcgaccgaacugguacagauuucuucaacagguggcaucugcgacaguccacaccagauacuagauggggagaauuguacccucaucgacgcucugcuuggagauccgcagugcgacggcuuucaaaacaaaaagugggaucuguucguggaaagaagcaaagccuauuccaauuguuaccccuaugacgucccugauuacgcaucuuugaggucgcucguggccucaagcgguacucuggaguuuaacaaugaaaguuucgacuggacagggguuacccagaacggaacguccucugcuugcaagcggcgcagcaauaaguccuuuuucucacgacugaacuggcucacucauuuaaaauauaaguacccagcacugaaugugaccaugcccaacaaugagaaauuugauaaacuuuauauuuggggcguccaccauccuggcacagacaacgaucagaucaguuuguacgcccaggcuagcgggcguauuacugugucuaccaagagaucccaacagacaguaaucccaaacauaggaucaaggccccggguucgcgacgugagcaguagaauuucuaucuacuggaccauugucaagccuggugacauccugcuaaucaauuccacgggcaaccucauugccccaaggggguauuucaagauacggagcggaaaaucgucuaucaugcgcuccgaugcgccgauuggcaaguguaauucagagugcaucacucccaacgguaguauaccuaaugacaaaccauuucagaacgugaaucgaauuacauacggggcaugucccagauaugugaagcagaacacccugaaacuugccacuggaaugaggaaugucccugaaaagcaaacacggggcaucuucggcgcuaucgccggguuuauugagaacggaugggaagguaugguugauggcugguacggguuccgucaccagaauagcgagggaaccggccaggcagcugaccugaaauccacgcaagccgcgaucaaccagauuaaugguaaguugaaccgccucauagggaagaccaaugagaaauuucaccagaucgaaaaggaguucucugaaguggagggcaggauucaggaucuggaaaaauauguagaggacacaaagaucgauuuauggagcuacaacgccgagcugcucguggcacuugaaaaccaacauacuaucgaccugaccgauucagagaugaauaaauuguucgaaagaacaaagaagcagcuacgggagaacgcugaagacaugggaaauggcugcuuuaaaauuuaucacaagugugauaacgccugcauagggaguauccgaaauggaacuuacgaccaugacgucuaccgcgaugaggcucugaacaauagauuccagauuaaagguguggagcucaaguccggcuauaaagacuggauccuguggauuagcuuugccaucucuugcuuccuucuguguguugcauugcucggguuuauaaugugggccugccagaagggaaacaucagguguaauauuugcaucuga

SEQ ID NO: 136313 - RNA, 1701 nt, Artificial Sequence; identical to SEQ ID NO: 128121
  derived and/or modified CDS sequence (opt3) from hemagglutinin__InfluenzaA__AFD63571

SEQ ID NO: 136314 - RNA, 1701 nt, Artificial Sequence
  derived and/or modified CDS sequence (opt3) from hemagglutinin__InfluenzaA__AFD63615
augaagaccaucauugcccugagcuacauacucugccuuguguucgcucagaaacugcccggcaacgacaauuccacagcaacuuuguguuuagggcaccaugccgucccuaacggaacgaucguuaagaccauuacaaaugaucaaaucgaggugacuaacgcgaccgaacugguacagucuucaaguacagguggcauuugcgacagcccacaccagauccuagauggggagaauuguacccucauagacgcucugcuuggagauccgcagugcgacggcuuucaaaacaaaaagugggaucuguucguggaaagauccaaagccuauucuaauuguuaccccuaugacgucccugauuacgcaucguugaggucacucguggccagcagugguacucuggaguuuaacaaugaauccuucaacuggacagggguuacccagaauggaacgucuagcgcuugcaagcggaaguccaacaaaucauuuuucagucgccugaauuggcucacucauuuaaaguauaaauacccagcacugaacgugaccaugcccaauaacgagaaguuugacaaacuuuauaucuggggcguccaccauccuggcacagauaacgaccagauuagcuuguacgcccaggcuucugggcgaaucacuguguccaccaagcguucacaacagacaguaauuccaaauaucggaagcagacccaggguucgggaugugaguucucgcauauccauuuacuggaccaucgucaagccuggugacauucugcuaaucaacagcacgggcaaucucaucgccccaagaggguauuucaaaauuaggucgggaaagucuuccauaaugcggucagacgcgccgaucggcaaauguaacagugagugcauuacucccaaugguagcaucccuaacgauaagccauuucagaaugugaaccgcauaacauacggggcauguccccgauaugugaaacagaauacccugaaacuugccacuggaaugagaaacgucccugaaaagcaaacaaggggcauuuucggcgcuaucgccggguuuaucgagaauggaugggaagguaugguugacggcugguacggguuccggcaccagaacuccgagggaaccggccaggcagcugaucugaagucuacgcaagccgcgauuaaucagaucaacgguaaguugaaucgucucauugggaaaaccaacgagaaguuucaccagauagaaaaagaguucagcgaaguggaggaacgcauccaggaccuggagaaguauguagaggauacaaaaauugacuuauggucauacaacgccgaacugcucguggcacuugagaaucaacauacuaucgaucugaccgacagugaaaugaacaaguuguucgagagaacaaagaaacagcuaagggaaaaugcugaggauaugggcaacggaugcuuuaagaucuaucacaaaugugacaaugccugcauuggcuccauacggaacgggacuuacgaucaugacgucuaccgagacgaggcucugaauaaccgcuuccagaucaagggaguggaacucaaaagcgguuauaaggauuggauucuguggaucucuuuugccauuucaugcuuccuucuguguguugcauugcucggcuuuaucaugugggccugccagaaggggaauauaagauguaacaucugcauuuga

SEQ ID NO: 136315 - RNA, 1701 nt, Artificial Sequence
  derived and/or modified CDS sequence (opt3) from hemagglutinin__InfluenzaA__AFD63626
augaagaccaucauugcccugagcuacauacucugccuuguguucgcucagaaacugcccggcaacgacaauuccacagcaacuuuguguuuagggcaccaugccgucccuaacggaacgaucguuaagaccauuacaaaugaucaaaucgaggugacuaacgcgaccgaacugguacagauuucuucaacagguggcaucugcgacaguccacaccagauacuagauggggagaauuguacccucaucgacgcucugcuuggagauccgcagugcgacggcuuucaaaacaaaaagugggaucuguucguggaaagaagcaaagccuauuccaauuguuaccccuaugacgucccugauuacgcaucuuugaggucgcucguggccucaagcgguacucuggaguuuaacaaugaaaguuucgacuggacagggguuacccagaacggaacguccucugcuugcaagcggcgcagcaauaaguccuuuuucucacgacugaacuggcucacucauuuaaaauauaaguacccagcacugaaugugaccaugcccaacaaugagaaauuugauaaacuuuauauuuggggcguccaccauccuggcacagacagugaucagaucagcuuguacgcccaggcuucugggcguauuacuguguccaccaagagaucacaacagacaguaaucccaaacauaggaagcaggccccggguucgcgacauuaguucuagaaucuccauuuacuggaccaucgugaagccuggugacauccugcuaauuaacagcacgggcaaucucauagccccaaggggguauuucaagauccggucgggaaaaucuuccauuaugcgcucagaugcgccgaucggcaaguguaacagugagugcauaacucccaaugguagcauuccuaacgacaaaccauuucagaaugucaaccgaaucacauacggggcaugucccagauaugugaagcagaauacccugaaacuugccacuggaaugaggaacgugccugaaaagcaaacacggggcaucuucggcgcuauugccggguuuaucgagaauggaugggaagguauggucgauggcugguacggguuccgucaccagaacuccgagggaaccggccaggcagcugaccugaaaucuacgcaagccgcgauuaaucagauaaacgguaaguugaaucgccucaucgggaagaccaacgagaaauuucaccagauugaaaaggaguucagcgaaguugagggcagaauccaggaucuggaaaaauauguggaggacacaaagaucgauuuauggucauacaaugccgagcugcucguagcacuugaaaaccaacauacuauugaccugaccgauagugagaugaacaaauuguucgaaaggacaaagaagcagcuacgggagaaugcugaagacaugggaaacggcugcuuuaaaauauaucacaagugugauaaugccugcaucggguccauucgaaacggaacuuacgaccaugacguguaccgcgaugaggcucugaauaacagauuccagaucaaaggugucgagcucaagagcggcuauaaagacuggauucuguggaucucuuuugccauaucaugcuuccuucuguguguggcauugcucggguuuaucaugugggccugccagaagggaaauauuagguguaacaucugcauuuga

SEQ ID NO: 136316 - RNA, 1701 nt, Artificial Sequence
  derived and/or modified CDS sequence (opt3) from hemagglutinin__InfluenzaA__AFD63637
augaagaccaucauugcccugagcuacauacucugccuuguguucgcucagaaacugcccggcaacgacaauuccacagcaacuuuguguuuagggcaccaugccgucccuaacggaacgaucguuaagaccauuacaaaugaucaaaucgaggugacuaacgcgaccgaacugguacagauuucuucaacagguggcaucugcgacaguccacaccagauacuagauggggagaauuguacccucaucgacgcucugcuuggagauccgcagugcgacggcuuucaaaacaaaaagugggaucuguucguggaaagaagcaaagccuauuccaauuguuaccccuaugacgucccugauuacgcaucuuugaggucgcucguggccucaagcgguacucuggaguuuaacaaugaaaguuucgacuggacagggguuacccagaacggaacguccucuacuugcaagcggcgcagcaauaaguccuuuuucucacgacugaacuggcucacccauuuaaaauauaaguacccagcucugaaugugacaaugcccaacaaugagaaauuugauaaacuuuauauuuggggcguccaccauccuggcacugacagugaucagaucagcuuguacgcacaggccucugggcguauuaccguguccacaaagagaucacaacagaccguaaucccaaacauaggaagcaggccccggguucgcgacgugaguucuagaauuuccaucuacuggacgauugucaagccuggugacauccugcuaaucaacagcacuggcaaucucauugcuccaaggggguauuucaagauacggucgggaaaaucuuccaucaugcgcucagaugccccgauuggcaaguguaacagugagugcaucacacccaaugguagcauaccuaacgacaaaccauuucagaaugugaaccgaauuaccuacggggcgugucccagauaugugaagcagaauacucugaaacuugcaacaggaaugaggaacgucccugaaaagcaaacccggggcaucuucggcgccaucgcuggguuuauugagaauggaugggaagguaugguugauggcugguacggguuccgucaccagaacuccgagggaacgggccaggccgcagaccugaaaucuacccaagcugccaucaaucagauuaacgguaaguugaaucgccucauagggaagacaaacgagaaauuucaccagaucgaaaaggaguucagcgaaguggagggcaggauucaggaucuggaaaaauauguagaggacacuaagaucgauuuauggucauacaaugcggagcugcucguggcccuugaaaaccaacauaccaucgaccugacagauagugagaugaacaaauuguucgaaagaacuaagaagcagcuacgggagaaugcagaagacaugggaaacggcugcuuuaaaauuuaucacaagugugauaaugcuugcauaggguccauccgaaacggaaccuacgaccaugacgucuaccgcgaugaggcccugaauaacagauuccagauuaaagguguggagcucaagagcggcuauaaagacuggauccuguggauuucuuuugcuaucucaugcuuccuucuguguguugccuugcucggguuuauaaugugggcaugccagaagggaaauaucagguguaacauuugcaucuga

SEQ ID NO: 136317 - RNA, 1701 nt, Artificial Sequence
  derived and/or modified CDS sequence (opt3) from hemagglutinin__InfluenzaA__AFD63648
augaagaccaucauugcccugagcuacauacucugccuuguguucgcucagaaacugcccggcaacgacaauuccauggcaacauuguguuuagggcaccaugccgucccuaacggaacuaucguuaagacgauuaccaaugaucaaaucgaggugacaaacgcgacugaacugguacagauuucuucaaccgguggcaucugcgacaguccacaccagauacuagauggggagaauuguacacucaucgacgcucugcuuggagauccgcagugcgacggcuuucaaaacaaaaagugggaucuguucguggaaagaagcaaagccuauuccaauuguuaccccuaugacgucccugauuacgcaucuuugaggucgcucguggccucaagcgguacccuggaguuuaacaaugaaaguuucgacuggacugggguuacacagaacggaaccuccucugcuugcaagcggcgcagcaauaaguccuuuuucucacgacugaacuggcucacgcauuuaaaauauaaguacccagcacugaaugugacuaugcccaacaaugagaaauuugauaaacuuuauauuuggggcguccaccauccuggcaccgacagugaucagaucagcuuguacgcccaggcuucugggcguauuacaguguccacuaagagaucacaacagaccguaaucccaaacauaggaagcaggccccggguucgcgacgugaguucuagaauuuccaucuacuggacaauugucaagccuggugacauccugcuaaucaacagcaccggcaaucucauugccccaaggggguauuucaagauacggucgggaaaaucuuccaucaugcgcucagaugcgccgauuggcaaguguaacagugagugcaucacgcccaaugguagcauaccuaacgacaaaccauuucagaaugugaaccgaauuacuuacggggcaugucccagauaugugaagcagaauacacugaaacuugccaccggaaugaggaacgucccugaaaagcaaacucggggcaucuucggcgcuaucgccggguuuauugagaauggaugggaagguaugguugauggcugguacggguuccgucaccagaacuccgagggaacaggccaggcagcugaccugaaaucuacccaagccgcgaucaaucagauuaacgguaaguugaaucgccucauagggaagacgaacgagaaauuucaccagaucgaaaaggaguucagcgaaguggagggcaggauucaggaucuggaaaaauauguagaggacaccaagaucgauuuauggucauacaaugccgagcugcucguggcacuugaaaaccaacauacaaucgaccugacugauagugagaugaacaaauuguucgaaagaaccaagaagcagcuacgggagaaugcugaagacaugggaaacggcugcuuuaaaauuuaucacaagugugauaaugccugcauaggguccauccgaaacggaacauacgaccaugacgucuaccgcgaugaggcucugaauaacagauuccagauuaaagguguggagcucaagagcggcuauaaagacuggauccuguggauuucuuuugccaucucaugcuuccuucuguguguugcauugcucggguuuauaaugugggccugccagaagggaaauaucagguguaacauuugcaucuga

SEQ ID NO: 136318 - RNA, 1701 nt, Artificial Sequence; identical to SEQ ID NO: 128121
  derived and/or modified CDS sequence (opt3) from hemagglutinin__InfluenzaA__AFD63659

SEQ ID NO: 136319 - RNA, 1701 nt, Artificial Sequence
  derived and/or modified CDS sequence (opt3) from hemagglutinin__InfluenzaA__AFD63681
augaagaccaucauugcccugagcuacauacucugccuuguguucgcucagaaacugcccggcaacgacaauuccacagcaacuuuguguuuagggcaccaugccgucccuaacggaacgaucguuaagaccauuacaaaugaucaaaucgaggugacuaacgcgaccgaacugguacagucuucaaguacagguggcauuugcgacagcccacaccagauccuagauggggagaauuguacccucauagacgcucugcuuggagauccgcagugcgacggcuuucaaaacaaaaagugggaucuguucguggaaagauccaaagccuauucuaauuguuaccccuaugacgucccugauuacgcaucguugaggucacucguggccagcagugguacucuggaguuuaacaaugaauccuucaacuggacagggguuacccagaauggaacgucuagcgcuugcaagcggaaguccaacaaaucauuuuucagucgccugaauuggcucacucauuuaaaguauaaauacccagcacugaacgugaccaugcccaauaacgagaaguuugacaaacuuuauaucuggggcguccaccauccuggcacagauaacgaccagauuagcuuguacgcccaggcuucugggcgaaucacuguguccaccaagcguucacaacagacaguaauuccaaauaucggaagcagacccaggguucgggaugugaguucucgcauauccauuuacuggaccaucgucaagccuggugacauucugcuaaucaacagcacgggcaaucucaucgccccaagaggguauuucaaagugaggucgggaaagucuuccauuaugcggucagacgcgccgauaggcaaauguaacagugagugcaucacucccaaugguagcauuccuaacgauaagccauuucagaaugugaaccgcaucacauacggggcauguccccgauaugucaaacagaauacccugaaacuugccacuggaaugagaaacguuccugaaaagcaaacaaggggcauauucggcgcuauugccggguuuaucgagaauggaugggaagguaugguggacggcugguacggguuccggcaccagaacuccgagggaaccggccaggcagcugaucugaagucuacgcaagccgcgaucaaucagauuaacgguaaguugaaucgucucaucgggaaaaccaacgagaaguuucaccagauugaaaaagaguucagcgaaguagagggccgcauacaggaccuggaaaaguauguggaggauacaaaaaucgacuuauggucauacaacgccgagcugcucgucgcacuugaaaaucaacauacuauugaucugaccgacagugagaugaacaaguuguucgaaagaacaaagaaacagcuaagggagaaugcugaagauaugggaaacggcugcuuuaagaucuaucacaaaugugacaaugccugcaucggguccauucggaacggaacuuacgaucaugacguguaccgagacgaggcucugaauaaccgcuuccagauaaaggguguugagcucaaaagcggcuauaaggauuggauccuguggauuucuuuugccaucucaugcuuccuucuguguguggcauugcucggguuuauuaugugggccugccagaagggaaauaucagauguaacauaugcaucuga

SEQ ID NO: 136320 - RNA, 1701 nt, Artificial Sequence
  derived and/or modified CDS sequence (opt3) from hemagglutinin__InfluenzaA__AFD63692
augaagaccaucauugcccugagcuacauacucugccuuguguucgcucagaaacugcccggcaacgacaauuccacagcaacuuuguguuuagggcaccaugccgucccuaacggaacgaucguuaagaccauuacaaaugaucaaaucgaggugacuaacgcgaccgaacugguacagucuucaaguacagguggcauuugcgacagcccacaccagauccuagauggggagaauuguacccucauagacgcucugcuuggagauccgcagugcgacggcuuucaaaacaaaaagugggaucuguucguggaaagauccaaagccuauucuaauuguuaccccuaugacgucccugauuacgcaucguugaggucacucguggccagcagugguacucuggaguuuaacaaugaauccuucgacuggacagggguuacccagaacggaacgucuagcgcuugcaagcggcgcuccaauaagucauuuuucagucgacugaacuggcucacucauuuaaaauauaaguacccagcacugaaugugaccaugcccaacaaugagaaauuugauaaacuuuauaucuggggcgucuugcacccuggcacagacagcgaucagauuucucuguacgcccaggcuuccgggcguaucacugugucaaccaagagaagccaacagacaguaauuccaaacaucggaaguaggccccggguucgcgacgugucuuccagaauaagcauuuacuggaccaucgucaagccuggugacauucuacucaucaacucgacgggcaaucugaucgccccaaggggguauuucaagauucggucuggaaaauccucaauaaugcgcagugaugcgccgaucggcaaguguaacagcgagugcauuacucccaaugguuccaucccuaacgacaaaccauuucagaaugugaaccgaauaacauacggggcaugucccagauaugugaagcagaauacccuuaaacuggccacuggaaugaggaacgucccugaaaagcaaacacggggcauuuucggcgcuaucgccggguuuaucgagaauggaugggaagguaugguugauggcugguacggguuccgucaucagaacucugagggaaccggccaggcagcugacuugaaaagcacgcaagccgcgauuaaucagaucaacgguaagcucaaucgccugauugggaagaccaacgagaaauuucaccagauagaaaaggaguucucagaaguggagggcagaauccaggauuuagaaaaauauguagaggacacaaagauugaucuguggaguuacaaugccgagcuccuuguggcacuggaaaaccaacacacuaucgacuugaccgauuccgagaugaacaaacuauucgaaaggacaaagaagcagcugcgggagaaugcugaagacaugggaaacggcugcuuuaaaaucuaucauaagugugauaaugccugcauugggagcauacgaaacggaacuuacgaccacgacgucuaccgcgaugaggcucucaauaacagauuccagaucaaagguguggagcugaagucuggcuauaaagacuggauucuuuggaucucauuugccauuaguugcuuccuguuguguguugcacuccugggguuuaucaugugggccugccagaagggaaauauaagguguaacaucugcauuuga

SEQ ID NO: 136321 - RNA, 1701 nt, Artificial Sequence
  derived and/or modified CDS sequence (opt3) from hemagglutinin__InfluenzaA__AFD63703
augaagaccaucauugcccugagcuacauacucugccuuguguucgcucagaaacugcccggcaacgacaauuccacagcaacuuuguguuuagggcaccaugccgucccuaacggaacgaucguuaagaccauuacaaaugaucaaaucgaggugacuaacgcgaccgaacugguacagauuucuucaacaagugguaucugcgacagcccauaucagauacuagauggcgagaauuguacccucaucgacgcucugcuuggggauccgcagugcgacggauuucaaaacaaaaagugggaucuguucguggaaagauccaaagccuacucuaauuguuaucccuacgacgucccugauuaugcaucguugaggucacucguggccagcaguggcacucuggaguuuaacaaugaauccuucgacuggacagguguuacccagaacgggacgucuagcgcuugcaagcggcgcuccaauaagucauuuuucagucgacugaacuggcucacucacuuaaaauacaaguauccagcacugaaugugaccaugcccaacaaugagaaauuugauaaacuuuacauuuggggaguccaucacccuggcacagacagcgaucagaucucuuuguacgcccaggcuuccggccguauuacugugucaaccaagagaagccaacagacaguaaucccaaacauagggaguaggccccggguucgcgacgugucuucccagauuagcaucuauuggaccauugucaagccuggagacauccugcuaaucaacucgacggguaaucucauugccccaagaggcuacuucaagauaaggucugggaaauccucaaucaugcggagugaugcgccgauuggaaaguguaacagcgagugcaucacucccaauggcuccauaccuaacgacaaaccauuucagaaugugaaccgcauuacauauggugcauguccccgauacgugaagcaaaauacccugaaacuugccacugggaugagaaacgucccugaaaagcagacaaggggaaucuucggcgcuaucgccggcuuuauugagaaugggugggaaggaaugguugaugguugguauggcuuccggcaucagaacucugaggggaccggacaagcagcugaccugaaaagcacgcaggccgcgaucaaucagauuaacggcaaguugaaucgucucauagguaagaccaacgagaaauuucaccagaucgaaaaggaguucucagaaguggaggggcgcauucaagaucuggaaaaauacguagaggacacaaagaucgauuuauggaguuauaaugccgagcugcucguggcacuugaaaaccagcacacuaucgaccugaccgauuccgagaugaacaaauuguucgaaagaacaaagaagcagcuaagggagaaugcugaagacaugggcaacggaugcuuuaaaauuuaccauaagugugauaaugccugcauaggcagcauccggaacgggacuuacgaccacgacgucuaucgagaugaggcucugaauaaccgcuuccagauuaaaggaguggagcucaagucugguuacaaagacuggauccuguggauuucauuugccaucaguugcuuccuucuguguguugcauugcucggcuuuauaaugugggccugccaaaaggggaauaucagauguaacauuugcaucuga

SEQ ID NO: 136322 - RNA, 1701 nt, Artificial Sequence
  derived and/or modified CDS sequence (opt3) from hemagglutinin__InfluenzaA__AFD63714
augaagaccaucauugcccugagcuacauacucugccuuguguucgcucagaaacugcccggcaacgacaauuccacagcaacuuuguguuuagggcaccaugccgucccuaacggaacgaucguuaagaccauuacaaaugaucaaaucgaggugacuaacgcgaccgaacugguacagauuucuucaacagguggcaucugcgacaguccacaccagauacuagauggggagaauuguacccucaucgacgcucugcuuggagauccgcagugcgacggcuuucaaaacaaaaagugggaucuguucguggaaagaagcaaagccuauuccaauuguuaccccuaugacgucccugauuacgcaucuuugaggucgcucguggccucaagcgguacucuggaguuuaacaaugaaaguuucgacuggacagggguuacccagaacggaacguccucuacuugcaagcggcgcagcaauaaguccuuuuucucacgacugaacuggcucacccauuuaaaauauaaguacccagcucugaaugugacaaugcccaacaaugagaaauuugauaaacuuuauauuuggggcguccaccauccuggcacugacaacgaucagaucaguuuguacgcacaggccagcgggcguauuaccgugucuacaaagagaucccaacagaccguaaucccaaacauaggaucaaggccccggguucgcgacgugagcaguagaauuucuaucuacuggacgauugucaagccuggugacauccugcuaaucaauuccacuggcaaccucauugcuccaaggggguauuucaagauacggagcggaaaaucgucuaucaugcgcuccgaugccccgauuggcaaguguaauucagagugcaucacacccaacgguaguauaccuaaugacaaaccauuucagaacgugaaucgaauuaccuacggggcgugucccagauaugugaagcagaacacucugaaacuugcaacaggaaugaggaaugucccugaaaagcaaacccggggcaucuucggcgccaucgcuggguuuauugagaacggaugggaagguaugguugauggcugguacggguuccgucaccagaauagcgagggaacgggccaggccgcagaccugaaauccacccaagcugccaucaaccagauuaaugguaaguugaaccgccucauagggaagacaaaugagaaauuucaccagaucgaaaaggaguucucugaaguggagggcaggauucaggaucuggaaaaauauguagaggacacuaagaucgauuuauggagcuacaacgcggagcugcucguggcccuugaaaaccaacagaccaucgaccugacagauucagagaugaauaaauuguucgaaagaacuaagaagcagcuacgggagaacgcagaagacaugggaaauggcugcuuuaaaauuuaucauaagugugauaacgcuugcauagggaguauccgaaauggaaccuacgaccacgacgucuaccgcgaugaggcccugaacaauagauuccauauuaaagguguggagcucaaguccggcuauaaagacuggauccuguggauuagcuuugcuaucucuugcuuccuucuguguguugccuugcucggguuuauaaugugggcaugccagaagggaaacaucagguguaauauuugcaucuga

SEQ ID NO: 136323 - RNA, 1701 nt, Artificial Sequence
  derived and/or modified CDS sequence (opt3) from hemagglutinin__InfluenzaA__AFD63736
augaagaccaucauugcccugagcuacauacucugccuuguguucgcucagaaacugcccggcaacgacaauuccacagcaacuuuguguuuagggcaccaugccgucccuaacggaacgaucguuaagaccauuacaaaugaucaaaucgaggugacuaacgcgaccgaacugguacagauuucuucaacagguggcaucugcgacaguccacaccagauacuagauggggagaauuguacccucaucgacgcucugcuuggagauccgcagugcgacggcuuucaaaacaaaaagugggaucuguucguggaaagaagcaaagccuauuccaauuguuaccccuaugacgucccugauuacgcaucuuugaggucgcucguggccucaagcgguacucuggaguuuaacaaugaaaguuucgacuggacagggguuacccagaacggaacguccucuacuugcaagcggcgcagcaauaaguccuuuuucucacgacugaacuggcucacccauuuaaaauauaaguacccagcucugaaugugacaaugcccaacaaugagaaauuugauaaacuuuauauuuggggcguccaccauccuggcacugacaacgaucagaucaguuuguacgcacaggccagcgggcguauuaccgugucuacaaagagaucccaacagaccguaaucccaaacauaggaucaaggccccggguucgcgacgugagcaguagaauuucuaucuacuggacgauugucaagccuggugacauccugcuaaucaauuccacuggcaaccucauugcuccaaggggguauuucaagauacggagcggaaaaucgucuaucaugcgcuccgaugccccgauuggcaaguguaauucagagugcaucacacccaacgguaguauaccuaaugacaaaccauuucagaacgugaaucgaauuaccuacggggcgugucccagauaugugaagcagaacacucugaaacuugcaacaggaaugaggaaugucccugaaaagcaaacccggggcaucuucggcgccaucgcuggguuuauugagaacggaugggaagguaugguugauggcugguacggguuccgucaccagaauagcgagggaacgggccaggccgcagaccugaaauccacccaagcugccaucaaccagauuaaugguaaguugaaccgccucauagggaagacaaaugagaaauuucaccagaucgaaaaggaguucucugaaguggagggcaggauucaggaucuggaaaaauauguagaggacacuaagaucgauuuauggagcuacaacgcggagcugcucguggcccuugaaaaccaacauaccaucgaccugacagauucagagaugaauaaauuguucgaaagaacuaagaagcagcuacgggagaacgcagaagacaugggaaauggcugcuuuaaaauuuaucacaagugugauaacgcuugcauagggaguauccgaaauggaaccuacgaccaugacgucuaccgcgaugaggcccugaacaauagauuccacauuaaagguguggagcucaaguccggcuauaaagacuggauccuguggauuagcuuugcuaucucuugcuuccuucuguguguugccuugcucggguuuauaaugugggcaugccagaagggaaacaucagguguaauauuugcaucuga

SEQ ID NO: 136324 - RNA, 1701 nt, Artificial Sequence
  derived and/or modified CDS sequence (opt3) from hemagglutinin__InfluenzaA__AFD63747
augaagaccaucauugcccugagcuacauacucugccuuguguucgcucagaaacugcccggcaacgacaauuccacagcaacuuuguguuuagggcaccaugccgucccuaacggaacgaucguuaagaccauuacaaaugaucaaaucgaggugacuaacgcgaccgaacugguacagucuucaaguacagguggcauuugcgacagcccacaccagauccuagauggggagaauuguacccucauagacgcucugcuuggagauccgcagugcgacggcuuucaaaacaaaaagugggaucuguucguggaaagauccaaagccuauucuaauuguuaccccuaugacgucccugauuacgcaucguugaggucacucguggccagcagugguacucuggaguuuaacaaugaauccuucgacuggacagggguuacccagaacggaacgucuagcgcuugcaagcggcgcuccaauaagucauuuuucagucgacugaacuggcucacucauuuaaaauauaaguacccagcacugaaugugaccaugcccaacaaugagaaauuugauaaacuuuauaucuggggcguccaccauccuggcacagacagcgaucagauuucuuuguacgcccaggcuuccgggcguaucacugugucaaccaagagaagccaacagacaguaauuccaaacaucggaaguaggccccggguucgcgacgugucuuccagaauaagcauuuacuggaccaucgucaagccuggugacauucugcuaaucaacucgacgggcaaucucaucgccccaaggggguauuucaagauucggucuggaaaauccucaauaaugcgcagugaugcgccgaucggcaaguguaacagcgagugcauuacucccaaugguuccaucccuaacgacaaaccauuucagaaugugaaccgaauaacauacggggcaugucccagauaugugaagcagaauacccugaaacuugccacuggaaugaggaacgucccugaaaagcaaacacggggcauuuucggcgcuaucgccggguuuaucgagaauggaugggaagguaugguugauggcugguacggguuccgucaccagaacucugagggaaccggccaggcagcugaccugaaaagcacgcaagccgcgauuaaucagaucaacgguaaguugaaucgccucauugggaagaccaacgagaaauuucacagaauagaaaaggaguucucagaaguggagggcaggauccaggaucuggaaaaauauguagaggacacaaagauugauuuauggaguuacaaugccgagcugcucguggcacuugaaaaccagcauacuaucgaccugaccgauuccgagaugaacaaauuguucgaacggacaaagaagcaacuacgagagaaugcugaagacaugggaaacggcugcuuuaaaaucuaucacaagugugauaaugccugcauugggagcauacgcaacggaacuuacgaccaugacgucuacagagaugaggcucugaauaacagguuccagaucaaagguguggagcucaagucuggcuauaaagacuggauucuguggaucucauuugccauuaguugcuuccuucuguguguugcauugcucggguuuaucaugugggccugccagaagggaaauauacgguguaacaucugcauuuga

SEQ ID NO: 136325 - RNA, 1701 nt, Artificial Sequence
  derived and/or modified CDS sequence (opt3) from hemagglutinin__InfluenzaA__AFD63758
augaagaccaucauugcccugagcuacauacucugccuuguguucgcucagaaacugcccggcaacgacaauuccacagcaacuuuguguuuagggcaccaugccgucccuaacggaacgaucguuaagaccauuacaaaugaucaaaucgaggugacuaacgcgaccgaacugguacagucuucaaguacagguggcauuugcgacagcccacaccagauccuagauggggagaauuguacccucauagacgcucugcuuggagauccgcagugcgacggcuuucaaaacaaaaagugggaucuguucguggaaagauccaaagccuauucuaauuguuaccccuaugacgucccugauuacgcaucguugaggucacucguggccagcagugguacucuggaguuuaacaaugaauccuucaacuggacagggguuacccagaauggaacgucuagcgcuugcaagcggaaguccaacaaaucauuuuucagucgccugaauuggcucacucauuuaaaguauaaauacccagcacugaacgugaccaugcccaauaacgagaaguuugacaaacuuuauaucuggggcguccaccauccuggcacagauaacgaccagauuagcuuguacgcccaggcuucugggcgaaucacuguguccaccaagcguucacaacagacaguaauuccaaauaucggaagcagacccaggguucgggaugugaguucucgcauauccauuuacuggaccaucgucaagccuggugacauucugcuaaucaacagcacgggcaaucucaucgccccaagaggguauuucaaaauuaggucgggaaagucuuccauaaugcggucagacgcgccgaucggcaaauguaacagugagugcauuacucccaaugguagcaucccuaacgauaagccauuucagaaugugaaccgcauaacauacggggcauguccccgauaugugaaacagaauacccugaaacuugccacuggaaugagaaacgucccugaaaagcaaacaaggggcauuuucggcgcuaucgccggguuuaucgagaauggaugggaagguaugguugacggcugguacggguuccggcaccagaacuccgagggaaccggccaggcagcugaucugaagucuacgcaagccgcgauuaaucagaucaacgguaaguugaaucgucucauugggaaaaccaacgagaaguuucaccagauagaaaaagaguucagcgaaguggagggccgcauccaggaccuggaaaaguauguagaggauacaaaaauugacuuauggucauacaacgccgagcugcucguggcacuugaaaaucaacauacuaucgaucugaccgacagugagaugaacaaguuguucgaaagaacaaagaaacagcuaagggagaaugcugaagauaugggaaacggcugcuuuaagaucuaucacaaaugugacaaugccugcauuggguccauacggaacggaacuuacgaucaugacgucuaccgagacgaggcucugaauaaccgcuuccagaucaaggguguggagcucaaaagcggcuauaaggauuggauucuguggaucucuuuugccauuucaugcuuccuucuguguguugcauugcucggguuuaucaugugggccugccagaagggaaauauaagauguaacaucugcauuuga

SEQ ID NO: 136326 - RNA, 1701 nt, Artificial Sequence
  derived and/or modified CDS sequence (opt3) from hemagglutinin__InfluenzaA__AFD63769
augaagaccaucauugcccugagcuacauacucugccuuguguucgcucagaaacugcccggcaacgacaauuccacagcaacuuuguguuuagggcaccaugccgucccuaacggaacgaucguuaagaccauuacaaaugaucaaaucgaggugacuaacgcgaccgaacugguacagauuucuucaacagguggcaucugcgacaguccacaccagauacuagauggggagaauuguacccucaucgacgcucugcuuggagauccgcagugcgacggcuuucaaaacaaaaagugggaucuguucguggaaagaagcaaagccuauuccaauuguuaccccuaugacgucccugauuacgcaucuuugaggucgcucguggccucaagcgguacucuggaguuuaacaaugaaaguuucgacuggacagggguuacccagaacggaacguccucugcuugcaagcggcgcagcaauaaguccuuuuucucacgacugaacuggcucacucauuuaaaauauaaguacccagcacugaaugugaccaugcccaacaaugagaaauuugauaaacuuuauauuuggggcguccaccauccuggcacagacaacgaucagaucaguuuguacgcccaggcuagcgggcguauuacugugucuaccaagagaucccaacagacaguaaucccaaacauaggaucaaggccccggguucgcgacgugagcaguagaauuucuaucuacuggaccauugucaagccuggugacauccugcuaaucaauuccacgggcaaccucauugccccaaggggguauuucaagauacggagcggaaaaucgucuaucaugcgcuccgaugcgccgauuggcaaguguaauucagagugcaucacucccaacgguaguauaccuaaugacaaaccauuucagaacgugaaucgaauuacauacggggcaugucccagauaugugaagcagaacacccugaaacuugccacuggaaugaggaaugucccugaaaagcaaacacggggcaucuucggcgcuaucgccggguuuauugagaacggaugggaagguaugguugauggcugguacggguuccgucaccagaauagcgagggaaccggccaggcagcugaccugaaauccacgcaagccgcgaucaaccagauuaaugguaaguugaaccgccucauagggaagaccaaugagaaauuucaccagaucgaaaaggaguucucugaaguggagggcaggauucaggaucuggaaaaauauguagaggacacaaagaucgauuuauggagcuacaacgccgagcugcucguggcacuugaaaaccaacauacuaucgaccugaccgauucagagaugaauaaauuguucgaaagaacaaagaagcagcuacgggagaacgcugaagacaugggaaauggcugcuuuaaaauuuaucacaagugugauaacgccugcauagggaguauccgaaauggaacuuacgaccaugacgucuaccgcgaugaggcucugaacaauagauuccacauuaaauccguggagcucaagagcgguuauaaagacuggauccuguggauuucuuuugccaucucaugcuuccuucuguguguugcauugcucggcuuuauaaugugggccugccagaaggggaacaucagguguaauauuugcaucuga

SEQ ID NO: 136327 - RNA, 1701 nt, Artificial Sequence; identical to SEQ ID NO: 128121
  derived and/or modified CDS sequence (opt3) from hemagglutinin__InfluenzaA__AFD63780

SEQ ID NO: 136328 - RNA, 1701 nt, Artificial Sequence; identical to SEQ ID NO: 136325
  derived and/or modified CDS sequence (opt3) from hemagglutinin__InfluenzaA__AFD63791

SEQ ID NO: 136329 - RNA, 1701 nt, Artificial Sequence; identical to SEQ ID NO: 128121
  derived and/or modified CDS sequence (opt3) from hemagglutinin__InfluenzaA__AFD63802

SEQ ID NO: 136330 - RNA, 1701 nt, Artificial Sequence
  derived and/or modified CDS sequence (opt3) from hemagglutinin__InfluenzaA__AFD63813
augaagaccaucauugcccugagcuacauacucucccuuguguucgcucagaaauuucccggcaacgacaauucuacagcaacucugugcuuggggcaccaugccgucccuaacggaacgaucguuaagaccauuacaaaugaucaaaucgaggugacuaacgcgaccgaauuaguacagauuucaaguacagguggcaucugugacagcccacaccagauacuggauggggagaauugcacccuaaucgacgcucuccugggagauccgcagugugacggcuuccaaaacaaaaagugggaucuuuuuguggaaagauccaaagccuauucuaauugcuaccccuaugacgucccugauuacgcaucgcugaggucauugguggccagcagugguucccucgaguucaacaaugaaucuuuugacuggacugggguuacacagaacggaaccagcuccgcuuguaagcggcgcucaaauaagaguuucuuuagccgacugaacuggcugacgcaucucaaauauaaguacccagcauuaaaugugacuaugcccaacaaugagaaauucgauaagcuguauauuuggggcguccaccauccuggcaccgacucugaucagaucucccuuuacgcccaggcuucagggcguauuacagugagcacuaaaagaagucaacagaccguaaucccaaacauaggaucuaggccccggguucgcgacauuuccagcagaaucucgauuuacuggacaaucgugaagccuggugacaucuugcugauuaacucuaccggcaaucuaauagccccaaggggguauuuuaagauccgguccggaaaaucaaguauuaugcgcagcgaugcgccgaucggcaagugcaacuccgaguguauaacgcccaaugguucuauuccuaacgacaaaccauuccagaaugucaaccgaaucacuuacggggcaugccccagauaugugaagcagaauacacucaaacuggccaccggaaugaggaacgugccugaaaagcaaacucggggcaucuuuggcgcuauugccggguucaucgagaauggaugggaagguauggucgauggcugguacggguuucgucaccagaacagcgagggaacaggccaggcagcugaccuuaaaucaacccaagccgcgauuaaucagauaaacgguaagcugaaucgcuugaucgggaagacgaacgagaaauuccaccagauugaaaaggaguucagugaaguugagggcagaauccaggaucucgaaaaauauguggaggacaccaagaucgaucugugguccuacaaugccgaguuacugguagcacucgaaaaccaacauacaauugaccuuacugauagcgagaugaacaaacuguuugaaaggaccaagaagcaguugcgggagaaugcugaagacaugggaaacggcuguuucaaaauauaucacaagugcgauaaugccuguaucgggucuauucgaaacggaacauacgaccaugacguguaccgcgaugaggcucuaaauaacagauuucagaucaaaggugucgagcugaagucaggcuauaaagacuggauucucuggaucaguuucgccacuagcugcuuucugcuuugcguggcacuguugggguucauaaugugggccugucagaagggaaauaucaggugcaacauuuguaucuga

SEQ ID NO: 136331 - RNA, 1701 nt, Artificial Sequence; identical to SEQ ID NO: 136315
  derived and/or modified CDS sequence (opt3) from hemagglutinin__InfluenzaA__AFD63824

SEQ ID NO: 136332 - RNA, 1701 nt, Artificial Sequence; identical to SEQ ID NO: 128121
  derived and/or modified CDS sequence (opt3) from hemagglutinin__InfluenzaA__AFD63846

SEQ ID NO: 136333 - RNA, 1701 nt, Artificial Sequence; identical to SEQ ID NO: 129359
  derived and/or modified CDS sequence (opt3) from hemagglutinin__InfluenzaA__AFD63857

SEQ ID NO: 136334 - RNA, 1701 nt, Artificial Sequence; identical to SEQ ID NO: 128121
  derived and/or modified CDS sequence (opt3) from hemagglutinin__InfluenzaA__AFD63868

SEQ ID NO: 136335 - RNA, 1701 nt, Artificial Sequence; identical to SEQ ID NO: 128121
  derived and/or modified CDS sequence (opt3) from hemagglutinin__InfluenzaA__AFD63890

SEQ ID NO: 136336 - RNA, 1701 nt, Artificial Sequence; identical to SEQ ID NO: 128121
  derived and/or modified CDS sequence (opt3) from hemagglutinin__InfluenzaA__AFD63901

SEQ ID NO: 136337 - RNA, 1701 nt, Artificial Sequence; identical to SEQ ID NO: 128121
  derived and/or modified CDS sequence (opt3) from hemagglutinin__InfluenzaA__AFD63912

SEQ ID NO: 136338 - RNA, 1701 nt, Artificial Sequence
  derived and/or modified CDS sequence (opt3) from hemagglutinin__InfluenzaA__AFD63923
augaagaccaucauugcccugagcuacauacucugccuuguguucgcucagaaacugcccggcaacgacaauuccacagcaacuuuguguuuagggcaccaugccgucccuaacggaacgaucguuaagaccauuacaaaugaucaaaucgaggugacuaacgcgaccgaacugguacagucuucaaguacagguggcauuugcgacagcccacaccagauccuagauggggagaauuguacccucauagacgcucugcuuggagauccgcagugcgacggcuuucaaaacaaaaagugggaucuguucguggaaagauccaaagccuauucuaauuguuaccccuaugacgucccugauuacgcaucguugaggucacucguggccagcagugguacucuggaguuuaacaaugaauccuucaacuggacagggguuacccagaauggaacgucuagcgcuugcaagcggaaguccaacaaaucauuuuucagucgccugaauuggcucacucauuuaaaguauaaauacccagcacugaacgugaccaugcccaauaacgagaaguuugacaaacuuuauaucuggggcguccaccauccuggcacagauaacgaccagauuagcuuguacgcccaggcuucugggcgaaucacuguguccaccaagcguucacaacagacaguaauuccaaauaucggaagcagacccaggguucgggauauaaguucucgcauuuccaucuacuggaccauugugaagccuggugacauccugcuaaucaacagcacgggcaaucucauugccccaagaggguauuucaaaauaaggucgggaaagucuuccaucaugcggucagacgcgccgauuggcaaauguaacagugagugcaucacucccaaugguagcauaccuaacgauaagccauuucagaaugucaaccgcauuacauacggggcauguccccgauaugugaaacagaauacccugaaacuugccacuggaaugagaaacgugccugaaaagcaaacaaggggcaucuucggcgcuaucgccggguuuauugagaauggaugggaagguauggucgacggcugguacggguuccggcaccagaacuccgagggaaccggccaggcagcugaucugaagucuacgcaagccgcgaucaaucagauuaacgguaaguugaaucgucucauagggaaaaccaacgagaaguuucaccagaucgaaaaagaguucagcgaaguugagggccgcauucaggaccuggaaaaguauguggaggauacaaaaaucgacuuauggucauacaacgccgagcugcucguagcacuugaaaaucaacauacuaucgaucugaccgacagugagaugaacaaguuguucgaaagaacaaagaaacagcuaagggagaaugcugaagauaugggaaacggcugcuuuaagauuuaucacaaaugugacaaugccugcauaggguccauccggaacggaacuuacgaucaugacguguaccgagacgaggcucugaauaaccgcuuccagauuaagggugucgagcucaaaagcggcuauaaggauuggauccuguggauuucuuuugccaucucaugcuuccuucuguguguggcauugcucggguuuauaaugugggccugccagaagggaaauaucagauguaacauuugcaucuga

SEQ ID NO: 136339 - RNA, 1701 nt, Artificial Sequence
  derived and/or modified CDS sequence (opt3) from hemagglutinin__InfluenzaA__AFD63934
augaagaccaucauugcccugagcuacauacucugccuuguguucgcucagaaacugcccggcaacgacaauuccacagcaacuuuguguuuagggcaccaugccgucccuaacggaacgaucguuaagaccauuacaaaugaucaaaucgaggugacuaacgcgaccgaacugguacagucuucaaguacagguggcauuugcgacagcccacaccagauccuagauggggagaauuguacccucauagacgcucugcuuggagauccgcagugcgacggcuuucaaaacaaaaagugggaucuguucguggaaagauccaaagccuauucuaauuguuaccccuaugacgucccugauuacgcaucguugaggucacucguggccagcagugguacucuggaguuuaacaaugaauccuucgacuggacagggguuacccagaacggaacgucuagcgcuugcaagcggcgcuccaauaagucauuuuucagucgacugaacuggcucacucauuuaaaauauaaguacccagcacugaaugugaccaugcccaacaaugagaaauuugauaaacuuuauaucuggggcguccaccauccuggcacagagagcgaccagauuucuuuguacgcccaggcuuccgggcguaucacugugucaaccaagagaagccaacagacaguaauuccaaacaucggaaguaggccccggguucgcgaugugucuuccagaauaagcauuuacuggaccgucgugaagccuggugacauccugcuaauuaacucgacgggcaaucucaucgccccaaggggguauuucaagauccggucuggaaaauccucaauuaugcgcagugacgcgccgauaggcaaguguaacagcgaaugcaucacucccaaugguuccauuccuaacgauaaaccauuucagaaugugaaccgaaucacauacggggcaugucccagauaugucaagcagaauacccugaaacuugccacuggaaugaggaacguuccugagaagcaaacacggggcauauucggcgcuauugccggguuuaucgaaaauggaugggaggguaugguggacggcugguacggguuccgucaccagaacucugagggaaccggccaggcagcugaucugaaaagcacgcaagccgcgaucaaucagauuaacgguaaguugaaucgccucaucgggaagaccaacgaaaaauuucaccagauugagaaggaguucucagaaguagaaggcagaauacaggaccuggagaaauauguggaggauacaaagaucgacuuauggaguuacaaugccgaacugcucgucgcacuugagaaccaacauacuauugaucugaccgacuccgaaaugaacaaauuguucgagaggacaaagaagcagcuacgggaaaaugcugaggauaugggaaacggcugcuuuaaaaucuaucacaagugugacaaugccugcaucgggagcauucgaaacggaacuuacgaucaugacguguaccgcgacgaggcucugaauaacagauuccagauaaaagguguugaacucaagucuggcuauaaagauuggauccuguggauuucauuugccaucaguugcuuccuucuguguguggcauugcucggguuuauuaugugggccugccagaagggaaauaucagguguaacauaugcaucuga

SEQ ID NO: 136340 - RNA, 1701 nt, Artificial Sequence; identical to SEQ ID NO: 136315
  derived and/or modified CDS sequence (opt3) from hemagglutinin__InfluenzaA__AFD63945

SEQ ID NO: 136341 - RNA, 1701 nt, Artificial Sequence; identical to SEQ ID NO: 136315
  derived and/or modified CDS sequence (opt3) from hemagglutinin__InfluenzaA__AFD63956

SEQ ID NO: 136342 - RNA, 1701 nt, Artificial Sequence; identical to SEQ ID NO: 136315
  derived and/or modified CDS sequence (opt3) from hemagglutinin__InfluenzaA__AFD63967

SEQ ID NO: 136343 - RNA, 1701 nt, Artificial Sequence; identical to SEQ ID NO: 128121
  derived and/or modified CDS sequence (opt3) from hemagglutinin__InfluenzaA__AFD63989

SEQ ID NO: 136344 - RNA, 1701 nt, Artificial Sequence; identical to SEQ ID NO: 128121
  derived and/or modified CDS sequence (opt3) from hemagglutinin__InfluenzaA__AFD64000

SEQ ID NO: 136345 - RNA, 1701 nt, Artificial Sequence
  derived and/or modified CDS sequence (opt3) from hemagglutinin__InfluenzaA__AFD64011
augaagaccaucauugcccugagcuacauacucugccuuguguucgcucagaaacugcccggcaacgacaauuccacagcaacuuuguguuuagggcaccaugccgucccuaacggaacgaucguuaagaccauuacaaaugaucaaaucgaggugacuaacgcgaccgaacugguacagucuucaaguacagguggcauuugcgacagcccacaccagauccuagauggggagaauuguacccucauagacgcucugcuuggagauccgcagugcgacggcuuucaaaacaaaaagugggaucuguucguggaaagauccaaagccuauucuaauuguuaccccuaugacgucccugauuacgcaucguugaggucacucguggccagcagugguacucuggaguuuaacaaugaauccuucgacuggacagggguuacccagaacggaacgucuagcgcuugcaagcggcgcuccaauaagucauuuuucagucgacugaacuggcucacucauuuaaaauauaaguacccagcacugaaugugaccaugcccaacaaugagaaauuugauaaacuuuauaucuggggcguccaccauccuggcacagacagcgaucagauuucuuuguacgcccaggcuccagggaagaucacuguguccaccaagcguucacaacagacaguaauucccaacaucggaagcagaccuaggguucgggacgugaguucucgcauauccauuuacuggaccaucgucaagccaggugacauucugcuaaucaacagcacgggcaaucucaucgccccgagaggguauuucaaaauuaggucgggaaagucuuccauaaugcggucagaugcgcccaucggcaaauguaacagugagugcauuacuccuaaugguagcaucccaaacgacaagcccuuucagaaugugaaccgcauaacauacggggcauguccucgauaugugaaacagaauacccugaaacuugccacuggaaugagaaacgucccagaaaagcaaacaaggggcauuuucggcgcuaucgccggguuuaucgagaauggaugggaagguaugguugauggcugguacggguuccggcaccagaacuccgagggaaccggccaggcagcugaccugaagucuacgcaagccgcgauuaaucagaucaacgguaaguugaaucgucucauugggaaaaccaacgagaaguuucaccagauagaaaaagaguucagcgaaguggagggccgcauccaggaucuggaaaaguauguagaggacacaaaaauugauuuauggucauacaaugccgagcugcucguggcacuugaaaaccaacauacuaucgaccugaccgauagugagaugaacaaguuguucgaaagaacaaagaaacagcuaagggagaaugcugaagacaugggaaacggcugcuuuaagaucuaucacaaaugugauaaugccugcauuggguccauacggaacggaacuuacgaccaugacgucuaccgagaugaggcucugaauaaccgcuuccagaucaaggguguggagcucaaaagcggcuauaaggacuggauucuguggaucucuuuugccauuucaugcuuccuucuguguguugcauugcucggguuuaucaugugggccugccagaagggaaauauaagaugugauaucugcauuuga

SEQ ID NO: 136346 - RNA, 1701 nt, Artificial Sequence; identical to SEQ ID NO: 128121
  derived and/or modified CDS sequence (opt3) from hemagglutinin__InfluenzaA__AFD64022

SEQ ID NO: 136347 - RNA, 1701 nt, Artificial Sequence; identical to SEQ ID NO: 128121
  derived and/or modified CDS sequence (opt3) from hemagglutinin__InfluenzaA__AFD64033

SEQ ID NO: 136348 - RNA, 1701 nt, Artificial Sequence
  derived and/or modified CDS sequence (opt3) from hemagglutinin__InfluenzaA__AFD64044
augaagaccaucauugcccugagcuacauacucugccuuguguucgcucagaaacugcccggcaacgaaaauuccacagcaacuuuguguuuagggcaccaugccgucccuaacggaacgaucguuaagaccauuacaaaugaccaaaucgaagugacuaacgcgaccgagcugguacagucuucaaguacagguggcauuugcgauagcccacaccagauccuagacggggaaaauuguacccucauagaugcucugcuuggagacccgcagugcgauggcuuucaaaacaaaaagugggaccuguucguggagagauccaaagccuauucuaauuguuaccccuaugaugucccugacuacgcaucguugaggucacucguggccagcagugguacucuggaauuuaacaaugaguccuucgauuggacagggguuacccagaacggaacgucuagcgcuugcaagcggcgcuccaauaagucauuuuucagucgacugaacuggcucacucauuuaaaauauaaguacccagcacugaaugugaccaugcccaacaaugagaaauuugacaaacuuuauaucuggggcguccaccauccuggcacagauagcgaccagauuucuuuguacgcccaggcuuccgggcguaucacugugucaaccaagagaagccaacagacaguaauuccaaacaucggaaguaggccccggguucgcgaugugucuuccagaauaagcauuuacuggaccaucgucaagccuggugacauucugcuaaucaacucgacgggcaaucucaucgccccaaggggguauuucaagauucggucuggaaaauccucaauaaugcgcagugacgcgccgaucggcaaguguaacagcgaaugcauuacucccaaugguuccaucccuaacgauaaaccauuucagaaugugaaccgaauaacauacggggcaugucccagauaugugaagcagaauacccugaaacuugccacuggaaugaggaacgucccugagaagcaaacacggggcauuuucggcgcuaucgccggguuuaucgaaaauggaugggaggguaugguugacggcugguacggguuccgucaccagaacucugagggaaccggccaggcagcugaucugaaaagcacgcaagccgcgauuaaucagaucaacgguaaguugaaucgccucauugggaagaccaacgaaaaauuucaccagauagagaaggaguucucagagguggaaggcagaauccaggaccuggagaaauauguagaggauacaaagauugacuuauggaguuacaaugccgaacugcucguggcacuugagaaccaacauacuaucgaucugaccgacuccgaaaugaacaaauuguucgagaggacaaagaagcagcuacgggaaaaugcugaggauaugggaaacggcugcuuuaaaaucuaucacaagugugacaaugccugcauugggagcauacgaaacggaacuuacgaucaugacgucuaccgcgacgaggcucugaauaacagauuccagaucaaagguguggaacucaagucuggcuauaaagauuggauucuguggaucucauuugccauuaguugcuuccuucuguguguugcauugcucggguuuaucaugugggccugccagaagggaaauauaagguguaacaucugcauuuga

SEQ ID NO: 136349 - RNA, 1701 nt, Artificial Sequence; identical to SEQ ID NO: 136325
  derived and/or modified CDS sequence (opt3) from hemagglutinin__InfluenzaA__AFD64055

SEQ ID NO: 136350 - RNA, 1701 nt, Artificial Sequence
  derived and/or modified CDS sequence (opt3) from hemagglutinin__InfluenzaA__AFD64066
augaagaccaucauugcccugagcuacauacucugccuuguguucgcucagaaacugcccggcaacgacaauuccacagcaacuuuguguuuagggcaccaugccgucccuaacggaacgaucguuaagaccauuacaaaugaucaaaucgaggugacuaacgcgaccgaacugguacagucuucaaguacagguggcauuugcgacagcccacaccagauccuagauggggagaauuguacccucauagacgcucugcuuggagauccgcagugcgacggcuuucaaaacaaaaagugggaucuguucguggaaagauccaaagccuauucuaauuguuaccccuaugacgucccugauuacacuucguugaggucacucguggcaagcagugguacacuggaguuuaacaaugaauccuucaacuggaccgggguuacgcagaauggaacuucuagcgccugcaagcggcgcuccaacaagucauuuuucagucgacugaauuggcucacccauuuaaaauuuaaguauccagcucugaacgugacaaugcccaauaacgagaaauucgacaaacuuuacaucuggggcguccaccauccuggcacugauaacgaccagauuagcuuguaugcacaggccucugggcguaucaccguguccacaaagagaucacaacagaccguaauuccaaauaucggaagcaggccccggguucgcgaugugccuaguagaauaucuauuuacuggacgaucgucaagccaggugacauucugcuaaucaacuccacuggcaaucucaucgcuccgaggggguacuuuaagauucggagcggaaaaucgucuauaaugcgcuccgacgcccccaucggcaaguguaacucagagugcauuacaccuaaugguaguaucccaaacgauaaacccuuccagaaugugaaccgaauaaccuauggggcguguccuagauacgugaagcagaauacucugaaacuugcaacaggaaugaggaacgucccagaaaagcaaacccggggcauuuuuggcgccaucgcuggguucaucgagaauggaugggaagguaugguugacggcugguauggguuucgucaccagaacgccgagggaacgggccaggcagcugaucugaaaagcacccaagccgcgauuaaucagaucaacgguaaguugaaucgccucauugggaagacaaacgagaaauuccaccagauagaaaaggaguucuccgaaguggagggcagaauccaggaccuggaaaaauacguagaggauacuaagauugacuuauggucuuauaacgccgagcugcucguggcacuugaaaaucaacauaccaucgaucugacagacagcgagaugaacaaauuguuugaaaggacuaagaagcagcuacgggagaaugcugaagauaugggaaacggcugcuucaaaaucuaccacaagugugacaaugccugcauugggucaauacgaaacggaaccuaugaucaugacgucuaccgcgacgaggcucugaauaacagauuucagaucaaagguguggagcucaagaguggcuacaaaaauuggauucuguggaucuccuucgccauuagcugcuuucuucuguguguugcauugcucggguucaucaugugggccugccagaagggaaacauaagguguaauaucugcauuuga

SEQ ID NO: 136351 - RNA, 1701 nt, Artificial Sequence
  derived and/or modified CDS sequence (opt3) from hemagglutinin__InfluenzaA__AFD64077
augaagaccaucauugcccugagcuacauacucugccuuguguucgcucagaaacugcccggcaacgacaauuccacagcaacuuuguguuuagggcaccaugccgucccuaacggaacgaucguuaagaccauuacaaaugaucaaaucgaggugacuaacgcgaccgaacugguacagauuucuucaacaggugagaucugcgacaguccacaccagauacuagauggcgaaaauuguacccucaucgacgcucugcuuggggauccgcagugcgacggauuucaaaacaaaaagugggaucuguucguggagagaagcaaagccuauuccaauuguuaccccuaugacgucccugauuacgcaucuuugaggucgcucguggccucaagcggcacucuggaauuuaacaaugagaguuucgacuggacagguguuacccagaacgggacguccucugcuugcaagcggcgcagcaauaaguccuuuuucucacgacugaacuggcucacucauuuaaaauauaaguacccagcacugaaugugaccaugcccaacaaugagaaauuugauaaacuuuauauuuggggaguccaccauccuggcacagacagugaucagaucagcuuguacgcccaggcuucuggccguauuacuguguccaccaagagaucacaacagacaguaaucccaaacauagggagcaggccccggauucgcgacguuaguucuagaaucuccauuuacuggaccaucgugaagccuggagacauccugcuaauuaacagcacggguaaucucauagccccaaggggcuauuucaagauccggucggggaaaucuuccauuaugcgcucagaugcgccgaucggaaaguguaacagugaaugcauaacucccaauggcagcauuccuaacgacaaaccauuucagaaugucaaccgaaucacauacggugcaugucccagauaugugaagcagaauacccugaaacuugccacugggaugaggaacgugccugagaagcaaacacggggaaucuucggcgcuauugccggcuuuaucgaaaaugggugggagggaauggucgaugguugguacggcuuccgucaccagaacuccgaggggaccggacaggcagcugaccugaaaucuacgcaagccgcgauuaaucagauaaacggcaaguugaaucgccucaucgguaagaccaacgaaaaauuucaccagauugagaaggaguucagcgaaguugaagggagaauccaggaucuggagaaauauguggaggacacaaagaucgauuuauggucauacaaugccgaacugcucguagcacuugagaaccaacauacuauugaccugaccgauagugaaaugaacaaauuguucgagaggacaaagaagcagcuacgggaaaaugcugaggacaugggcaacggaugcuuuaaaauauaucacaagugugauaaugccugcaucggcuccauucgaaacgggacuuacgaccaugacguguaccgcgaugaggcucugaauaacagauuccagaucaaaggagucgaacucaagagcgguuauaaagacuggauucuguggaucucuuuugccauaucaugcuuccuucuguguguggcauugcucggcuuuaucaugugggccugccagaaggggaauauuagguguaacaucugcauuuga

SEQ ID NO: 136352 - RNA, 1701 nt, Artificial Sequence; identical to SEQ ID NO: 128121
  derived and/or modified CDS sequence (opt3) from hemagglutinin__InfluenzaA__AFD64088

SEQ ID NO: 136353 - RNA, 1701 nt, Artificial Sequence; identical to SEQ ID NO: 128121
  derived and/or modified CDS sequence (opt3) from hemagglutinin__InfluenzaA__AFD64099

SEQ ID NO: 136354 - RNA, 1701 nt, Artificial Sequence; identical to SEQ ID NO: 136325
  derived and/or modified CDS sequence (opt3) from hemagglutinin__InfluenzaA__AFD64110

SEQ ID NO: 136355 - RNA, 1701 nt, Artificial Sequence
  derived and/or modified CDS sequence (opt3) from hemagglutinin__InfluenzaA__AFD64121
augaagaccaucauugcccugagcuacauacucugccuuguguucgcucagaaacugcccggcaacgacaauuccacagcaacuuuguguuuagggcaccaugccgucccuaacggaacgaucguuaagaccauuacaaaugaucaaaucgaggugacuaacgcgaccgaacugguacagucuucaaguacagguggcauuugcgacagcccacaccagauccuagauggggagaauuguacccucauagacgcucugcuuggagauccgcagugcgacggcuuucaaaacaaaaagugggaucuguucguggaaagauccagggccuauucuaauuguuaccccuaugacgucccugauuacgcaucguugcggucacucguggccagcagugguacucuggaguuuaacaaugaauccuucaacuggacagggguuacccagaauggaacgucuagcgcuugcaaacgcaaguccaacaagucauuuuucagucgacugaauuggcucacucauuuaaaauauaaguacccagcacugaacgugaccaugcccaauaacgagaaauuugacaaacuuuauaucuggggcguccaccauccuggcacagauaacgaccagauuagcuuguacgcccaggcuucugggcguaucacuguguccaccaagagaucacaacagacaguaauuccaaauaucggaagcaggccccggguucgcgaugugaguucuagaauauccauuuacuggaccaucgucaagccuggugacauucugcuaaucaacagcacgggcaaucucaucgccccaaggggguauuucaagauucggucgggaaaaucuuccauaaugcgcucagacgcgccgaucggcaaguguaacagugagugcauuacucccaaugguagcaucccuaacgauaaaccauuucagaaugugaaccgaauaacauacggggcaugucccagauaugugaagcagaauacccugaaacuugccacuggaaugaggaacgucccugaaaagcaaacacggggcauuuucggcgcuaucgccggguuuaucgagaauggaugggaagguaugguugacggcugguacggguuccgucaccagaacuccgagggaaccggccaggcagcugaucugaaaucuacgcaagccgcgauuaaucagaucaacgguaaguugaaucgccucauugggaagaccaacgagaaauuucaccagauagaaaaggaguucagcgaaguggagggcagaauccaggaccuggaaaaauauguagaggauacaaagauugacuuauggucauacaacgccgagcugcucguggcacuugaaaaucaacauacuaucgaucugaccgacagugagaugaacaaauuguucgaaaggacaaagaagcagcuacgggagaaugcugaagauaugggaaacggcugcuuuaaaaucuaucacaagugugacaaugccugcauuggguccauacgaaacggaacuuacgaucaugacgucuaccgcgacgaggcucugaauaacagauuccagaucaaagguguggagcucaagagcggcuauaaagauuggauucuguggaucucuuuugccauuucaugcuuccuucuguguguugcauugcucggguuuaucaugugggccugccagaagggaaauauaagguguaacaucugcauuuga

SEQ ID NO: 136356 - RNA, 1701 nt, Artificial Sequence; identical to SEQ ID NO: 128121
  derived and/or modified CDS sequence (opt3) from hemagglutinin__InfluenzaA__AFD64132

SEQ ID NO: 136357 - RNA, 1701 nt, Artificial Sequence; identical to SEQ ID NO: 136315
  derived and/or modified CDS sequence (opt3) from hemagglutinin__InfluenzaA__AFD64143

SEQ ID NO: 136358 - RNA, 1701 nt, Artificial Sequence; identical to SEQ ID NO: 128121
  derived and/or modified CDS sequence (opt3) from hemagglutinin__InfluenzaA__AFD64154

SEQ ID NO: 136359 - RNA, 1701 nt, Artificial Sequence
  derived and/or modified CDS sequence (opt3) from hemagglutinin__InfluenzaA__AFD64179
augaagaccaucauugcccugagcuacauacucugccuuguguucgcucagaaacugcccggcaacgacaauuccacagcaacuuuguguuuagggcaccaugccgucccuaacggaacgaucguuaagaccauuacaaaugaucaaaucgaggugacuaacgcgaccgaacugguacagauuucuucaacagguggcaucugcgacaguccacaccagauacuagauggggagaauuguacccucaucgacgcucugcuuggagauccgcagugcgacggcuuucaaaacaaaaagugggaucuguucguggaaagaagcaaagccuauuccaauuguuaccccuaugacgucccugauuacgcaucuuugaggucgcucguggccucaagcgguacucuggaguuuaacaaugaaaguuucgacuggacagggguuacccagaacggaacguccucugcuugcaagcggcgcagcaauaaguccuuuuucucacgacugaacuggcucacucauuuaaaauauaaguacccagcacugaaugugaccaugcccaacaaugagaaauuugauaaacuuuauauuuggggcguccaccauccuggcacagacagugaucagaucagcuuguacgcccaggcuucugggcguauuacuguguccaccaagagaucacaacagacaguaaucccaaacauaggaagcaggccccggguucgcgacgugaguucucagauuuccaucuacuggaccauugucaagccuggugacauccugcuaaucaacagcacgggcaaucucauugccccaagaggguauuucaagauaaggucgggaaaaucuuccaucaugcggucagaugcgccgauuggcaaguguaacagugagugcaucacucccaaugguagcauaccuaacgacaaaccauuucagaaugugaaccgcauuacauacggggcauguccccgauaugugaagcaaaauacccugaaacuugccacuggaaugagaaacgucccugaaaagcagacaaggggcaucuucggcgcuaucgccggguuuauugagaauggaugggaagguaugguugauggcugguacggguuccggcaccagaacuccgagggaaccggccaagcagcugaccugaaaucuacgcaggccgcgaucaaucagauuaacgguaaguugaaucgucucauagggaagaccaacgagaaauuucaccagaucgaaaaggaguucagcgaaguggagggccgcauucaagaucuggaaaaauauguagaggacacaaagaucgauuuauggucauacaaugccgagcugcucguggcacuugaaaaccagcauacuaucgaccugaccgauagugagaugaacaaauuguucgaaagaacaaagaagcagcuaagggagaaugcugaagacaugggaaacggcugcuuuaaaauuuaucacaagugugauaaugccugcauaggguccauccggaacggaacuuacgaccaugacgucuaccgagaugaggcucugaauaaccgcuuccagauuaaagguguggagcucaagagcggcuauaaagacuggauccuguggauuucuuuugccaucucaugcuuccuucuguguguugcauugcucggguuuauaaugugggccugccaaaagggaaauaucagauguaacauuugcaucuga

SEQ ID NO: 136360 - RNA, 1701 nt, Artificial Sequence; identical to SEQ ID NO: 136359
  derived and/or modified CDS sequence (opt3) from hemagglutinin__InfluenzaA__AFD64190

SEQ ID NO: 136361 - RNA, 1701 nt, Artificial Sequence; identical to SEQ ID NO: 136315
  derived and/or modified CDS sequence (opt3) from hemagglutinin__InfluenzaA__AFD64201

SEQ ID NO: 136362 - RNA, 1701 nt, Artificial Sequence; identical to SEQ ID NO: 136325
  derived and/or modified CDS sequence (opt3) from hemagglutinin__InfluenzaA__AFD64212

SEQ ID NO: 136363 - RNA, 1701 nt, Artificial Sequence
  derived and/or modified CDS sequence (opt3) from hemagglutinin__InfluenzaA__AFD64223
augaagaccaucauugcccugagcuacauacucugccuuguguucgcucagaaacugcccggcaacgacaauuccacagcaacuuuguguuuagggcaccaugccgucccuaacggaacgaucguuaagaccauuacaaaugaucaaaucgaggugacuaacgcgaccgaacugguacagucuucaaguacagguggcauuugcgacagcccacaccagauccuagauggggagaauuguacccucauagacgcucugcuuggagauccgcagugcgacggcuuucaaaacaaaaagugggaucuguucguggaaagauccaaagccuauucuaauuguuaccccuaugacgucccugauuacgcaucguugaggucacucguggccagcagugguacucuggaguuuaacaaugaauccuucaacuggacagggguuacccagaauggaacgucuagcgcuugcaagcggcgcuccaacaagucauuuuucagucgacugaauuggcucacucauuuaaaauauaaguacccagcacugaacgugaccaugcccaauaacgagaaauuugacaagcuguauaucuggggcgucuugcacccuggcacagauagcgaccagauucgucuguacgcccaggcuucugggagaaucacuguguccaccaaaaggucacaacagacaguaauuccaaacaucggaagccggccccgcguuagagaugugaguucuaggauauccauuuacuggaccaucgucaagccuggugacauucuacucaucaauagcacgggcaaccugaucgccccacggggguauuucaagauucgcucgggaaaaucuuccauaaugcgaucagacgcgccgaucggcaaguguaauagugagugcauuacucccaacgguagcaucccuaaugauaaaccauuucagaacgugaauagaauaacauacggggcaugucccagguauauuaagcagaacacccuuaaacuggccacuggaaugcggaaugugccugaaaagcaaacacguggcaucuucggcgcuaucgccggguuuauugagaacggaugggaagguauggucgacggcugguacggguuccgccaucaaaauuccgagggaaccggccaggcagcugauuugaaaucuacgcaggccgcgaucaaccagauuaaugguaagcucaacagacugauagggaagaccaaugagaaauuucaccagaucgaaaaggaguucagcgaaguugagggcaggauucaggacuuagaaaaauauguggaggauacaaagaucgaccuguggucauacaacgccgagcuccuuguagcacuggaaaaccaauauacuaucgauuugaccgacagugagaugaauaaacuauucgaacggacaaagaagcagcugcgagagaacgcugaagauaugggaaauggcugcuuuaaaauuuaccacaagugugacaacgccugcauaggguccauccgcaauggaacuuacgaucaugacguguauagagacgaggcucucaacaauagguuccagauuaaaggugucgagcuuaagagcggcuacaaagauuggauccuuuggauuucuuuugccaucucaugcuuccuguuguguguggcacuccugggguuuauaaugugggccugccagaagggaaacauccgguguaauauuugcaucuga

SEQ ID NO: 136364 - RNA, 1701 nt, Artificial Sequence
  derived and/or modified CDS sequence (opt3) from hemagglutinin__InfluenzaA__AFD64315
augaagaccaucauugcccugagcuacauacucugccuuguguucgcucagaaacugcccggcaacgacaauuccacagcaacuuuguguuuagggcaccaugccgucccuaacggaacgaucguuaagaccauuacaaaugaucaaaucgaggugacuaacgcgaccgaacugguacagauuucuucaacagguggcaucugcgacaguccacaccagauacuagauggggagaauuguacccucaucgacgcucugcuuggagauccgcagugcgacggcuuucaaaacaaaaagugggaucuguucguggaaagaagcaaagccuauuccaauuguuaccccuaugacgucccugauuacgcaucuuugaggucgcucguggccucaagcgguacucuggaguuuaacaaugaaaguuucgacuggacagggguuacccagaacggaacguccucugcuugcaagcggcgcagcaauaaguccuuuuucucacgacugaacuggcucacucauuuaaaauauaaguacccagcacugaaugugaccaugcccaacaaugagaaauuugauaaacuuuauauuuggggcguccaccauccuggcacagacagugaucagaucagcuuguacgcccaggcuucugggcguauuacuguguccaccaagagaucacaacagacaguaaucccaaacauaggaagcaggccccggguucgcgacgugaguucuagaauuuccaucuacuggaccauugucaagccuggugacauccugcuaaucaacagcacgggcaaucucauugccccaaggggguauuucaagauacggucgggaaaaucuuccaucaugcgcucagaugcgccgauuggcaaguguaacagugagugcaucacucccaaugguagcauaccuaacgacaaaccauuucagaaugugaaccgaauuacauacggggcaugucccagauaugugaagcagaauacccugaaacuugccacuggaaugaggaacgucccugaaaagcaaacacggggcaucuucggcgcuaucgccggguuuauugagaauggaugggaagguaugguugauggcugguacggguuccgucaccagaacuccgagggaaccggccaggcagcugaccugaaaucuacgcaagccgcgaucaaucagauuaacgguaaguugaaucgccucauagggaagaccaacgagaaauuucaccagaucgaaaaggaguucagcgaaguggagggcaggauucaggaucuggaaaaauauguagaggacacaaagaucgauuuauggucauacaaugccgagcugcucguggcacuugaaaaccaacauacuaucgaccugaccgauagugagaugaacaaauuguucgaaagaacaaagaaucagcuacgggagaacgcugaagacaugggaaauggcugcuuuaagauuuaucacaaaugugauaacgccugcauaggguccauccgaaauggaacuuacgaccaugacgucuaccgcgaugaggcucugaacaauagauuccagauuaaggguguggagcucaaaagcggcuauaaggacuggauccuguggauuucuuuugccaucucaugcuuccuucuguguguugcauugcucggguuuauaaugugggccugccagaaaggaaacaucagguguaauauuugcaucuga

SEQ ID NO: 136365 - RNA, 1701 nt, Artificial Sequence; identical to SEQ ID NO: 136355
  derived and/or modified CDS sequence (opt3) from hemagglutinin__InfluenzaA__AFD64326

SEQ ID NO: 136366 - RNA, 1701 nt, Artificial Sequence; identical to SEQ ID NO: 136325
  derived and/or modified CDS sequence (opt3) from hemagglutinin__InfluenzaA__AFD64337

SEQ ID NO: 136367 - RNA, 1701 nt, Artificial Sequence; identical to SEQ ID NO: 128121
  derived and/or modified CDS sequence (opt3) from hemagglutinin__InfluenzaA__AFD64348

SEQ ID NO: 136368 - RNA, 1701 nt, Artificial Sequence; identical to SEQ ID NO: 136325
  derived and/or modified CDS sequence (opt3) from hemagglutinin__InfluenzaA__AFD64359

SEQ ID NO: 136369 - RNA, 1701 nt, Artificial Sequence
  derived and/or modified CDS sequence (opt3) from hemagglutinin__InfluenzaA__AFD64370
augaagaccaucauugcccugagcuacauacucugccuuguguucgcucagaaacugcccggcaacgacaauuccacagcaacuuuguguuuagggcaccaugccgucccuaacggaacgaucguuaagaccauuacaaaugaucaaaucgaggugacuaacgcgaccgaacugguacagucuucaaguacagguggcauuugcgacagcccacaccagauccuagauggggagaauuguacccucauagacgcucugcuuggagauccgcauugcgacggcuuucagaacaaaaagugggaucuguucguggaaagauccaaagccuauucuaauuguuaccccuaugacgucccugauuacgcaucguugaggucacucguggccagcagugguacucuggaguuuaacaaugaauccuucaacuggacagggguuacccaaaauggaacgucuagcgcuugcaagcggaaguccaacaaaucauuuuucagucgccugaauuggcucacucacuuaaaguauaaauacccagcacugaacgugaccaugcccaauaacgagaaguuugacaaacuuuauaucuggggcguccaucacccuggcacagauaacgaccagauuagcuuguacgcccaggcuucugggcgaaucacuguguccaccaagcguucacagcaaacaguaauuccaaauaucggaagcagacccaggguucgggauauaaguucucgcauuuccaucuacuggaccauugugaagccuggugacauccugcuaaucaacagcacgggcaaucucauugccccaagaggguauuucaaaauaaggucgggaaagucuuccaucaugcggucagacgcgccgauuggcaaauguaacagugagugcaucacucccaaugguagcauaccuaacgauaagccauuucagaaugucaaccgcauuacauacggggcauguccccgauaugugaaacagaauacccugaaacuugccacuggaaugagaaacgugccugaaaagcagacaaggggcaucuucggcgcuaucgccggguuuauugagaauggaugggaagguauggucgacggcugguacggguuccggcaccaaaacuccgagggaaccggccaggcagcugaucugaagucuacgcaggccgcgaucaaucaaauuaacgguaaguugaaucgucucauagggaaaaccaacgagaaguuucaucagaucgaaaaagaguucagcgaaguugagggccgcauucaggaccuggaaaaguauguggaggauacaaaaaucgacuuauggucauacaacgccgagcugcucguagcacuugaaaaucagcacacuaucgaucugaccgacagugagaugaacaaguuguucgaaagaacaaagaaacaacuaagggagaaugcugaagauaugggaaacggcugcuuuaagauuuaucauaaaugugacaaugccugcauaggguccauccggaacggaacuuacgaucacgacguguaccgagacgaggcucugaauaaccgcuuccagauuaagggugucgagcucaaaagcggcuauaaggauuggauccuguggauuucuuuugccaucucaugcuuccuucuguguguggcauugcucggguuuauaaugugggccugccagaagggaaauaucagauguaacauuugcaucuga

SEQ ID NO: 136370 - RNA, 1701 nt, Artificial Sequence; identical to SEQ ID NO: 128121
  derived and/or modified CDS sequence (opt3) from hemagglutinin__InfluenzaA__AFD64381

SEQ ID NO: 136371 - RNA, 1701 nt, Artificial Sequence; identical to SEQ ID NO: 136325
  derived and/or modified CDS sequence (opt3) from hemagglutinin__InfluenzaA__AFD64392

SEQ ID NO: 136372 - RNA, 1701 nt, Artificial Sequence; identical to SEQ ID NO: 136315
  derived and/or modified CDS sequence (opt3) from hemagglutinin__InfluenzaA__AFD64403

SEQ ID NO: 136373 - RNA, 1701 nt, Artificial Sequence; identical to SEQ ID NO: 136315
  derived and/or modified CDS sequence (opt3) from hemagglutinin__InfluenzaA__AFD64414

SEQ ID NO: 136374 - RNA, 1701 nt, Artificial Sequence
  derived and/or modified CDS sequence (opt3) from hemagglutinin__InfluenzaA__AFD64425
augaagaccaucauugcccugagcuacauacucugccuuguguucgcucagaaacugcccggcaacgacaauuccacagcaacuuuguguuuagggcaccaugccgucccuaacggaacgaucguuaagaccauuacaaaugaucaaaucgaggugacuaacgcgaccgaacugguacagauuucuucaacagguggcaucugcgacaguccacaccagauacuagauggggagaauuguacccucaucgacgcucugcuuggagauccgcagugcgacggcuuucaaaacaaaaagugggaucuguucguggaaagaagcaaagccuauuccaauuguuaccccuaugacgucccuaacuacgcaucuuugaggucgcucguggccucaagcgguacucuggaguuuaauaacgaaaguuucgauuggacagggguuacccagaauggaacguccucugcuugcaagcggcgcagcaacaaguccuuuuucucacgacugaauuggcucacucauuuaaaauauaaguacccagcacugaacgugaccaugcccaauaacgagaaauuugacaaacuuuauauuuggggcguccaccauccuggcacagauagugaccagaucagcuuguacgcccaggcuucugggcguauuacuguguccaccaagagaucacaacagacaguaaucccaaacauaggaagcaggccccggguucgcgaugugaguucuagaauuuccaucuacuggaccauugucaagccuggugacauccugcuaaucaauagcacgggcaaccucauugccccaaggggguauuucaagauacggucgggaaaaucuuccaucaugcgcucagacgcgccgauuggcaaguguaauagugagugcaucacucccaacgguagcauaccuaaugauaaaccauuucagaacgugaaucgaauuacauacggggcaugucccagauaugugaagcagaacacccugaaacuugccacuggaaugaggaaugucccugaaaagcaaacacggggcaucuucggcgcuaucgccggguuuauugagaacggaugggaagguaugguugacggcugguacggguuccgucaccaaaauuccgagggaaccggccaggcagcugaucugaaaucuacgcaggccgcgaucaaccagauuaaugguaaguugaaccgccucauagggaagaccaaugagaaauuucaccagaucgaaaaggaguucagcgaaguggagggcaggauucaggaccuggaaaaauauguagaggauacaaagaucgacuuauggucauacaacgccgagcugcucguggcacuugaaaaccaacauacuaucgaucugaccgacagugagaugaauaaauuguucgaaagaacaaagaagcagcuacgggagaacgcugaagauaugggaaauggcugcuuuaaaauuuaucacaagugugacaacgccugcauaggguccauccgaaauggaacuuacgaucauaacgucuaccgcgacgaggcucugaauaacagauuccagauuaaagguguggagcucaagagcggcuauaaagacuggauccuguggauuucuuuugccaucucaugcuuccuucuguguguugcauugcucggguuuauaaugugggccugccagaagggaaauaucagguguaacauuugcaucuga

SEQ ID NO: 136375 - RNA, 1701 nt, Artificial Sequence; identical to SEQ ID NO: 128121
  derived and/or modified CDS sequence (opt3) from hemagglutinin__InfluenzaA__AFD64436

SEQ ID NO: 136376 - RNA, 1701 nt, Artificial Sequence; identical to SEQ ID NO: 128121
  derived and/or modified CDS sequence (opt3) from hemagglutinin__InfluenzaA__AFD64447

SEQ ID NO: 136377 - RNA, 1701 nt, Artificial Sequence
  derived and/or modified CDS sequence (opt3) from hemagglutinin__InfluenzaA__AFD64458
augaagaccaucauugcccugagcuacauacucugccuuguguucgcucagaaacugcccggcaacgacaauuccacagcaacuuuguguuuagggcaccaugccguccaaaacggaacgaucguuaagaccauuacaaaugaucagaucgaggugacuaacgcgaccgaacugguacagucuucaaguacagguggcauuugcgacagcccucaccagauccuagauggggagaauuguacccucauagacgcucugcuuggagauccacaaugcgacggcuuucagaacaaaaagugggaucuguucguggaaagauccaaagccuauucuaauuguuacccguaugacguccccgauuacgcaucguugaggucacucguggccagcagugguacucuggaguuuaacaaugaauccuucgacuggacagggguuacccagaacggaacgucuagcgcuugcaagcggcgcuccaauaagucauuuuucagucgacugaacuggcucacucauuuaaaauauaaguacccugcacugaaugugaccaugccaaacaaugagaaauuugauaaacuuuauaucuggggcguccaccaucccggcacagacagcgaucagauuucuuuguacgcccaggcuuccgggcguaucacugugucaaccaagagaagccaacagacaguaauuccuaacaucggaaguaggccacggguucgcgacgugucuuccagaauaagcauuuacuggaccaucgucaagcccggugacauucugcuaaucaacucgacgggcaaucucaucgccccuaggggguauuucaagauucggucuggaaaauccucaauaaugcgcagugaugcgccaaucggcaaguguaacagcgagugcauuacuccgaaugguuccauccccaacgacaaaccuuuucagaaugugaaccgaauaacauacggggcauguccaagauaugugaagcaaaauacccugaaacuugccacuggaaugaggaacguccccgaaaagcagacacggggcauuuucggcgcuaucgccggguuuaucgagaauggaugggaagguaugguugauggcugguacggguuccgucaccagaacucugagggaaccggccaagcagcugaccugaaaagcacgcaggccgcgauuaaucagaucaacgguaaguugaaucgccucauugggaagaccaacgagaaauuucaccagauagaaaaggaguucucagaaguggagggcagaauccaagaucuggaaaaauauguagaggacacaaagauugauuuauggaguuacaaugccgagcugcucguggcacuugaaaaccagcauacuaucgaccugaccgauuccgagaugaacaaauuguucgaaaggacaaagaagcagcuacgggagaaugcugaagacaugggaaacggcugcuuuaaaaucuaucacaagugugauaaugccugcauugggagcauacgaaacggaacuuacgaccaugacgucuaccgcgaugaggcucugaauaacagauuccagaucaaagguguggagcucaagucuggcuauaaagacuggauucuguggaucucauuugccauuaguugcuuccuucuguguguugcauugcucggguuuaucaugugggccugccaaaagggaaauauaagguguaacaucugcauuuga

SEQ ID NO: 136378 - RNA, 1701 nt, Artificial Sequence; identical to SEQ ID NO: 134903
  derived and/or modified CDS sequence (opt3) from hemagglutinin__InfluenzaA__AFD64795

SEQ ID NO: 136379 - RNA, 1701 nt, Artificial Sequence; identical to SEQ ID NO: 135030
  derived and/or modified CDS sequence (opt3) from hemagglutinin__InfluenzaA__AFD64799

SEQ ID NO: 136380 - RNA, 1701 nt, Artificial Sequence
  derived and/or modified CDS sequence (opt3) from hemagglutinin__InfluenzaA__AFD64802
augaagaccaucauugcccugagcuacauacucugccuuguguucgcucagaaacugcccggcaacgacaauuccacagcaacuuuguguuuagggcaccaugccgucccuaacggaacgaucguuaagaccauuacaaaugaucaaaucgaggugacuaacgcgaccgaacugguacagucuucaaguacaggugagauuugcaauagcccacaccagauccuagacggcgaaaacuguacccucauagaugcucugcuuggggacccgcagugcgauggauuucaaaauaaaaagugggaccuguucguggagagauccaaagcccauucuaacuguuaucccuacgaugucccugacuaugcaucguugaggucacucguggccagcaguggcacucuggaauuuaauaacgaguccuucaauuggacagguguuacccagaacgggacgucuagcgcuugcauccggcgcuccaauaacucauuuuucagucgacugaauuggcucacucacuuaaacuuuaaguacccagcacugaacgugaccaugcccaauaacgagcaguucgauaagcuguauauuuggggaguccaucacccuggcacagacaaagaucagaccuuuuuguacgcccaagcuagcggccguaucacugugucuacaaagagaucccagcaggccguaauuccaaauaucgggucaaggccccggguucgcaacauaccuagcagagugaguauuuauuggaccaucgucaaaccaggagacauucugcuaaucaauucuacggguaaccucaucgcgccgaggggcuacuucaagauucgguccgggaaaagcucgauaaugcgcucugaugcacccaucggaaaguguaauuccgccugcauuacuccuaacggcucaaucccaaaugacaagcccuuucagaacgugaaucgaauaacauacggugcuuguccuagauaugugaaacaaaacacccugaaacuugccacugggaugaggaaugucccagaaaaacagacacggggaauuuucggcgcaaucgcuggcuuuaucgagaacgggugggaaggaaugguugacgguugguacggcuuccgucaccagaauagugaggggcgcggacaagccgcggaucuuaagagcacccaggccgcaauugaccagaucaacggcaaauugaacagacucauugguaagacgaaugagaaauuccaucagauagaaaaggaguuuuccgaaguggaggggaggauccaagaucuggaaaaguauguagaggacaccaaaauugauuuauggucuuacaacgcugagcugcucguggcccuugaaaaucagcacacaaucgaccugacugauagcgagaugaacaaguuguucgaaaagaccaagaaacagcuacgggagaaugcugaagacaugggcaacggaugcuuuaagaucuaucauaagugugauaaugccugcauuggcucaauacgaaacgggacauacgaccacgaugucuaucgcgacgaggcacugaauaacagauuccagaucaaaggaguggagcucaagagugaauacaaagacuggauucuguggaucuccuuugccauuagcugcuuccuucuguguguugcuuugcucgguuuuaucaugugggcgugccaaaagggcaauauaagguguaacaucugcauuuga

SEQ ID NO: 136381 - RNA, 1701 nt, Artificial Sequence
  derived and/or modified CDS sequence (opt3) from hemagglutinin__InfluenzaA__AFD64804
augaagaccaucauugcccugagcuacauacucugccuuguguucgcucagaaacugcccggcaacgacaauuccacagcaacuuuguguuuagggcaccaugccgucccuaacggaacgaucguuaagaccauuacaaaugaucaaaucgaggugacuaacgcgaccgaacugguacagucuucaaguacaggugagauuugcaauagcccacaccagauccuagacggcgaaaacuguacccucauagaugcucugcuuggggacccgcagugcgauggauuucaaaauaaaaagugggaccuguucguggagagauccaaagcccauucuaacuguuaucccuacgaugucccugacuaugcaucguugaggucacucguggccagcaguggcacucuggaauuuaauaacgaguccuucaauuggacagguguuacccagaacgggacgucuagcgcuugcauccggcgcuccaauaacucauuuuucagucgacugaauuggcucacucacuuaaacuuuaaguacccagcacugaacgugaccaugcccaauaacgagcaguucgauaagcuguauauuuggggaguccaucacccuggcacagacaaagaucagaucuuuuuguacgcccaagcuagcggccguauuacugugucuaccaagagaucccagcaggccguaaucccaaauauagggucaaggccccggguucgcaacauuccuagcagagugaguaucuauuggacaauugucaaaccaggagacauccugcuaaucaauucuaccgguaaccucauugcgccgaggggcuacuucaagauacgguccgggaaaagcucgaucaugcgcucugaugcacccauuggaaaguguaauuccgccugcaucacgccuaacggcucaauaccaaaugacaagcccuuucagaacgugaaucgaauuacuuacggugcuuguccuagauaugugaaacaaaacacacugaaacuugccaccgggaugaggaaugucccagaaaaacagacucggggaaucuucggcgcaaucgcuggcuuuauugagaacgggugggaaggaaugauggacgguugguacggcuuccgucaccagaauagugaggggcgcggacaagccgcggaucuuaagagcacacaggccgcaaucgaccagauuaacggcaaauugaacagacucauagguaagaccaaugagaaauuccaucagaucgaaaaggaguuuuccgaaguugaggggaggauucaagaucuggaaaaguauguggaggacacgaaaaucgauuuauggucuuacaacgcugagcugcucguagcccuugaaaaucagcacaccaucgaccugacagauagcgagaugaacaaguuguucgaaaagacuaagaaacagcuacgggagaaugcugaagacaugggcaacggaugcuuuaagauuuaucauaagugugauaaugccugcauaggcucaauccgaaacgggaccuacgaccacgauguguaucgcgacgaggcacugaauaacagauuccagauuaaaggagucgagcucaagagugguuacaaagacuggauccuguggauuuccuuugccaucagcugcuuccuucuguguguggcuuugcucggcuuuauaaugugggcgugccaaaaggggaauaucagguguaacauuugcaucuga

SEQ ID NO: 136382 - RNA, 1701 nt, Artificial Sequence
  derived and/or modified CDS sequence (opt3) from hemagglutinin__InfluenzaA__AFD64806
augaagaccaucauugcccugagcuacauacucugccuuguguucgcucagaaacugcccggcaacgacaauuccacagcaacuuuguguuuagggcaccaugccgucccuaacggaacgaucguuaagaccauuacaaaugaucaaaucgaggugacuaacgcgaccgaacugguacagucuucaaguacaggugagauuugcaauagcccacaccagauccuagacggcgaaaacuguacccucauagaugcucugcuuggggacccgcagugcgauggauuucaaaauaaaaagugggaccuguucguggagagauccaaagcccauucuaacuguuaucccuacgaugucccugacuaugcaucguugaggucacucguggccagcaguggcacucuggaauuuaauaacgaguccuucaauuggacagguguuacccagaacgggacgucuagcgcuugcauccggcgcuccaauaacucauuuuucagucgacugaauuggcucacucacuuaaacuuuaaguacccagcacugaacgugaccaugcccaauaacgagcaguucgauaagcuguauauuuggggaguccaucacccuggcacagacaaagaucagaccuuuuuguacgcccaagcuagcggccguaucacugugucuacaaagagaucccagcaggccguaauuccaaauaucgggucaaggccccggguucgcaacauaccuagcagagugaguauuuauuggaccaucgucaaaccaggagacauucugcuaaucaauucuacggguaaccucaucgcgccgaggggcuacuucaagauucgguccgggaaaagcucgauaaugcgcucugaugcacccaucggaaaguguaauuccgccugcauuacuccuaacggcucaaucccaaaugacaagcccuuucagaacgugaaucgaauaacauacggugcuuguccuagauaugugaaacaaaacacccugaaacuugccacugggaugaggaaugucccagaaaaacagacacggggaauuuucggcgcaaucgcuggcuuuaucgagaacgggugggaaggaaugguugacgguugguacggcuuccgucaccagaauagugaggggcgcggacaagccgcggaucuuaagagcacccaggccgcaauugaccagaucaacggcaaauugaacagacucauugguaagacgaaugagaaauuccaucagauagaaaaggaguuuuccgaaguggaggggaggauccaagaucuggaaaaguauguagaggacaccaaaauugauuuauggucuuacaacgcugagcugcucguggcccuugaaaaucagcacacaaucgaccugacugauagcgagaugaacaaguuguucgaaaagaccaagaaacagcuacgggagaaugcugaagacaugggcaacggaugcuuuaagaucuaucauaagugugauaaugccugcauuggcucaauacgaaacgggacauacgaccacgaugucuaucgcgacgaggcacugaauaacagauuccagaucaaaggaguggagcucaagagugguuacaaagacuggauucuguggaucuccuuugccauuagcugcuuccuucuguguguugcuuugcucggcuuuaucaugugggcgugccaaaaggggaauauaagguguaacaucugcauuuga

SEQ ID NO: 136383 - RNA, 1701 nt, Artificial Sequence
  derived and/or modified CDS sequence (opt3) from hemagglutinin__InfluenzaA__AFD64807
augaagaccaucauugcccugagcuacauacucugccuuguguucgcucagaaacugcccggcaacgacaauuccacagcaacuuuguguuuagggcaccaugccgucccuaacggaacgaucguuaagaccauuacaaaugaucaaaucgaggugacuaacgcgaccgaacugguacagucuucaaguacaggugagauuugcaauagcccacaccagauccuagacggcgaaaacuguacccucauagaugcucugcuuggggacccgcagugcgauggauuucaaaauaaaaagugggaccuguucguggagagauccaaagcccauucuaacuguuaucccuacgaugucccugacuaugcaucguugaggucacucguggccagcaguggcacucuggaauuuaauaacgaguccuucaauuggacagguguuacccagaacgggacgucuagcgcuugcauccggcgcuccaauaacucauuuuucagucgacugaauuggcucacucacuuaaacuuuaaguacccagcacugaacgugaccaugcccaauaacgagcaguucgauaaguuguauauuuggggaguccaucacccuggcacagacaaagaucagacuuuucuuuacgcccaagcuagcggccguaucaccgugucuacaaagagaucccagcaggccguaauuccaaauaucgggucaaggccccggguucgcgacauaccuagcagagugaguauuuauuggaccaucgucaaaccaggagauauucugcuaaucaacucuacggguaaucucaucgcgccgaggggcuacuucaagauucgguccgggaaaagcucgauaaugcgcucugacgcaccccugggaaagugucacuccgccugcaucacuccuaacggcucaauuccaaaugacaagcccuuucagaacgugaaucgaaucacauacggugcuuguccuagauaugugaaacaaaacacccuuaagcuggccacugggaugaggaaugucccagaaaaacagacacggggaauauucggcgcaauugcuggcuuuaucgagaacgggugggaaggaaugguugaugguugguacggcuuccgucaucagaauagugaggggcgcggacaagccgcggacuugaaaagcacccaggccgcaaucgaucagauuaacggcaaacucaauagacugaucgguaagacgaacgagaaauuccaccagauugaaaaggaguuuuccgaaguggaggggaggauacaagacuuagaaaaguauguagaggauaccaaaaucgaccuguggucuuacaacgcugagcuccuuguggcccuggaaaaucagcauacaauugauuugacugacagcgagaugaacaagcuauucgaaaagaccaagaaacagcugcgggagaaugcugaagauaugggcaacggaugcuuuaagaucuaucacaagugugacaaugccugcaucggcucaauucgaaacgggacauacgaucacgacauguaucgcgacgaggcacucaauaacagauuccagauaaaaggagucgagcugaagagugguuacaaagauuggauccuuuggauuuccuuugccaucagcugcuuccuguuguguguggcucuccugggcuuuauuaugugggcgugccaaaaggggaauaucagguguaacauaugcaucuga

SEQ ID NO: 136384 - RNA, 1701 nt, Artificial Sequence
  derived and/or modified CDS sequence (opt3) from hemagglutinin__InfluenzaA__AFD64810
augaagaccaucauugcccugagcuacauacucugccuuguguucgcucagaaacugcccggcaacgacaauuccacagcaacuuuguguuuagggcaccaugccgucccuaacggaacgaucguuaagaccauuacaaaugaucaaaucgaggugacuaacgcgaccgaacugguacagucuucaaguacaggugagauuugcaauagcccacaccagauccuagacggcgaaaacuguacccucauagaugcucugcuuggggacccgcagugcgauggauuucaaaauaaaaagugggaccuguucguggagagauccaaagcccauucuaacuguuaucccuacgaugucccugacuaugcaucguugaggucacucguggccagcaguggcacucuggaauuuaauaacgaguccuucaauuggacagguguuacccagaacgggacgucuagcgcuugcauccggcgcuccaauaacucauuuuucagucgacugaauuggcucacucacuuaaacuuuaaguacccagcacugaacgugaccaugcccaauaacgagcaguucgauaagcuguauauuuggggaguccaucacccuggcacagacaaagaucagaucuuuuuguacgcccaagcuagcggccguauuacugugucuaccaagagaucccagcaggccguaaucccaaauauagggucaaggccccggguucgcaacauuccuagcagagugaguaucuauuggacaauugucaaaccaggagacauccugcuaaucaauucuaccgguaaccucauugcgccgaggggcuacuucaagauacgguccgggaaaagcucgaucaugcgcucugaugcacccauuggaaaguguaauuccgccugcaucacgccuaacggcucaauaccaaaugacaagcccuuucagaacgugaaucgaauuacuuacggugcuuguccuagauaugugaaacaaaacacacugaaacuugccaccgggaugaggaaugucccagaaaaacagacucggggaaucuucggcgcaaucgcuggcuuuauugagaacgggugggaaggaaugguugacgguugguacggcuuccgucaccagaauagugaggggcgcggacaagccgcggaucuuaagagcacacaggccgcaaucgaccagauuaacggcaaauugaacagacucauagguaagaccaaugagaaauuccaucagaucgaaaaggaguuuuccgaaguggaggggaggauucaagaucuggaaaaguauguagaggacacgaaaaucgauuuauggucuuacaacgcugagcugcucguggcccuugaaaaucagcacaccaucgaccugacagauagcgagaugaacaaguuguucgaaaagacuaagaaacagcuacgggagaaugcugaagacaugggcaacggaugcuuuaagauuuaucauaagugugauaaugccugcauaggcucaauccgaaacgggaccuacgaccccgaugucuaucgcgacgaggcacugaauaacagauuccagauuaaaggaguggagcucaagagugguuacaaagacuggauccuguggauuuccuuugccaucagcugcuuccuucuguguguugcuuugcucggcuuuauaaugugggcgugccaaaaggggaauaucagguguaacauuugcaucuga

SEQ ID NO: 136385 - RNA, 1701 nt, Artificial Sequence
  derived and/or modified CDS sequence (opt3) from hemagglutinin__InfluenzaA__AFD64812
augaagaccaucauugcccugagcuacauacucugccuuguguucgcucagaaacugcccggcaacgacaauuccacagcaacuuuguguuuagggcaccaugccgucccuaacggaacgaucguuaagaccauuacaaaugaucaaaucgaggugacuaacgcgaccgaacugguacagucuucaaguacaggugagauuugcaauagcccacaccagauccuagacggcgaaaacuguacccucauagaugcucugcuuggggacccgcagugcgauggauuucaaaauaaaaagugggaccuguucguggagagauccaaagcccauucuaacuguuaucccuacgaugucccugacuaugcaucguugaggucacucguggccagcaguggcacucuggaauuuaauaacgaguccuucaauuggacagguguuacccagaacgggacgucuagcgcuugcauccggcgcuccaauaacucauuuuucagucgacugaauuggcucacucacuuaaacuuuaaguacccagcacugaacgugaccaugcccaauaacgagcaguucgauaagcuguauauuuggggaguccaucacccuggcacagacaaagaucagaccuuuuuguacgcccaagcuagcggccguaucacugugucuacaaagagaucccagcaggccguaauuccaaauaucgggucaaggccccggguucgcaacauaccuagcagagugaguauuuauuggaccaucgucaaaccaggagacauucugcuaaucaauucuacggguaaccucaucgcgccgaggggcuacuucaagauucgguccgggaaaagcucgauaaugcgcucugaugcacccaucggaaaguguaauuccgccugcauuacuccuaacggcucaaucccaaaugacaagcccuuucagaacgugaaucgaauaacauacggugcuuguccuagauaugugaaacaaaacacccugaaacuugccacugggaugaggaaugucccagaaaaacagacacggggaauuuucggcgcaaucgcuggcuuuaucgagaacgggugggaaggaaugguugacgguugguacggcuuccgucaccagaauagugaggggcgcggacaagccgcggaucuuaagagcacccaggccgcaacggaccagauuaacggcaaauugaacagacucaucgguaagaccaaugagaaauuccaucagauugaaaaggaguuuuccgaaguggaggggaggauacaagaucuggaaaaguauguagaggacacaaaaaucgauuuauggucuuacaacgcugagcugcucguggcccuugaaaaucagcacacuauugaccugaccgauagcgagaugaacaaguuguucgaaaagacaaagaaacagcuacgggagaaugcugaagacaugggcaacggaugcuuuaagaucuaucauaagugugauaaugccugcaucggcucaauucgaaacgggacuuacgaccacgaugucuaucgcgacgaggcacugaauaacagauuccagauaaaaggaguggagcucaagagugguuacaaagacuggauccuguggauuuccuuugccaucagcugcuuccuucuguguguugcuuugcucggcuuuauuaugugggcgugccaaaaggggaauaucagguguaacauaugcaucuga

SEQ ID NO: 136386 - RNA, 1701 nt, Artificial Sequence
  derived and/or modified CDS sequence (opt3) from hemagglutinin__InfluenzaA__AFD64814
augaagaccaucauugcccugagcuacauacucugccuuguguucgcucagaaacugcccggcaacgacaauuccacagcaacuuuguguuuagggcaccaugccgucccuaacggaacgaucguuaagaccauuacaaaugaucaaaucgaggugacuaacgcgaccgaacugguacagucuucaaguacaggugagauuugcaauagcccacaccagauccuagacggcgaaaacuguacccucauagaugcucugcuuggggacccgcagugcgauggauuucaaaauaaaaagugggaccuguucguggagagauccaaagcccauucuaacuguuaucccuacgaugucccugacuaugcaucguugaggucacucguggccagcaguggcacucuggaauuuaauaacgaguccuucaauuggacagguguuacccagaacgggacgucuagcgcuugcauccggcgcuccaauaacucauuuuucagucgacugaauuggcucacucacuuaaacuuuaaguacccagcacugaacgugaccaugcccaauaacgagcaguucgauaagcuguauauuuggggaguccaucacccuggcacagacaaagaucagaccuuuuuguacgcccaagcuagcggccguaucacugugucuacaaagagaucccagcaggccguaauuccaaauaucgggucaaggccccggguucgcaacauaccuagcagagugaguauuuauuggaccaucgucaaaccaggagacauucugcuaaucaauucuacggguaaccucaucgcgccgaggggcuacuucaagauucgguccgggaaaagcucgauaaugcgcucugaugcacccaucggaaaguguaauuccgccugcauuacuccuaacggcucaaucccaaaugacaagcccuuucagaacgugaaucgaauaacauacggugcuuguccuagauaugugaaacaaaacacccugaaacuugccacugggaugaggaaugucccagaaaaacagacacggggaauuuucggcgcaaucgcuggcuuuaucgagaacgggugggaaggaaugguugacgguugguacggcuuccgucaccagaauagugaggggcgcggacaagccgcggaucuuaagagcacccaggccgcaauugaccagaucaacggcaaauugaacagacucauugguaagacgaaugagaaauuccaucagauagaaaaggaguuuuccgaaguggaggggaggauccaagaucuggaaaaguauguagaggacaccaaaauugauuuauggucuuacaacgcugagcugcucguggcccuugaaaaucagcacacaaucgaccugacugauagcgagaugaacaaguuguucgaaaagaccaagaaacagcuacgggagaaugcugaagacaugggcaacggaugcuuuaagaucuaucauaagugugauaaugccugcauuggcucaauacgaaacgggacauacgaccccgaugucuaucgcgacgaggcacugaauaacagauuccagaucaaaggaguggagcucaagagugguuacaaagacuggauucuguggaucuccuuugccauuagcugcuuccuucuguguguugcuuugcucggcuuuaucaugugggcgugccaaaaggggaauauaagguguaacaucugcauuuga

SEQ ID NO: 136387 - RNA, 1701 nt, Artificial Sequence
  derived and/or modified CDS sequence (opt3) from hemagglutinin__InfluenzaA__AFD64816
augaagaccaucauugcccugagcuacauacucugccuuguguucgcucagaaacugcccgagaacgacaauuccacagcaacuuuguguuuaggccaccaugccgucccuaacgggacgaucguuaagaccauuacaaaugaucaaaucgaagugacuaacgcgaccgagcugguacagucuucaaguacaggagaaauuugcaauagcccacaccagauccuagacggugagaacuguacccucauagaugcucugcuuggcgacccgcagugcgauggguuucaaaauaaaaagugggaccuguucguggaaagauccaaagcccauucuaacuguuaucccuacgaugucccugacuaugcaucguugaggucacucguggccagcaguggaacucuggaguuuaauaacgaguccuucaauuggacaggcguuacccagaacgguacgucuagcgcuugcaugcggcgcuccaauaacucauuuuucagucgacugaauuggcucacucacuuaaacuuuaaguacccagcacugaacgugaccaugcccaauaacgaacaguucgauaagcuguauaucuggggaguccaucacccugggacagacaaagaucagauuuuucuuuacgcccaagcuagcggccguaucacugugucuaccaagagaucccagcaggccguaauuccaaauaucggcucaaggccccggguucgcaacauaccuagcagagugaguauuuauuggacaaucgucaaaccaggggacauucugcuaaucaauucuaccggaaaccucaucgcgccgagggguuacuucaagauucgguccggcaaaagcucgauaaugcgcucugaugcacccaucgggaaguguaauuccgccugcauuacgccuaacggaucaaucccaaaugacaagcccuuucagaacgugaaucgaauaacuuacggcgcuuguccuagauaugugaaacaaaacacacugaaguuggccaccgguaugaggaaugucccagagaaacagacucgggggauuuucggagcaaucgcuggcuuuaucgaaaacggcugggaggggaugguugacggaugguacgguuuccgucaccagaauagugagggccgcgggcaagccgcggaucuuaagagcacacaggccgcaauugaccagaucaacggaaaauugaacagacucauuggcaagaccaaugaaaaauuccaucagauagagaaggaauuuuccgagguggaagguaggauccaagaucuggagaaguauguagaggacacgaaaauugauuuauggucuuacaacgcugaacugcucguggcccuugagaaucagcacaccaucgaccugacagauagcgaaaugaacaaguuguucgagaaaacuaagaaacagcuacgggaaaaugcugaggacauggggaacggcugcuuuaagaucuaucauaagugugauaaugccugcauuggaucaauacgaaacggcaccuacgaccacgaugucuaucgcgacgaggcacugaauaacagauuccagaucaaagggguggaacucaagaguggauacaaagacuggauucuguggaucuccuuugccauuagcugcuuccuucuguguguugcuuugcucgguuuuaucaugugggcgugccaaaagggcaauauaagguguaacaucugcauuuga

SEQ ID NO: 136388 - RNA, 1701 nt, Artificial Sequence
  derived and/or modified CDS sequence (opt3) from hemagglutinin__InfluenzaA__AFD64818
augaagaccaucauugcccugagcuacauacucugccuuguguucgcucagaaacugcccggcaacgacaauuccacagcaacuuuguguuuagggcaccaugccgucccuaacggaacgaucguuaagaccauuacaaaugaucaaaucgaggugacuaacgcgaccgaacugguacagucuucaaguacaggugagauuugcaauagcccacaccagauccuagacggcgaaaacuguacccucauagaugcucugcuuggggacccgcagugcgauggauuucaaaauaaaaagugggaccuguucguggagagauccaaagcccauucuaacuguuaucccuacgaugucccugacuaugcaucguugaggucacucguggccagcaguggcacucuggaauuuaauaacgaguccuucaauuggacagguguuacccagaacgggacgucuagcgcuugcauccggcgcuccaauaacucauuuuucagucgacugaauuggcucacucacuuaaacuuuaaguacccagcacugaacgugaccaugcccaauaacgagcaguucgauaaguuguauauuuggggaguccaucacccuggcacagacaaagaucagacuuuucuuuacgcccaagcuagcggccguaucaccgugucuacaaagagaucccagcaggccguaauuccaaauaucgggucaaggccccggguucgcaacauaccuagcagagugaguauuuauuggaccaucgucaaaccaggagacauucugcuaaucaauucuacggguaaccucaucgcgccgaggggcuacuucaagauucgguccgggaaaagcucgauaaugcgcucugaugcaccccugggaaaguguaucuccgccugcauuacuccuaauggcucaaucccaaacgacaagcccuuucagaaugugaaccgaauaacauacggugcuuguccuagauaugugaaacaaaauacccuuaagcuggccacugggaugaggaacgucccagaaaaacagacacggggaauuuucggcgcaaucgcuggcuuuaucgagaaugggugggaaggaaugguugacgguugguacggcuuccgucaccagaacagugaggggcgcggacaagccgcggauuugaaaagcacccaggccgcaauugaccagaucaauggcaaacucaacagacugauugguaagacgaacgagaaauuccaucagauagaaaaggaguuuuccgaaguggaggggaggauccaagauuuagaaaaguauguagaggacaccaaaauugaucuguggucuuacaaugcugagcuccuuguggcccuggaaaaccagcacacaaucgacuugacugauagcgagaugaauaagcuauucgaaaagaccaagaaacagcugcgggagaacgcugaagacaugggcaauggaugcuuuaagaucuaucauaagugugauaacgccugcauuggcucaauacgaaaugggacauacgaccacgaugucuaucgcgacgaggcacucaacaauagauuccagaucaaaggaguggagcugaagagugguuacaaagacuggauucuuuggaucuccuuugccauuagcugcuuccuguuguguguugcucuccugggcuuuaucaugugggcgugccaaaaggggaacauaagguguaauaucugcauuuga

SEQ ID NO: 136389 - RNA, 1701 nt, Artificial Sequence
  derived and/or modified CDS sequence (opt3) from hemagglutinin__InfluenzaA__AFD64819
augaagaccaucauugcccugagcuacauacucugccuuguguucgcucagaaacugcccggcaacgacaauuccacagcaacuuuguguuuagggcaccaugccgucccuaacggaacgaucguuaagaccauuacaaaugaucaaaucgaggugacuaacgcgaccgaacugguacagucuucaaguacaggugagauuugcaauagcccacaccagauccuagacggcgaaaacuguacccucauagaugcucugcuuggggacccgcagugcgauggauuucaaaauaaaaagugggaccuguucguggagagauccaaagcccauucuaacuguuaucccuacgaugucccugacuaugcaucguugaggucacucguggccagcaguggcacucuggaauuuaauaacgaguccuucaauuggacagguguuacccagaacgggacgucuagcgcuugcauccggcgcuccaauaacucauuuuucagucgacugaauuggcucacucacuuaaacuuuaaguacccagcacugaacgugaccaugcccaauaacgagcaguucgauaagcuguauauuuggggaguccaucacccuggcacagacaaagaucagaccuuuuuguacgcccaagcuagcggccguaucacugugucuacaaagagaucccagcaggccguaauuccaaauaucgggucaaggccccggauacgcaacauuccuagcagaguuaguaucuauuggaccauugugaaaccaggagacauccugcuaaucaauucuacggguaaccucauugcgccgaggggcuacuucaagauacgguccgggaaaagcucgaucaugcgcucugaugcacccauuggaaaguguaucuccgccugcauaacuccuaauggcucaauuccaaacgacaagcccuuucagaaugucaaccgaaucacauacggugcuuguccuagauaugugaaacaaaauacccugaaacuugccacugggaugaggaacgugccagaaaaacagacacggggaaucuucggcgcaauugcuggcuuuaucgagaaugggugggaaggaauggucgacgguugguacggcuuccgucaccagaacagugaggggcgcggacaagccgcggaucuuaagagcacccaggccgcaauugaccagauaaauggcaaauugaacagacucaucgguaagacgaacgagaaauuccaucagauugaaaaggaguuuuccgaaguugaggggaggauccaagaucuggaaaaguauguggaggacaccaaaaucgauuuauggucuuacaaugcugagcugcucguagcccuugaaaaccagcacacaauugaccugacugauagcgagaugaauaaguuguucgaaaagaccaagaaacagcuacgggagaacgcugaagacaugggcaauggaugcuuuaagauauaucauaagugugauaacgccugcaucggcucaauucgaaaugggacauacgaccccgauguguaucgcgacgaggcacugaacaauagauuccagaucaaaggagucgagcucaagagugguuacaaagacuggauucuguggaucuccuuugccauaagcugcuuccuucuguguguggcuuugcucggcuuuaucaugugggcgugccaaaaggggaacauuagguguaauaucugcauuuga

SEQ ID NO: 136390 - RNA, 1701 nt, Artificial Sequence; identical to SEQ ID NO: 135030
  derived and/or modified CDS sequence (opt3) from hemagglutinin__InfluenzaA__AFD64820

SEQ ID NO: 136391 - RNA, 1701 nt, Artificial Sequence
  derived and/or modified CDS sequence (opt3) from hemagglutinin__InfluenzaA__AFD64822
augaagaccaucauugcccugagcuacauacucugccuuguguucgcucagaaacugcccggcaacgacaauuccacagcaacuuuguguuuagggcaccaugccgucccuaacggaacgaucguuaagaccauuacaaaugaucaaaucgaggugacuaacgcgaccgaacugguacagucuucaaguacaggugagauuugcaauagcccacaccagauccuagacggcgaaaacuguacccucauagaugcucugcuuggggacccgcagugcgauggauuucaaaauaaaaagugggaccuguucguggagagauccaaagcccauucuaacuguuaucccuacgaugucccugacuaugcaucguugaggucacucguggccagcaguggcacucuggaauuuaauaacgaguccuucaauuggacagguguuacccagaacgggacgucuagcgcuugcaugcggcgcuccaauaacucauuuuucagucgacugaauuggcucacucacuuaaacuuuaaguacccagcacugaacgugaccaugcccaauaacgagcaguucgauaagcuguauaucuggggaguccaucacccuggcacagacaaagaucagaucuuuuuguacgcccaagcuagcggccguauuacugugucuaccaagagaucccagcaggccguaauuccaaauaucgggucaaggccccggguucgcaacauaccuagcagagugaguauuuauuggacaaucgucaaaccaggagacauucugcuaaucaauucuaccgguaaccucaucgcgccgaggggcuacuucaagauucgguccgggaaaagcucgauaaugcgcucugaugcacccaucggaaaguguaauuccgccugcauuacgccuaacggcucaaucccaaaugacaagcccuuucagaacgugaaucgaauaacuuacggugcuuguccuagauaugugaaacaaaacacacugaaacuugccaccgggaugaggaaugucccagaaaaacagacucggggaauuuucggcgcaaucgcuggcuuuaucgagaacgggugggaaggaaugguugacgguugguacggcuuccgucaccagaauagugaggggcgcggacaagccgcggaucuuaagagcacacaggccgcaauugaccagaucaacggcaaauugaacagacucauugguaagaccaaugagaaauuccaucagauagaaaaggaguuuuccgaaguggaggggaggauccaagaucuggaaaaguauguagaggacacgaaaauugauuuauggucuuacaacgcugagcugcucguggcccuugaaaaucagcacaccaucgaccugacagauagcgagaugaacaaguuguucgaaaagacuaagaaacagcuacgggagaaugcugaagacaugggcaacggaugcuuuaagaucuaucauaagugugauaaugccugcauuggcucaauacgaaacgggaccuacgaccacgaugucuaucgcgacgaggcacugaauaacagauuccagaucaaaggaguggagcucaagagugguuacaaagacuggauucuguggaucuccuuugccauuagcugcuuccuucuguguguugcuuugcucggcuuuaucaugugggcgugccaaaaggggaauauaagguguaacaucugcauuuga

SEQ ID NO: 136392 - RNA, 1701 nt, Artificial Sequence
  derived and/or modified CDS sequence (opt3) from hemagglutinin__InfluenzaA__AFD64823
augaagaccaucauugcccugagcuacauacucugccuuguguucgcucagaaacugcccggcaacgacaauuccacagcaacuuuguguuuagggcaccaugccgucccuaacggaacgaucguuaagaccauuacaaaugaucaaaucgaggugacuaacgcgaccgaacugguacagucuucaaguacaggugagauuugcaauagcccacaccagauccuagacggcgaaaacuguacccucauagaugcucugcuuggggacccgcagugcgauggauuucaaaauaaaaagugggaccuguucguggagagauccaaagcccauucuaacuguuaucccuacgaugucccugacuaugcaucguugaggucacucguggccagcaguggcacucuggaauuuaauaacgaguccuucaauuggacagguguuacccagaacgggacgucuagcgcuugcauccggcgcuccaauaacucauuuuucagucgacugaauuggcucacucacuuaaacuuuaaguacccagcacugaacgugaccaugcccaauaacgagcaguucgauaaacuuuauauuuggggaguccaucacccuggcacagacaaggaucagaucuuuuuguacgcccaagcugccggccguauuacugugagcaccaagagaucucagcaggcgguaaucccaaauauaggguccaggccccggguucgcaacauuccuucaagagugagcaucuauuggacaauugucaaaccaggagacauccugcuaaucaauaguaccgguaaccucauugcaccgaggggcuacuucaagauacggucugggaaauccagcaucaugcgcucggaugcccccauuggacgauguaauucugcuugcaucacgccuaacggcuccauaccaaaugacaagcccuuucagaacgugaauagaauuacuuacggugccuguccuagguaugugaagcaaaacacacugaaacuugcaaccgggaugcggaaugucccagaaaagcagacucguggaaucuucggcgcuaucgccggcuuuauugagaacgggugggaaggaaugguugacgguugguacggcuuccgccaccaaaauucagaggggagaggacaggcggccgaucugaaaaguacacaggcagcuaucgaccagauuaacggcaaguugaacaggcucauagguaaaaccaaugagaaguuccaucagaucgaaaaagaguuuagcgaaguggaggggcggauucaagaucuggaaaaguauguagaggacacgaagaucgauuuaugguccuacaacgccgagcugcucguggcucuugaaaaucagcacaccaucgaccugacagauucugagaugaacaaauuguucgaaaagacuaaaaagcagcuacgagagaaugccgaagacaugggcaacggaugcuuuaaaauuuaucauaagugugauaaugcaugcauaggcagcauccgcaacgggaccuacgaccacgaugucuauagagacgaggcccugaauaacagguuccagauuaagggaguggagcucaaaucagguuacaaggacuggauccuguggauuaguuuugcuaucuccugcuuccuucuguguguugcguugcucggcuuuauaaugugggcaugccaaaaagggaauauccgguguaacauuugcaucuga

SEQ ID NO: 136393 - RNA, 1701 nt, Artificial Sequence
  derived and/or modified CDS sequence (opt3) from hemagglutinin__InfluenzaA__AFD64824
augaagaccaucauugcccugagcuacauacucugccuuguguucgcucagaaacugcccggcaacgacaauuccacagcaacuuuguguuuagggcaccaugccgucccuaacggaacgaucguuaagaccauuacaaaugaucaaaucgaggugacuaacgcgaccgaacugguacagucuucaaguacaggugagauuugcaauagcccacaccagauccuagacggcgaaaacuguacccucauagaugcucugcuuggggacccgcagugcgauggauuucaaaauaaaaagugggaccuguucguggagagauccaaagcccauucuaacuguuaucccuacgaugucccugacuaugcaucguugaggucacucguggccagcaguggcacucuggaauuuaauaacgaguccuucaauuggacagguguuacccagaacgggacgucuagcgcuugcauccggcgcuccaauaacucauuuuucagucgacugaauuggcucacucacuuaaacuuuaaguacccagcacugaacgugaccaugcccaauaacgagcaguucgauaagcuguauauuuggggaguccaucacccuggcacagacaaagaucagaccuuuuuguacgcccaagcuagcggccguaucacugugucuacaaagagaucccagcaggccguaauuccaaauaucgggucaaggccccggguucgcaacauaccuagcagagugaguauuuauuggaccaucgucaaaccaggagacauucugcuaaucaauucuacggguaaccucaucgcgccgaggggcuacuucaagauucgguccgggaaaagcucgauaaugcgcucugaugcacccaucggaaaguguaauuccgccugcauuacuccuaacggcucaaucccaaaugacaagcccuuucagaacgugaaucgaauaacauacggugcuuguccuagauaugugaaacaaaacacccugaaacuugccacugggaugaggaaugucccagaaaaacagacacggggaauuuucggcgcaaucgcuggcuuuaucgagaacgggugggaaggaaugguugacgguugguacggcuuccgucaccagaauagugaggggcgcggacaagccgcggaucuuaagagcacccaggccgcaauugaccagaucaacggcaaauugaacagacucauugguaagacgaaugagaaauuccaucagauagaaaaggaguuuuccgaaguggaggggaggauccaagaucuggaaaaguauguagaggacaccaaaauugauuuauggucuuacaacgcugagcugcucguggcccuugaaaaucagcacacaaucgaccugacugauagcgagaugaacaaguuguucgaaaagaccaagaaacagcuacgggagaaugcugaagacaugggcaacggaugcuuuaagaucuaucauaagugugauaaugccugcauuggcucaauacgaaacgggacauacgaccacgaugucuaucgcgacgaggcacugaauaacagauuccagaucaaaggaguggagcucaagagugguuacaaagacuggauucuguggaucuccuuugccacuagcugcuuccuucuguguguugcuuugcucggcuuuauuaugugggcgugccaaaaggggaauaucagguguaacauaugcaucuga

SEQ ID NO: 136394 - RNA, 1701 nt, Artificial Sequence; identical to SEQ ID NO: 136382
  derived and/or modified CDS sequence (opt3) from hemagglutinin__InfluenzaA__AFD64825

SEQ ID NO: 136395 - RNA, 1701 nt, Artificial Sequence; identical to SEQ ID NO: 136382
  derived and/or modified CDS sequence (opt3) from hemagglutinin__InfluenzaA__AFD64827

SEQ ID NO: 136396 - RNA, 1701 nt, Artificial Sequence
  derived and/or modified CDS sequence (opt3) from hemagglutinin__InfluenzaA__AFD64828
augaagaccaucauugcccugagcuacauacucugccuuguguucgcucagaaacugcccggcaacgacaauuccacagcaacuuuguguuuagggcaccaugccgucccuaacggaacgaucguuaagaccauuacaaaugaucaaaucgaggugacuaacgcgaccgaacugguacagucuucaaguacaggugagauuugcaauagcccacaccagauccuagacggcgaaaacuguacccucauagaugcucugcuuggggacccgcagugcgauggauuucaaaauaaaaagugggaccuguucguggagagauccaaagcccauucuaacuguuaucccuacgaugucccugacuaugcaucguugaggucacucguggccagcaguggcacucuggaauuuaauaacgaguccuucaauuggacagguguuacccagaacgggacgucuagcgcuugcauccggcgcuccaauaacucauuuuucagucgacugaauuggcucacucacuuaaacuuuaaguacccagcacugaacgugaccaugcccaauaacgagcaguucgauaagcuguauauuuggggaguccaucacccuggcacagacaaagaucagaucuuuuuguacgcccaagcuagcggccguauuacugugucuaccaagagaucccagcaggccguaaucccaaauauagggucaaggccccggguucgcaacauuccuagcagagugaguaucuauuggacaauugucaaaccaggagacauccugcuaaucaauucuaccgguaaccucauugcgccgaggggcuacuucaagauacgguccgggaaaagcucgaucaugcgcucugaugcacccauuggaaaguguaauuccgccugcaucacgccuaacggcucaauaccaaaugacaagcccuuucagaacgugaaucgaauuacuuacggugcuuguccuagauaugugaaacaaaacacacugaaacuugccaccgggaugaggaaugucccagaaaaacagacucggggaaucuucggcgcaaucgcuggcuuuauugagaacgggugggaaggaaugauggacgguugguacggcuuccgucaccagaauagugaggggcgcggacaagccgcggaucuuaagagcacacaggccgcaaucgaccagauuaacggcaaauugaacagacucauagguaagaccaaugagaaauuccaucagaucgaaaaggaguuuuccgaaguugaggggaggauucaagaucuggaaaaguauguggaggacacgaaaaucgauuuauggucuuacaacgcugagcugcucguagcccuugaaaaucagcacaccaucgaccugacagauagcgagaugaacaaguuguucgaaaagacuaagaaacagcuacgggagaaugcugaagacaugggcaacggaugcuuuaagauuuaucauaagugugauaaugccugcauaggcucaauccgaaacgggaccuacgaccccgauguguaucgcgacgaggcacugaauaacagauuccagauuaaaggagucgagcucaagagugguuacaaagacuggauccuguggauuuccuuugccaucagcugcuuccuucuguguguggcuuugcucggcuuuauaaugugggcgugccaaaaggggaauaucagguguaacauuugcaucuga

SEQ ID NO: 136397 - RNA, 1701 nt, Artificial Sequence; identical to SEQ ID NO: 136391
  derived and/or modified CDS sequence (opt3) from hemagglutinin__InfluenzaA__AFD64830

SEQ ID NO: 136398 - RNA, 1701 nt, Artificial Sequence; identical to SEQ ID NO: 135030
  derived and/or modified CDS sequence (opt3) from hemagglutinin__InfluenzaA__AFD98095

SEQ ID NO: 136399 - RNA, 1701 nt, Artificial Sequence
  derived and/or modified CDS sequence (opt3) from hemagglutinin__InfluenzaA__AFD98106
augaagaccaucauugcccugagcuacauacucugccuuguguucgcucagaaacugcccggcaacgacaauuccacagcaacuuuguguuuagggcaccaugccgucccuaacggaacgaucguuaagaccauuacaaaugaucaaaucgaggugacuaacgcgaccgaacugguacagucuucaagugcuggugagauuugcgacagcccacaccauauccuagauggcgaaaauuguacacucauagacgcccugcuuggggauccgcagugcgacggauuucagaacaaaaagugggaucuguucguggagagauccagggcauauucuaauuguuaccccuaugacgucccugauuacgccucguugcggucacucguggcuagcaguggcacccuggaauuuaacaaugaguccuucaacuggacugguguuacacaaaaugggaccucuagcgcaugcauccgccgauccaacaauucauuuuucagucgucugaacuggcucacgcacuuaaauuuuaaauauccagcccugaacgugacuaugcccaacaaugagcaguucgacaaacuuuacauuuggggaguccaucacccuggcaccgauaaggaccagaucuuuuuguaugcucaggccagcggcagaauuacagugucuacuaaaaggucccaacaggcgguaaucccaaacauagggucacggccccgcguuagaaauauuccuagcaggaucaguauuuacuggaccaucgugaagccaggagauauccugcuaauuaacucuacagguaaucucauagcaccgcggggcuacuucaaaauccgcuccggaaagagcucgauuaugcgaucugacgcccccaucgggaaauguaacuccgaaugcauaaccccuaauggcucaauuccaaacgacaagcccuuucagaaugucaacagaaucacguauggugcuuguccuagguacgugaagcagaguacucugaaacuugccacagggaugcggaaugugccagagaagcaaacccguggaaucuucggcgcaauugcuggcuuuaucgaaaacgggugggagggaaugauggaugguugguauggcuuccgccaccagaauagcgaggggagaggacaggccgcggaccugaaauccacucaagccgcaauugaucagauaaacggcaaguugaauaggcucaucgguaaaacaaacgaaaaguuccaucagauugagaaagaauuuucugaggucgaagggcggauccaggaccuggagaaguacguugaggauaccaagaucgacuuauggagcuauaacgcugaacugcucguggcccuugagaaucaacacacgauugaucugaccgacucagaaaugaacaaauuguucgagaagacaaagaagcagcuacgagaaaaugcugaggauaugggcaacggaugcuuuaaaauauaccauaagugugacaaugccugcaucggcaguauucgcaacgggacuuaugaucacgacguauacagagacgaggcacugaauaacagguuccagaucaagggaguggaacucaaauccgguuacaaggauuggauucuguggaucagcuuugccauaucuugcuuccuucugugugucgcuuugcucggcuuuaucaugugggcgugccagaaagggaauauucgguguaacaucugcauuuga

SEQ ID NO: 136400 - RNA, 1701 nt, Artificial Sequence
  derived and/or modified CDS sequence (opt3) from hemagglutinin__InfluenzaA__AFD98128
augaagaccaucauugcccugagcuacauacucugccuuguguucgcucagaaacugcccggcaacgacaauuccacagcaacuuuguguuuagggcaccaugccgucccuaacggaacgaucguuaagaccauuacaaaugaucaaaucgaggugacuaacgcgaccgaacugguacaaaauucuucaacaggugagauuugcaacaguccacaccagauccuagacggcgaaaauuguacccucauagaugcucugcuuggggacccgcagugcgauggauuucagaacaaaaagugggaccuguucguggagagaagcaaagcccauuccaauuguuaucccuacgaugucccugacuaugcaucuuugaggucgcucguggccucaagcggcacucuggaauuuaacaaugagaguuucaacuggacagguguuacccagaaugggacguccucugcuugcaucagaaagagcaacaauuccuuuuucucacgccugaacuggcucacucacuuaaacuuuaaguacccagcacugaaugugaccaugcccaacaaugagcaguucgauaaacuuuauauuuggggaguccaucacccuggcacagacaaggaucagaucuuuuuguacgcccaagcugccggccgaauuacugugaguaccaaacguagccagcaggcgguaaucccaaacauagggucuagacccaggguucggaauauuccuucccgcgugucaaucuauuggacaauugucaagccaggagacauccugcuaaucaacagcaccgguaaucucauugcaccgagaggcuacuucaaaauaaggagugggaagucuuccaucaugcggagcgaugcccccauuggaaaguguaacucggcuugcaucacgccuaauggcucuauaccaaacgacaaacccuuucagaaugugaaccgcauuacuuacggugccuguccucgauaugugaagcaaaauacacugaaacuugcaaccgggaugagaaacgucccagaaaagcagacuaggggaaucuucggcgcuaucgccggcuuuauugagaaugggugggaaggaaugguugacgguugguacggcuuccggcaccagaacuccgaggggcguggacaagcggccgaucugaaaucaacacaggcagcuaucgaccagauuaacggcaaguugaaucgccucauagguaaaaccaacgagaaguuccaucagaucgaaaaggaguuuagugaaguggaggggcggauucaagaucuggaaaaauauguagaggacacgaagaucgauuuauggagcuacaaugccgagcugcucguggcucuugaaaaccagcacaccaucgaccugacagauuccgagaugaauaaauuguucgaaaagacuaaaaagcagcuaagggagaacgccgaagacaugggcaauggaugcuuuaagauuuaucauaaaugugauaacgcaugcauaggcucuauccggaaugggaccuacgaccacgaugucuaucgagacgaggcccugaacaaucgcuuccagauuaagggaguggagcucaaaagcgguuacaaggacuggauccuguggauuucauuugcuaucaguugcuuccuucuguguguugcguugcucggcuuuauaaugugggcaugccaaaaagggaacaucagauguaauauuugcaucuga

SEQ ID NO: 136401 - RNA, 1701 nt, Artificial Sequence; identical to SEQ ID NO: 135030
  derived and/or modified CDS sequence (opt3) from hemagglutinin__InfluenzaA__AFD98139

SEQ ID NO: 136402 - RNA, 1701 nt, Artificial Sequence
  derived and/or modified CDS sequence (opt3) from hemagglutinin__InfluenzaA__AFD98161
augaagaccaucauugcccugagcuacauacucugccuuguguucgcucagaaacugcccggcaacgacaauuccacagcaacuuuguguuuagggcaccaugccgucccuaacggaacgaucguuaagaccauuacaaaugaucaaaucgaggugacuaacgcgaccgaacugguacaaaauucuucagcuggugagauuugcgacaguccacaccauauccuagauggcgaaaacuguacacucauagacgcccugcuuggggauccgcagugcgacggauuucagaauaaaaagugggaucuguucguggagagaagcagggcauauuccaacuguuaccccuaugacgucccugauuacgccucuuugcggucgcucguggcuucaagcggcacccuggaauuuaauaacgagaguuucaauuggacugguguuacacagaacgggaccuccucugcaugcauccgccgaagcaauaacuccuuuuucucacgucugaauuggcucacgcacuuaaacuuuaaauauccagcccugaacgugacuaugcccaauaacgagcaguucgacaaacuuuacauuuggggaguccaucacccuggcaccgauaaggaccagaucuuuuuguaugcucaggccaguggcagaauuacagugagcacuaaaaggucucaacaggcgguaaucccaaauauagggucccggccccgcguuagaaacauuccuucaaggaucagcauuuacuggaccaucgugaagccaggagauauccugcuaauuaauaguacagguaaccucauagcaccgcggggcuacuucaaaauccgcucugggaaguccagcauuaugcgaucggacgcccccaucggaaaauguaauucugaaugcauaaccccuaacggcuccauuccaaaugacaagcccuuucagaacgucaauagaaucacguauggugcuuguccuagguacgugaagcagucaacucugaaacuugccacagggaugcggaacgugccagagaagcaaacccguggaaucuucggcgcaauugcuggcuuuaucgaaaaugggugggagggaaugauggaugguugguauggcuuccgccaccagaacagugaggggagaggacaggccgcggaccugaaaagcacucaagccgcaauugaucagauaaauggcaaguugaacaggcucaucgguaaaacaaacgaaaaguuccaucagauugagaaagaauuuuccgaggucgaagggcggauccaggaccuggagaaguacguugaggauaccaagaucgacuuauggucuuauaaugcugaacugcucguggcccuugagaaccaacacacgauugaucugaccgacagcgaaaugaauaaauuguucgagaagacaaagaagcagcuacgagaaaacgcugaggauaugggcaauggaugcuuuaaaauauaccauaagugugacaacgccugcaucggcucaauucgcaaugggacuuaugaucacgacguauacagagacgaggcacugaacaauagguuccagaucaagggaguggaacucaaaagugguuacaaggauuggauucuguggaucuccuuugccauaagcugcuuccuucugugugucgcuuugcucggcuuuaucaugugggcgugccagaaagggaacauucgguguaauaucugcauuuga

SEQ ID NO: 136403 - RNA, 1701 nt, Artificial Sequence
  derived and/or modified CDS sequence (opt3) from hemagglutinin__InfluenzaA__AFD98172
augaagaccaucauugcccugagcuacauacucugccuuguguucgcucagaaacugcccggcaacgacaauuccacagcaacuuuguguuuagggcaccaugccgucccuaacggaacgaucguuaagaccauuacaaaugaucaaaucgaggugacuaacgcgaccgaacugguacagucuucaagugcuggugagauuugcgacagcccacaccauauccuagauggcgaaaauuguacacucauagacgcccugcuuggggauccgcagugcgacggauuucagaacaaaaagugggaucuguucguggagagauccagggcauauucuaauuguuaccccuaugacgucccugauuacgccucguugcggucacucguggcuagcaguggcacccuggaauuuaacaaugaguccuucaacuggacugguguuacacaaaaugggaccucuagcgcaugcauccgccgauccaacaauucauuuuucagucgucugaacuggcucacgcacuuaaauuuuaaauauccagcccugaacgugacuaugcccaacaaugagcaguucgacaaacuuuacauuuggggaguccaucacccuggcaccgauaaggaccagaucuuuuuguaugcucaggccagcggcagaauuacagugucuacuaaaaggucccaacaggcgguaaucccaaacauagggucacggccccgcguuagaaauauuccuagcaggaucaguauuuacuggaccaucgugaagccaggagauauccugcuaauuaacucuacagguaaucucauagcaccgcggggcuacuucaaaauccgcuccggaaagagcucgauuaugcgaucugacgcccccaucgggaaauguaacuccgaaugcauaaccccuaauggcucaauuccaaacgacaagcccuuucagaaugucaacagaaucacguauggugcuuguccuagguacgugaagcagaguacucugaaacuugccacagggaugcggaaugugccagagaagcaaacccguggaaucuucggcgcaauugcuggcuuuaucgaaaacgggugggagggaaugauggaugguugguauggcuuccgccaccagaauagcgaggggagaggacaggccgcggaccugaaauccacucaagccgcaauugaucagauaaacggcaaguugaauaggcucaucgguaaaacaaacgaaaaguuccaucagauugagaaagaauuuucugaggucgaagggcggauccaggaccuggagaaguacguugaggauaccaagaucgacuuauggagcuauaacgcugaacugcucguggcccuugagaaucaacacacgauugaucugaccgacucagaaaugaacaaauuguucgagaagacaaagaagcagcuacgagaaaaugcugaggauaugggcaacggaugcuuuaaaauauaccauaagugugacaaugccugcaucggcaguauucgcaacgggacuuaugaucacgacguauacagagacgaggcacugaauaacagguuccagaucaagggaguggaacucaaauccgguuacaaggauuggguccuguggauuagcuuugccaucucuugcuuccuucuguguguggcuuugcucggcuuuauaaugugggcgugccagaaagggaauauccgguguaacauuugcaucuga

SEQ ID NO: 136404 - RNA, 1701 nt, Artificial Sequence
  derived and/or modified CDS sequence (opt3) from hemagglutinin__InfluenzaA__AFD98183
augaagaccaucauugcccugagcuacauacucugccuuguguucgcucagaaacugcccggcaacgacaauuccacagcaacuuuguguuuagggcaccaugccgucccuaacggaacgaucguuaagaccauuacaaaugaucaaaucgaggugacuaacgcgaccgaacugguacagucuucaaguacaggugagauuugcaauagcccacaccagauccuagacggcgaaaacuguacccucauagaugcucugcuuggggacccgcagugcgauggauuucaaaauaaaaagugggaccuguucguggagagauccaaagcccauucuaacuguuaucccuacgaugucccugacuaugcaucguugaggucacucguggccagcaguggcacucuggaauuuaauaacgaguccuucaauuggacagguguuacccagaacgggacgucuagcgcuugcauccggcgcuccaauaacucauuuuucagucgacugaauuggcucacucacuuaaacuuuaaguacccagcacugaacgugaccaugcccaauaacgagcaguucgauaaacuuuauauuuggggaguccaucacccuggcacagacaaagaucagaucuuuuuguacgcccaagcuagcggccguauuacugugucuaccaagagaucccagcaggccguacugccaaauaucgggucaaggccccggguucgcaacauaccuagcagagugaguauuuauuggacaaucgucaaaccaggagacauucuacucaucaauucuaccgguaaccugaucgcgccgaggggcuacuucaagauucgguccgggaaaagcucgauaaugcgcucugaugcacccaucggaaaguguaauuccacgugcauuacuccuaacggcucaaucccaaaugacaagcccuuucagaacgugaaucgaauaacauacggugccuguccuagauaugugaaacaaaacacccuuaagcuggcuacugggaugaggaaugucccagaaaaacagacacggggaauuuucggcgccaucgcaggcuuuaucgagaacgggugggaaggaaugguugacgguugguacggcuuccgucaccagaauagugaggggcgcggacaagcugccgaucucaagagcacccaggcggccauugaccagaucaacggcaaauugaacagacugauugguaagacgaaugagaaauuccaucagauagaaaaggaguuuuccgaaguggaggggaggauccaagauuuagaaaaguauguagaggacaccaaaauugaucuguggucuuacaacgcagagcuccuuguggcucuggaaaaucagcacacaaucgacuugacugauagcgagaugaacaagcuauucgaaaagaccaagaaacagcugcgggagaaugccgaagacaugggcaacggaugcuuuaagaucuaucauaagugugauaaugcuugcauuggcucaauacgaaacgggacauacgaccacgaugucuaucgcgacgaggcccucaauaacagauuccagaucaaaggaguggagcugaagagugguuacaaagacuggauucuuuggaucuccuuugcaauuagcugcuuccuguuguguguugcccuccugggcuuuaucaugugggcuugccaaaaggggaauauaagguguaacaucugcauuuga

SEQ ID NO: 136405 - RNA, 1701 nt, Artificial Sequence; identical to SEQ ID NO: 134903
  derived and/or modified CDS sequence (opt3) from hemagglutinin__InfluenzaA__AFD98194

SEQ ID NO: 136406 - RNA, 1701 nt, Artificial Sequence; identical to SEQ ID NO: 134957
  derived and/or modified CDS sequence (opt3) from hemagglutinin__InfluenzaA__AFD98205

SEQ ID NO: 136407 - RNA, 1701 nt, Artificial Sequence; identical to SEQ ID NO: 136399
  derived and/or modified CDS sequence (opt3) from hemagglutinin__InfluenzaA__AFD98215

SEQ ID NO: 136408 - RNA, 1701 nt, Artificial Sequence; identical to SEQ ID NO: 135030
  derived and/or modified CDS sequence (opt3) from hemagglutinin__InfluenzaA__AFD98226

SEQ ID NO: 136409 - RNA, 1701 nt, Artificial Sequence
  derived and/or modified CDS sequence (opt3) from hemagglutinin__InfluenzaA__AFD98237
augaagaccaucauugcccugagcuacauacucugccuuguguccgcucagaaacugcccggcaacgacaauucuacagcaacuuuguguuuagggcaccaugccgucccuaacggaacgaucguuaagaccauuacaaaugaucaaaucgaggugacuaacgcgaccgaacugguacagucaaguagcacaggugagauuugcaauuccccacaccagauccuagacggcgaaaacuguacccucauagaugcucugcuuggggacccgcagugcgauggauuccaaaauaaaaagugggaccuguuuguggagagaucuaaagcccauucgaacuguuaucccuacgaugucccugacuaugcaucauugaggagccucguggccaguuccggcacucuggaguucaauaacgaaucuuuuaauuggacagguguuacccagaacgggacgagcuccgcuugcauccggcgcucaaauaacaguuucuuuagccgacugaauuggcucacucacuuaaacuucaaguacccagcacugaacgugaccaugcccaauaacgagcaguuugauaaacuuuauauuuggggaguccaucacccuggcacagacaaagaucagaucuucuuguacgcccaggcuucuggccguauuacuguguccaccaagagaucacaacaggccguaaucccaaauauagggagcaggccccggguucgcaacauuccuaguagagugucuaucuauuggacaauugucaaaccaggagacauccugcuaaucaauuccaccgguaaccucauugcgccgaggggcuacuuuaagauacggagcgggaaaucgucuaucaugcgcuccgaugcacccauuggaaaguguaauucagccugcaucacgccuaacggcaguauaccaaaugacaagcccuuccagaacgugaaucgaauuacuuacggugcuuguccuagauaugugaaacaaaacacacugaaacuugccaccgggaugaggaaugucccagaaaagcagacucggggaaucuuuggcgcaaucgcuggcuucauugagaacgggugggaaggaaugguugacgguugguacggcuuucgucaccagaauagcgaggggcgcggacaagccgcggaucugaaguccacacaggccgcaaucgaccagauuaacggcaaauugaacagacucauagguaagaccaaugagaaauuccaucagaucgaaaaggaguucucugaaguggaggggaggauucaagaucuggaaaaguauguagaggacacgaaaaucgauuuauggagcuacaacgcugagcugcucguggcccuugaaaaucagcacaccaucgaccugacagauucagagaugaacaaguuguuugaaaagacuaagaaacagcuacgggagaaugcugaagacaugggcaacggaugcuucaagauuuaucauaagugugauaaugccugcauaggcaguauccgaaacgggaccuacgaccacgaugucuaucgcgacgaggcacugaauaacagauuucagauuaaaggaguggagcucaaguccgguuacaaagacuggauccuguggauuagcuucgccaucucuugcuuucuucuguguguugcuuugcucggcuucauaaugugggcgugccaaaaggggaauaucagguguaacauuugcaucuga

SEQ ID NO: 136410 - RNA, 1701 nt, Artificial Sequence; identical to SEQ ID NO: 136402
  derived and/or modified CDS sequence (opt3) from hemagglutinin__InfluenzaA__AFD98248

SEQ ID NO: 136411 - RNA, 1701 nt, Artificial Sequence
  derived and/or modified CDS sequence (opt3) from hemagglutinin__InfluenzaA__AFD98259
augaagaccaucauugcccugagcuacauacucugccuuguguucgcucagaaacugcccggcaacgacaauuccacagcaacuuuguguuuagggcaccaugccgucccuaacggaacgaucguuaagaccauuacaaaugaucaaaucgaggugacuaacgcgaccgaacugguacagucuucaagugcuggugagauuugcgacagcccacaccauauccuagauggcgaaaauuguacacucauagacgcccugcuuggggauccgcagugcgacggauuucagaacaaaaagugggaucuguucguggagagauccaaagcauauucuaauuguuaccccuaugacguccaagauuacgccucguugaggucacucguggcuagcaguggcacccuggaauuuaacaaugaguccuucaacuggacugguguuacacagaaugggaccucuagcgcaugcauccggcgcuccaacaauucauuuuucagucgacugaacuggcucacgcacuuaaauuuuaaguauccugcccugaacgugacuaugccaaacaaugagcaguucgacaaacuuuacauuuggggaguccaucaccccggcaccgauaaggaccagaucuuuuuguaugcucaagccagcggccguauuacagugucuacuaagagaucccagcaggcgguaaucccuaacauagggucaaggccacggguucgcaauauucccagcagaaucaguauuuacuggaccaucgugaaaccuggagauauccugcuaauuaacucuacagguaaucucauagcaccaaggggcuacuucaagauccgguccgggaaaagcucgauuaugcgcucugacgccccgaucggaaaguguaacuccgaaugcauaacccccaauggcucaauuccuaacgacaagccauuucagaaugucaaccgaaucacguauggugcuugucccagauacgugaaacaaaguacucugaaacuugccacagggaugaggaaugugccugagaagcagacccggggaaucuucggcgcaauugcuggcuuuaucgaaaacgggugggagggaaugauggaugguugguauggcuuccgucaccagaauagcgaggggcgcggacaagccgcggaccugaaguccacucaggccgcaauugaucagauaaacggcaaauugaauagacucaucgguaagacaaacgaaaaauuccaucagauugagaaggaauuuucugaggucgaagggaggauccaagaccuggagaaguacguugaggauaccaaaaucgacuuauggagcuauaacgcugaacugcucguggcccuugagaaucagcacacgauugaucugaccgacucagaaaugaacaaguuguucgagaaaacaaagaaacagcuacgggaaaaugcugaggauaugggcaacggaugcuuuaagauauaccauaagugugacaaugccugcaucggcaguauucgaaacgggacuuaugaucacgacguauaccgcgacgaggcacugaauaacagauuccagaucaaaggaguggaacucaaguccgguuacaaagauuggauucuguggaucagcuuugccauaucuugcuuccuucugugugucgcuuugcucggcuuuaucaugugggcgugccaaaaggggaauauuagguguaacaucugcauuuga

SEQ ID NO: 136412 - RNA, 1701 nt, Artificial Sequence
  derived and/or modified CDS sequence (opt3) from hemagglutinin__InfluenzaA__AFD98270
augaaggccauccuggugguccuccuuuacaccuucguuacagcuaacgcagacacucugugcauuggcuaucacgccaauaacagcacggauaccguggacacaguauuggagaagaaugugacugucacccauuccgugaacuuacuggaagauaagcacaaugggaaacuauguaagcucagaggaguuacaccccugcaucuugguaaaugcaacauagcgggcuggauccuggggaauccugagugugaaucuuugucaaccgcuaguagcugguccuacauuguggagacuucuucgucagacaacggaacaugcuauccaggcgauuuuaucaauuacgaggagcucagggagcagcugagcagugucuccucuuucgaacgguuugagauuuucccgaacaccagcuccuggcccaaucacgacucaaacaagggugugacggccgcauguccucaugccggggcuaagaguuuuuauaaaaaucugaucuggcucguaaagaaaggaaacagcuacccaaaguuaucuaaauccuauauaaaugauaagggcaaggaaguucuggugcuuuggggcauccaccaccccucaacuaccgcagaccaacagagcuuguaccagaacgccgaugcuuacgucuucguggggacaagucgcuauucuaaaaaguuuaaaccugagauugccauccgaccaaaggugcgugaccaggagggaagaaugaacuacuauuggacucuggucgaacccggugauaaaauuaccuucgaggcgacaggcaaucuaguugugccuagguacgcauuugccauggaacggaacgcuggguccggaaucauaauuagcgacaccccaguacaugauugcaauacgacuugucaaacaccgaagggcgccaucaacaccucgcuccccuuccagaauauucacccuaucacuaucgguaaaugcccaaaguaugugaagucuacaaaacugcgccuugcaaccgggcugagaaacguccccuccauucagucaaggggauuguuuggcgcuauagccggcuucaucgaagggggauggacggguaugguggacggcugguacggguaucaucaccagaaugaacaaggaaguggcuacgcggccgaccucaagagcacccagaacgcaauugauaaaaucacaaauaagguuaacuccgugauagagaaaaugaauacucaguuuaccgcugucgguaaggaguucaaccaccuggaaaagcggauugagaauuuaaacaaaaagguggacgauggguuccuggacaucuggacauacaaugccgaacuccuuguacuguuggagaacgaacgcacucuagauuaucaugacucuaacguuaaaaaucuguacgagaaggugcgaaaccagcucaaaaauaacgcuaaggagaucggcaauggauguuuugaguucuaucacaagugcgauaacaccuguauggaaagcgucaaaaauggcacauacgacuauccuaaguacucagaagaggccaaacugaacagagaagagauugauggggugaaacuugagaguaccaggaucuaucaaauucuggcaauauacuccacugucgccagcucuuuggugcucguugugucacugggagcuaucaguuuuuggaugugcagcaaugguuccuuacagugccggauuuguaucuga

SEQ ID NO: 136413 - RNA, 1701 nt, Artificial Sequence
  derived and/or modified CDS sequence (opt3) from hemagglutinin__InfluenzaA__AFD98280
augaaggccauccuggugguccuccuuuacaccuucgcuacagcaaacgccgacacucugugcauuggcuaucacgcgaauaacagcacggauaccguugacacaguguuggagaaaaauguaacugugacccauuccgucaacuuacuggaagauaagcacaaugggaaacuauguaagcucagaggaguggcuccccugcaucuugguaaaugcaacauagccggcuggauccuggggaauccugagugugacucuuugucaacagcaaggaguuggagcuacauuguugaaaccuccucuucggauaacggaacuugcuauccaggcgacuuuaucgauuacgaggaacuccgggagcagcugucaagcgugaguuccuucgagcgcuuugaaauuuucccgaagacaucuagcuggcccaaucacgacuccaacaagggugucaccgccgcuuguccucaugcaggggccaaaggauuuuauaagaaucugaucuggcucgugaaaaagggcaacucauacccaaaauuaaguaagagcuauauaaaugauaagggcaaagagguacugguucuuugggggauccaccaccccucuacgacugcugaccaacaguccuuguaccagaacgccgauaccuacguguucgucggaacaucacgauauagcaagaaauuuaagccugaaauugcgauccguccaaaagugagagaccaggaggguaggaugaauuacuauuggacucugguggagcccggcgauaagauuaccuucgaagcaacagggaaccuagucguuccucgguacgccuuugcuauggagcgcaacgccggaaguggcaucauaauuucugacaccccagugcaugacugcaauacgacuugucaaacaccgaaaggugcaaucaacaccucccuccccuuccagaauauucacccuaucacuaucgggaagugcccaaaguauguaaaaagcacaaagcugagacuugcuaccggacugaggaacgugcccucgauucagucucggggcuuguuuggcgccauagcgggguucaucgaaggagguuggacgggcauggucgaugggugguacggauaucaucaccagaaugagcaaggcuccgguuacgccgcagaccucaaaucaacccagaacgcuauugauaagaucacaaauaaagugaacaguguuauagaaaagaugaauacucaguuuaccgccguggggaaggaguucaaccaccuggagaaacgcauugaaaauuuaaacaagaaagucgacgauggcuuccuggacaucuggacauacaaugcugagcuccuugugcuguuggaaaacgagcgaacucuagauuaucaugacagcaauguaaagaaccuguacgaaaaaguuagaaaccagcucaagaauaacgccaaggagaucggaaauggcuguuuugaguucuaucacaaaugcgauaacaccuguauggaauccgugaagaaugggacauacgacuauccuaaauacucugaggaagcaaagcugaacagggaggaaauugauggagucaaacuugagagcacccggaucuaucaaauucuggccauauacucaacuguggcuaguuccuugguccucgugguuagccugggugcgaucucuuuuuggaugugcucaaauggcaguuuacagugccguauuuguaucuga

SEQ ID NO: 136414 - RNA, 1701 nt, Artificial Sequence; identical to SEQ ID NO: 136391
  derived and/or modified CDS sequence (opt3) from hemagglutinin__InfluenzaA__AFD98290

SEQ ID NO: 136415 - RNA, 1701 nt, Artificial Sequence; identical to SEQ ID NO: 135134
  derived and/or modified CDS sequence (opt3) from hemagglutinin__InfluenzaA__AFD98310

SEQ ID NO: 136416 - RNA, 1701 nt, Artificial Sequence; identical to SEQ ID NO: 134502
  derived and/or modified CDS sequence (opt3) from hemagglutinin__InfluenzaA__AFD98320

SEQ ID NO: 136417 - RNA, 1701 nt, Artificial Sequence; identical to SEQ ID NO: 136402
  derived and/or modified CDS sequence (opt3) from hemagglutinin__InfluenzaA__AFD98340

SEQ ID NO: 136418 - RNA, 1701 nt, Artificial Sequence
  derived and/or modified CDS sequence (opt3) from hemagglutinin__InfluenzaA__AFD98351
augaagaccaucauugcccugagcuacauacucugccuuguguucgcucagaaacugcccggcaacgacaauuccacagcaacuuuguguuuagggcaccaugccgucccuaacggaacgaucguuaagaccauuacaaaugaucaaaucgaggugacuaacgcgaccgaacugguacagucuucaagugcuggugagauuugcgacagcccacaccauauccuagauggcgaaaauuguacacucauagacgcccugcuuggggauccgcagugcgacggauuucagaacaaaaagugggaucuguucguggagagauccagggcauauucuaauuguuaccccuaugacgucccugauuacgccucguugcggucacucguggcuagcaguggcacccuggaauuuaacaaugaguccuucaacuggacugguguuacacaaaaugggaccucuagcgcaugcauccgccgauccaacaauucauuuuucagucgucugaacuggcucacgcacuuaaauuuuaaauauccagcccugaacgugacuaugcccaacaaugagcaguucgacaaacuuuacauuuggggaguccaucacccuggcaccgauaaggaccagaucuuuuuguaugcucaggccagcggcagaauuacagugucuacuaaaaggucccaacaggcgguaaucccaaacauagggucacggccccgcguuagaaauauuccuagcaggaucaguauuuacuggaccaucgugaagccaggagauauccugcuaauuaacucuacagguaaucucauagcaccgcggggcuacuucaaaauccgcuccggaaagagcucgauuaugcgaucugacgcccccaucgggaaauguaacuccgaaugcauaaccccuaauggcucaauuccaaacgacaagcccuuucagaaugucaacagaaucacguauggugcuuguccuagguacgugaagcagaguacucugaaacuugccacagggaugcggaaugugccagagaagcaaacccguggaaucuucggcgcaauugcuggcuuuaucgaaaacgggugggagggaaugauggaugguugguauggcuuccgccaccagaauagcgaggggagaggacaggccgcggaccugaaauccacucaagccgcaauugaucagauaaacggcaaguugaauaggcucaucgguaaaacaaacgaaaaguuccaucagauugagaaagaauuuucugaggucgaagggcggauccaggaccuggagaaguacguugaggauaccaagaucgacuuauggagcuauaacgcugaacugcucguggcccuugagaaucaacacacgauugaucugaccgacucagaaaugaacaaauuguucgagaagacaaagaagcagcuacgagaaaaugcugaggauaugggcaacggaugcuuuaaaauauaccauaagugugacaaugccugcaucggcacuauucgcaacgggaccuaugaucacgacguauacagagacgaggcacugaauaacagguuccagaucaagggaguggaacucaaaagugguuacaaggauuggauucuguggaucuccuuugccauaagcugcuuccuucugugugucgcuuugcucggcuuuaucaugugggcgugccagaaagggaauauucgguguaacaucugcauuuga

SEQ ID NO: 136419 - RNA, 1701 nt, Artificial Sequence
  derived and/or modified CDS sequence (opt3) from hemagglutinin__InfluenzaA__AFD98362
augaagaccaucauugcccugagcuacauacucugccuuguguucgcucagaaacugcccggcaacgacaauuccauggcaacauuguguuuagggcaccaugccgucccuaacggaacuaucguuaagacgauuaccaaugaucaaaucgaggugacaaacgcgacugaacugguacaaaauucuucaaccggugagauuugcgacaguccacaccagauccuagauggcgaaaacuguacacucauagacgcucugcuuggggauccgcagugcgacggauuucagaauaaaaagugggaucuguucguggagagaagcaaagccuauuccaacuguuaccccuaugacgucccugauuacgcaucuuugaggucgcucguggccucaagcggcacccuggaauuuaauaacgagaguuucaauuggacugguguuacacagaacgggaccuccucugcuugcauccggcgcagcaauaacuccuuuuucucacgacugaauuggcucacgcauuuaaacuuuaaguauccagcacugaacgugacuaugcccaauaacgagcaguucgacaaacuuuacauuuggggaguccaccauccuggcaccgauaaggaccagaucuuuuuguaugcccaagcuaguggccguauuacagugagcacuaagagagggcagcaggccguaaucccaaauauaggaucuaggccccggguucgcaacauuccuuccagaaucucaauuuacuggaccaucgugaaaccaggugauauccugcuaauuaauagcacaggcaaccucauagcgccgaggggguacuucaagauccggaguggaaaaucuuccauuaugcgcagcgacgcacccaucggcaaguguaauucggaaugcauaaccccuaacgguucuauuccaaaugacaagcccuuucagaacgucaaucgaaucacguauggggccuguccuagauacgugaaacaaaacacucugaaacuugcuacaggaaugaggaaugugccagagaagcagacccggggcaucuucggcgccauugcaggguuuaucgaaaacggaugggaggguauggucgauggcugguauggguuccgucaccaaaauuccgagggacgcggccaggcugccgaccugaagucaacucaggcggccauugaucagauaaacgguaaauugaacagacucguugggaagacaaaugaaaaauuccaccagaucgagaaggaauuuagugagguggaaggcaggauucaagaccuggagaaguacguagaggauaccaaaaucgacuuauggagcuauaacgcagaacugcucguggcucuugagaaucagcauacgaucgaucugaccgacuccgaaaugaacaaguuguucgagaaaacaaagaaacagcuacgggaaaaugccgaggauaugggaaacggcugcuuuaagauuuaccacaagugugacaaugcuugcauagggucuauccgaaacggaacuuaugaucaugacgucuaccgcgacgaggcccugaauaacagauuccagauuaaagguguggaacucaagagcggcuacaaagauuggauccuguggauuucauuugcaaucaguugcuuccuucuguguguugccuugcucggguuuauaaugugggcuugccaaaagggaaauaucagguguaacauuugcaucuga

SEQ ID NO: 136420 - RNA, 1701 nt, Artificial Sequence; identical to SEQ ID NO: 136399
  derived and/or modified CDS sequence (opt3) from hemagglutinin__InfluenzaA__AFD98373

SEQ ID NO: 136421 - RNA, 1701 nt, Artificial Sequence; identical to SEQ ID NO: 135030
  derived and/or modified CDS sequence (opt3) from hemagglutinin__InfluenzaA__AFD98384

SEQ ID NO: 136422 - RNA, 1701 nt, Artificial Sequence
  derived and/or modified CDS sequence (opt3) from hemagglutinin__InfluenzaA__AFD98395
augaagaccaucauugcccugagcuacauacucugccuuguguucgcucagaaacugcccggcgacgauaacuccacagcaacuuuguguuuagggcaccaugccgucccuaauggaacgaucguuaagaccauuacaaacgaccaaaucgaggugacuaaugcgaccgaacugguacagaacucuucagcuggugagauuugcgauaguccacaccauauccuagacggcgaaaauuguacacucauagaugcccugcuuggggacccgcagugcgauggauuucagaacaaaaagugggaccuguucguggagagaagcagggcauauuccaauuguuaccccuaugaugucccugacuacgccucuuugcggucgcucguggcuucaagcggcacccuggaauuuaacaaugagaguuucaacuggacugguguuacacaaaaugggaccuccucugcaugcauccgccgaagcaacaauuccuuuuucucacgucugaacuggcucacgcacuuaaauuuuaaauauccagcccugaacgugacuaugcccaacaaugagcaguucgauaaacuuuacauuuggggaguccaucacccuggcaccgacaaggaucagaucuuuuuguaugcucaggccaguggcagaauuacagugagcacuaaaaggucucaacaggcgguaaucccaaacauagggucccggccccgcguuagaaauauuccuucaaggaucagcauuuacuggaccaucgugaagccaggagacauccugcuaauuaacaguacagguaaucucauagcaccgcggggcuacuucaaaauccgcucugggaaguccagcauuaugcgaucggacgcccccaucggaaaauguaacucugaaugcauaaccccuaauggcuccauuccaaacgauaagcccuuucagaaugucaacagaaucacguauggugcuuguccuagguacgugaagcagucaacucugaaacuugccacagggaugcggaaugugccagagaagcaaacccguggaaucuucggcgcaauugcuggcuuuaucgaaaacgggugggagggaaugauggacgguugguauggcuuccgccaccagaauagugaggggagaggacaggccgcggaucugaaaagcacucaagccgcaauugaccagauaaacggcaaguugaauaggcucaucgguaaaacaaacgaaaaguuccaucagauugagaaagaauuuuccgaggucgaagggcggauccaggaucuggagaaguacguugaggacaccaagaucgauuuauggucuuauaacgcugaacugcucguggcccuugagaaucaacacacgauugaccugaccgauagcgaaaugaacaaauuguucgagaagacaaagaagcagcuacgagaaaaugcugaggacaugggcaacggaugcuuuaaaauauaccauaagugugauaaugccugcaucggcucaauucgcaacgggacuuaugaccacgacguauacagagaugaggcacugaauaacagguuccagaucaagggaguggaacucaaaagugguuacaaggacuggauucuguggaucuccuuugccauaagcugcuuccuucugugugucgcuuugcucggcuuuaucaugugggcgugccagaaagggaauauucgguguaacaucugcauuuga

SEQ ID NO: 136423 - RNA, 1701 nt, Artificial Sequence; identical to SEQ ID NO: 136399
  derived and/or modified CDS sequence (opt3) from hemagglutinin__InfluenzaA__AFD98406

SEQ ID NO: 136424 - RNA, 1701 nt, Artificial Sequence; identical to SEQ ID NO: 136402
  derived and/or modified CDS sequence (opt3) from hemagglutinin__InfluenzaA__AFD98417

SEQ ID NO: 136425 - RNA, 1701 nt, Artificial Sequence
  derived and/or modified CDS sequence (opt3) from hemagglutinin__InfluenzaA__AFD98428
augaagaccaucauugcccugagcuacauacucugccuuguguucgcucagaaacugcccggcaacgacaauuccacagcaacuuuguguuuagggcaccaugccgucccuaacggaacgaucguuaagaccauuacaaaugaucaaaucgaggugacuaacgcgaccgaacugguacagucuucaaguacaggugagauuugcaauagcccacaccagauccuagacggcgaaaacuguacccucauagaugcucugcuuggggacccgcagugcgauggauuucaaaauaaaaagugggaccuguucguggagagauccaaagcccauucuaacuguuaucccuacgaugucccugacuaugcaucguugaggucacucguggccagcaguggcacucuggaauuuaauaacgaguccuucaauuggacagguguuacccagaacgggacgucuagcgcuugcauccggcgcuccaauaacucauuuuucagucgacugaauuggcucacucacuuaaacuuuaaguacccagcacugaacgugaccaugcccaauaacgagcaguucgauaagcuguauauuuggggaguccaucacccuggcacagacaaagaucagaccuuuuuguacgcccaagcuagcggccguaucacugugucuacaaagagaucccagcaggccguaauuccaaauaucgggucaaggccccggguucgcaacauaccuagcagagugaguauuuauuggaccaucgucaaaccaggagacauucugcuaaucaauucuacggguaaccucaucgcgccgaggggcuacuucaagauucgguccgggaaaagcucgauaaugcgcucugaugcacccaucggaaaguguaauuccgccugcauuacuccuaacggcucaaucccaaaugacaagcccuuucagaacgugaaucgaauaacauacggugcuuguccuagauaugugaaacaaaacacccugaaacuugccacugggaugaggaaugucccagaaaaacagacacggggaauuuucggcgcaaucgcuggcuuuaucgagaacgggugggaaggaaugguugacgguugguacggcuuccgucaccagaauagugaggggcgcggacaagccgcggaucuuaagagcacccaggccgcaauugaccagaucaacggcaaauugaacagacucauugguaagacgaaugagaaauuccaucagauagaaaaggaguuuuccgaaguggaggggaggauccaagaucuggaaaaguauguagaggacaccaaaauugauuuauggucuuacaacgcugagcugcucguggcccuugaaaaucagcacacaaucgaccugacugauagcgagaugaacaaguuguucgaaaagaccaagaaacagcuacgggagaaugcugaagacaugggcaacggaugcuuuaagaucuaucauaagugugauaaugccugcauuggcucaauacgaaacgggacauacgaccacgaugucuaucgcgacgaggcacugaauaacagauuccagaucaaaggaguggagcucaagagugguuacaaagacuggauucuguggaucuccuuuacuauuagcugcuuccuucuguguguugccuugcucggcuuuaucaugugggcuugccaaaaggggaauauaagguguaacaucugcauuuga

SEQ ID NO: 136426 - RNA, 1701 nt, Artificial Sequence; identical to SEQ ID NO: 134915
  derived and/or modified CDS sequence (opt3) from hemagglutinin__InfluenzaA__AFD98439

SEQ ID NO: 136427 - RNA, 1701 nt, Artificial Sequence
  derived and/or modified CDS sequence (opt3) from hemagglutinin__InfluenzaA__AFD98449
augaagaccaucauugcccugagcuacauacucugccuuguguucgcucagaaacugcccggcaacgacaauuccacagcaacuuuguguuuagggcaccaugccgucccuaacggaacgaucguuaagaccauuacaaaugaucaaaucgaggugacuaacgcgaccgaacugguacagucuucaaguacaggugagauuugcgacagcccacaccagauccuagauggcaaaaauuguacccucauagacgcucugcuuggggauccgcagugcgacggauuucaaaacaagaaaugggaucuguucguggaaagauccaaggccuauucuaauuguuaccccuaugacgucccugauuacgcaucguugaggucacucguggccagcaguggcacucuggaguuuaacaaugaaaacuucaauuggacagguguuacccagaacgggacguccucugcuugcauccggcgcagcaaaaauuccuuuuucucacgacugaacuggcucacucauuuaaauuuuaaauucccagcacugaacgugaccaugcccaacaaugagcaguuugacaaacuuuauauuuggggaguccaccauccuggcacagauaaggaccagaucuucuuguacgcccaagcuaguggccguauuacugugagcaccaagagaucucagcagacagccaucccaaacauaggguccaggccccggguacgcaauauuccuucaagaaucagcauuuauuggaccaucguuaaaccaggagauauccugcuaauuaacaguacggguaaucucauagcgccgaggggcuacuuuaagauccggucugggaaguccagcauuaugcgcucggacgcacccaucggaaaauguaacucugagugcauaacuccuaauggcuccauuccaaacgacaagcccuuccagaaugugaaccgaaucacauacggugccuguccuagauaugucaaacaaaauacccugaaacuugcuacugggaugaggaacgugccagaaaagcagacacggggaaucuuuggcgccauugcaggcuucaucgagaaugggugggaaggaaugguggaugguugguacggcuuccgucaccagaacucagaggggcgcggacaagcugccgaccugaagaguacccaggcggccauugaucagauaaauggcaaauugaacagacucaucgguaagacgaacgagaaguuucaccagauugaaaaagaguucagcgaagucgaggggaggauccaagaccuggaaaaguauguugaggauaccaaaaucgacuuaugguccuacaaugcagagcugcucguggcucuugaaaaccagcauacaauugaucugacugacucugagaugaauaaguuguuugaaaagaccaagaagcagcuacgggagaacgccgaagauaugggcaauggaugcuucaaaauauaucacaagugugacaacgcuugcaucggcagcauucgaaaugggacauacaaccaugauguauaucgcgacgaggcccugaauaacagauuucagaucaaaggaguggagcucaagucagguuacaaagacuggauucuguggaucaguuucgcaauauccugcuuucuucugugugucgccuugcucggcuucaucaugugggcuugccaaaaggggaauauuagguguaacaucugcauuuga

SEQ ID NO: 136428 - RNA, 1701 nt, Artificial Sequence
  derived and/or modified CDS sequence (opt3) from hemagglutinin__InfluenzaA__AFD98460
augaagaccaucauugcccugagcuacauacucugccuuguguucgcucagaaacugcccggcaacgacaauuccacagcaacuuuguguuuagggcaccaugccgucccuaacggaacgaucguuaagaccauuacaaaugaucaaaucgaggugacuaacgcgaccgaacugguacagucuucaagugcuggugagauuugcgacagcccacaccauauccuagauggcgaaaauuguacacucauagacgcccugcuuggggauccgcagugcgacggauuucagaacaaaaagugggaucuguucguggagagauccagggcauauucuaauuguuaccccuaugacgucccugauuacgccucguugcggucacucguggcuagcaguggcacccuggaauuuaacaaugaguccuucaacuggacugguguuacacaaaaugggaccucuagcgcaugcauccgccgauccaacaauucauuuuucaguaaacugaacuggcucacgcacuuaaauuuuaaguauccagcccugaacgugacuaugcccaacaaugagcaguucgacaaacuuuacauuuggggaguccaucacccuggcaccgauaaggaccagaucuuuuuguaugcucaggccagcggccguauuacagugucuacuaagagaucccaacaggcgguaaucccaaacauagggucaaggccccggguucgcaauauuccuagcagaaucaguauuuacuggaccaucgugaaaccaggagauauccugcuaauuaacucuacagguaaucucauagcaccgaggggcuacuucaagauccgguccgggaaaagcucgauuaugcgcucugacgcccccaucggaaaguguaacuccgaaugcauaaccccuaauggcucaauuccaaacgacaagcccuuucagaaugucaaccgaaucacguauggugcuuguccuagauacgugaaacagaguacucugaaacuugccacagggaugaggaaugugccagagaagcaaacccggggaaucuucggcgcaauugcuggcuuuaucgaaaacgggugggagggaaugauggaugguugguauggcuuccgucaccagaauagcgaggggcgcggacaggccgcggaccugaaguccacucaagccgcaauugaucagauaaacggcaaauugaauagacucaucgguaagacaaacgaaaaauuccaucagauugagaaggaauuuucugaggucgaagggaggauccaggaccuggagaaguacguugaggauaccaaaaucgacuuauggagcuauaacgcugaacugcucguggcccuugagaaucaacacacgauugaucugaccgacucagaaaugaacaaguuguucgagaaaacaaagaaacagcuacgggaaaaugcugaggauaugggcaacggaugcuuuaagauauaccauaagugugacaaugccugcaucggcaguauucgaaacgggacuuaugaucacgacguauaccgcgacgaggcacuguccaauagauuccagaucaaaggaguggaacucaagagcgguuacaaagauuggauucuguggaucucuuuugccauaucaugcuuccuucugugugucgcuuugcucggcuuuaucaugugggcgugccagaaggggaacauuagguguaauaucugcauuuga

SEQ ID NO: 136429 - RNA, 1701 nt, Artificial Sequence; identical to SEQ ID NO: 134915
  derived and/or modified CDS sequence (opt3) from hemagglutinin__InfluenzaA__AFD98471

SEQ ID NO: 136430 - RNA, 1701 nt, Artificial Sequence
  derived and/or modified CDS sequence (opt3) from hemagglutinin__InfluenzaA__AFD98481
augaagaccaucauugcccugagcuacauacucugccuuguguucgcucagaaacugcccggcaacgacaauuccacagcaacuuuguguuuagggcaccaugccgucccuaacggaacgaucguuaagaccauuacaaaugaucaaaucgaggugacuaacgcgaccgaacugguacaaaauucuucaacaggugagauuugcaacaguccacaccagauccuagacggcgaaaauuguacccucauagaugcucugcuuggggacccgcagugcgauggauuucagaacaaaaagugggaccuguucguggagagaagcaaagcccauuccaauuguuaucccuacgaugucccugacuaugcaucuuugaggucgcucguggccucaagcggcacucuggaauuuaacaaugagaguuucaacuggacagguguuacccagaaugggacguccucugcuugcauccggcgcagcaacaauuccuuuuucucacgacugaacuggcucacucacuuaaacuuuaaguacccagcacugaaugugaccaugcccaacaaugagcaguucgauaaacuuuauauuuggggaguccaucacccuggcacagacaaagaucagaucuuuuuguacgcccaagcugccggccguauuacugugaguaccaagagaagccagcaggcgguaaucccaaacauagggucuaggccccggguucgcaauauuccuuccagagugucaaucuauuggacaauugucaaaccaggagacauccugcuaaucaacagcaccgguaaucucauugcaccgaggggcuacuucaagauacggagugggaaaucuuccgugaugcgcagcgaugcccccaucggaaaguguaacucggcuugcauuacgccuaauggcucuaucccaaacgacaagcccuuucagaaugugaaccgaauaacuuacggugccuguccuagauaugucaaacaaaauacacugaaacuugcaaccgggaugaggaacguuccagaaaagcagacucggggaauuuucggcgcuaucgccggcuuuaucgagaaugggugggaaggaaugguggacgguugguacggcuuccgucaccagaacuccgaggggcgcggacaagcggccgaucugaagucaacacaggcagcuauugaccagaucaacggcaaauugaauagacucauugguaagaccaacgagaaauuccaucagauagaaaaggaguuuagugaaguagaggggaggauccaagaucuggaaaaguauguggaggacacgaaaauugauuuauggagcuacaaugccgagcugcucgucgcucuugaaaaccagcacaccaucgaccugacagauuccgagaugaauaaguuguucgaaaagacuaagaaacagcuacgggagaacgccgaagacaugggcaauggaugcuuuaagaucuaucauaagugugauaacgcaugcauuggcucuauacgaaaugggaccuacgaccacgauguguaucgcgacgaggcccugaacaauagauuccagaucaaaggaguugagcucaagagcgguuacaaagacuggauucuguggaucucauuugcuauuaguugcuuccuucuguguguggcguugcucggcuuuaucaugugggcaugccaaaaggggaacauaagguguaauaucugcauuuga

SEQ ID NO: 136431 - RNA, 1701 nt, Artificial Sequence; identical to SEQ ID NO: 135030
  derived and/or modified CDS sequence (opt3) from hemagglutinin__InfluenzaA__AFD98492

SEQ ID NO: 136432 - RNA, 1701 nt, Artificial Sequence
  derived and/or modified CDS sequence (opt3) from hemagglutinin__InfluenzaA__AFD98503
augaagaccaucauugcccugagcuacauacucugccuuguguucgcucagaaacugcccggcaacgacaauuccacagcaacuuuguguuuagggcaccaugccgucccuaacggaacgaucguuaagaccauuacaaaugaucaaaucgaggugacuaacgcgaccgaacugguacagucuucaagugcuggugagauuugcgacagcccacaccauauccuagauggcgaaaauuguacacucauagacgcccugcuuggggauccgcagugcgacggauuucagaacaaaaagugggaucuguucguggagagauccagggcauauucuaauuguuaccccuaugacgucccugauuacgccucguugcggucacucguggcuagcaguggcacccuggaauuuaacaaugaguccuucaacuggacugguguuacacaaaaugggaccucuagcgcaugcauccgccgauccaacaauucauuuuucagucgucugaacuggcucacgcacuuaaauuuuaaauauccagcccugaacgugacuaugcccaacaaugagcaguucgacaaacuuuacauuuggggaguccaucacccuggcaccgauaaggaccagaucuuuuuguaugcucaggccagcggcagaauuacagugucuacuaagaggucccaacaggcgguaaucccaaacauagggucacggccccgcguuagaaauauuccuagcaggaucaguauuuacuggaccaucgugaagccaggagauauccugcuaauuaacucuacagguaaucucauagcaccgcggggcuacuucaaaauccgcuccggaaagagcucgauuaugcgaucugacgcccccaucgggaaauguaacuccgaaugcauaaccccuaauggcucaauuccaaacgacaagcccuuucagaaugucaacagaaucacguauggugcuuguccuagguacgugaagcagaguacucugaaacuugccacagggaugcggaaugugccagagaagcaaaccaaaggaaucuucggcgcaauugcuggcuuuaucgaaaacgggugggagggaaugauggaugguugguauggcuuccgucaccagaauagcgaggggcgcggacaggccgcggaccugaaguccacucaagccgcaauugaucagauaaacggcaaauugaauagacucaucgguaagacaaacgaaaaauuccaucagauugagaaggaauuuucugaggucgaagggaggauccaggaccuggagaaguacguugaggauaccaaaaucgacuuauggagcuauaacgcugaacugcucguggcccuugagaaucaacacacgauugaucugaccgacucagaaaugaacaaguuguucgagaaaacaaagaaacagcuacgggaaaaugcugaggauaugggcaacggaugcuuuaagauauaccauaagugugacaaugccugcaucggcaguauucgaaacgggacuuaugaucacgacguauaccgcgacgaggcacugaauaacagauuccagaucaaaggaguggaacucaaguccgguuacaaagauuggauucuguggaucagcuuugccauaucuugcuuccuucugugugucgcuuugcucggcuuuaucaugugggcgugccagaaggggaauauuagguguaacaucugcauuuga

SEQ ID NO: 136433 - RNA, 1701 nt, Artificial Sequence; identical to SEQ ID NO: 135030
  derived and/or modified CDS sequence (opt3) from hemagglutinin__InfluenzaA__AFD98514

SEQ ID NO: 136434 - RNA, 1701 nt, Artificial Sequence; identical to SEQ ID NO: 136382
  derived and/or modified CDS sequence (opt3) from hemagglutinin__InfluenzaA__AFD98525

SEQ ID NO: 136435 - RNA, 1701 nt, Artificial Sequence; identical to SEQ ID NO: 134903
  derived and/or modified CDS sequence (opt3) from hemagglutinin__InfluenzaA__AFD98558

SEQ ID NO: 136436 - RNA, 1701 nt, Artificial Sequence
  derived and/or modified CDS sequence (opt3) from hemagglutinin__InfluenzaA__AFD98569
augaagaccaucauugcccugagcuacauacucugccuuguguucgcucagaaacugcccggcaacgacaauuccacagcaacuuuguguuuagggcaccaugccgucccuaacggaacgaucguuaagaccauuacaaaugaucaaaucgaggugacuaacgcgaccgaacugguacagucuucaaguacaggugagauuugcaauagcccacaccagauccuagacggcgaaaacuguacccucauagaugcucugcuuggggacccgcagugcgauggauuucaaaauaaaaagugggaccuguucguggagagauccaaagcccauucuaacuguuaucccuacgaugucccugacuaugcaucguugaggucacucguggccagcaguggcacucuggaauuuaauaacgaguccuucaauuggacagguguuacccagaacgggacgucuagcgcuugcauccggcgcuccaauaacucauuuuucagucgacugaauuggcucacucacuuaaacuuuaaguacccagcacugaacgugaccaugcccaauaacgagcaguucgauaagcuguauauuuggggaguccaucacccuggcacagacaaagaucagaccuuuuuguacgcccaagcuagcggccguaucacugugucuacaaagagaucccagcaggccguaauuccaaauaucgggucaaggccccggguucgcaacauaccuagcagagugaguauuuauuggaccaucgucaaaccaggagacauucugcuaaucaauucuacggguaaccucaucgcgccgaggggcuacuucaagauucgguccgggaaaagcucgauaaugcgcucugaugcacccaucggaaaguguaauuccgccugcauuacuccuaacggcucaaucccaaaugacaagcccuuucagaacgugaaucgaauaacauacggugcuuguccuagauaugugaaacaaaacacccugaaacuugccacugggaugaggaaugucccagaaaaacagacacggggaauuuucggcgcaaucgcuggcuuuaucgagaacgggugggaaggaaugguugacgguugguacggcuuccgucaccagaauagugaggggcgcggacaagccgcggaucuuaagagcacccaggccgcaauugaccagaucaacggcaaauugaacagacucauugguaagacgaaugagaaauuccaucagauagaaaaggaguuuuccgaaguggaggggaggauccaagaucuggaaaaguauguagaggacaccaaaauugauuuauggucuuacaacgcugagcugcucguggcccuugaaaaucagcacacaaucgaccugacugauagcgagaugaacaaguuguucgaaaagaccaagaaacagcuacgggagaaugcugaagacaugggcaacggaugcuuuaagaucuaucaugagugugauaaugccugcauuggcucaauacgaaacgggacauacgaccacgaugucuaucgcgacgaggcacugaauaacagauuccagaucaagggaguggaacucaaaagugguuacaaggacuggauucuguggaucuccuuugccauuagcugcuuccuucuguguguugcuuugcucggcuuuaucaugugggcgugccaaaaagggaauauaagguguaacaucugcauuuga

SEQ ID NO: 136437 - RNA, 1701 nt, Artificial Sequence; identical to SEQ ID NO: 134903
  derived and/or modified CDS sequence (opt3) from hemagglutinin__InfluenzaA__AFD98580

SEQ ID NO: 136438 - RNA, 1701 nt, Artificial Sequence
  derived and/or modified CDS sequence (opt3) from hemagglutinin__InfluenzaA__AFE02942
augaaggccauccuggugguccuccuuuacaccuucgcuacagcaaacgccgacacucugugcauuggcuaucacgcgaauaacagcacggauaccguugacacauuguuagagaaaaaugugacuguaacccauuccgugaaccugcuagaagauaagcacaaugggaaacucuguaagcugagaggagucgcuccccuucaucuggguaaaugcaacauagccggcuggaucuuggggaauccugagugugaaucucucucaacagcaaguagcugguccuacauuguggagaccucuaacucggacaauggaacuugcuauccaggcgauuuuaucgacuacgaagaacugagggagcagcugucaagcguuaguuccuucgaacgguuugagauuuucccgaagacaucuagcuggcccaaccacgauuccaauaagggugugaccgccgcuuguccucaugcaggggccaaaucauuuuauaagaaccucaucugguuagucaaaaagggaaauaguuacccaaaacugagcaagucuuauauaaacgacaagggcaaagaagugcuuguauuguggggcauccaccaccccuccacgucagcugaucaacagagccuguaccagaaugccgacgcguacguuuucguguggaccagucgcuauucuaagaaauuuaagccugagauugcaauccgaccaaaaguccgugaucaggaggggagaaugaacuacuauuggacucuaguggaacccggagacaagauuacauucgaggccacugguaaccucguggucccuagguacgcuuuugccauggaucggaaugcaggcuccgggaucauaauuagcgacaccccaguucaugacugcaacacaaccugucaaacgccgaaaggagcuaucaauacuucgcugcccuuccagaacauucacccuaucacaaucggcaagugcccaaaguaugugaaaucuaccaagcugcgccuugccacugguuugagaaauguacccuccauucagucaagggggcucuuuggagcgauagccggcuucaucgaaggcggguggacaggaaugguggaugguugguacggcuaucaucaccagaacgagcaagggaguggauacgcagcugaccugaaaagcacccagaaugccauugaugaaaucacgaacaaggucaauuccgugauagagaaaaugaacacccaguuuacagcuguuggcaaggaguucaaucacuuagaaaagcggauugagaaccugaauaaaaagguggacgaugguuuccucgacaucuggacuuacaacgccgaacuucuggucuugcuagagaaugaacgcacccuggauuaucaugacucuaacgugaaaaaccucuacgagaagguacgaagccagcugaaaaauaacgcaaaggagaucgggaauggcuguuuugaguucuaucacaagugcgauaacacauguauggagucaguuaaaaauggaacuuacgacuauccuaaguacagugaagaggccaaacuuaacagagaagagauugauggcgugaagcuggaguccaccaggaucuaucaaauuuuggcuauauacagcacagucgcgucuucacucgugcuggucgugaguuuaggggcaaucagcuuuuggaugugcuccaauggaucucugcagugccggauuuguaucuga

SEQ ID NO: 136439 - RNA, 1701 nt, Artificial Sequence; identical to SEQ ID NO: 131881
  derived and/or modified CDS sequence (opt3) from hemagglutinin__InfluenzaA__AFE18688

SEQ ID NO: 136440 - RNA, 1701 nt, Artificial Sequence; identical to SEQ ID NO: 128698
  derived and/or modified CDS sequence (opt3) from hemagglutinin__InfluenzaA__AFE47624

SEQ ID NO: 136441 - RNA, 1701 nt, Artificial Sequence; identical to SEQ ID NO: 129448
  derived and/or modified CDS sequence (opt3) from hemagglutinin__InfluenzaA__AFE47635

SEQ ID NO: 136442 - RNA, 1701 nt, Artificial Sequence; identical to SEQ ID NO: 135030
  derived and/or modified CDS sequence (opt3) from hemagglutinin__InfluenzaA__AFF18506

SEQ ID NO: 136443 - RNA, 1701 nt, Artificial Sequence
  derived and/or modified CDS sequence (opt3) from hemagglutinin__InfluenzaA__AFF57124
augaaggccauccuggugguccuccuuuacaccuucgcuacagcaaacgccgacacucugugcauuggauaucacgcgaauaacagcacggauaccguugacacaguguuggagaaaaauguaacugugacccauuccgucaacuuacuggaagauaagcacaaugggaaacuauguaagcucagaggaguggcuccccugcaucuugguaaaugcaacauagccggcuggauccuggggaauccugagugugaaucuuugucaacagcaaguagcugguccuacauuguugagaccucuucgucagacaacggaacuugcuauccaggcgauuuuaucaauuacgaagaacucagggagcagcugagcaguguguccucuuucgaacgguuugagauuuucccgaagacaagcuccuggcccaaccacgacucaaauaagggugucaccgccgcuuguccucaugcaggggccaaaaguuuuuauaagaaccugaucuggcucgugaaaaaggaaaauagcuacccaaaauuaucuaaguccuauauaaacgauaagggaaaagagguacugguucuuuggggcauccaccaccccucaacgacugcugaccaacagcgcuuguaccagaaugccgaugcguacguguucgucggcaccagccgauauaguaagaaauuuaagccugagauugcaauccguccaaaagugagagaccaggaagggaggaugaacuacuauuggacacugguggagcccggagauaagauuacuuucgaagccaccgguaaccuagucguuccucgguacgcuuuugccauggagcgcaaugcaggcucugggaucauaauuuccgacacaccagugcaugauugcaacaccacgugucaaacuccgaaaggagcuaucaauacaagccuccccuuccagaacauucacccuaucaccaucggcaagugcccaaaguauguaaaaucgacuaagcugagacuugccacaggucugaggaaugugcccucuauucagucccggggguuguuuggagcgauagccggcuucaucgaaggcggguggaccggaauggucgacgguugguacggcuaucaucaccagaacgagcaagggucaggauacgcagcugaccucaaaaguacgcagaaugccauugauaagaucaccaacaaagugaauagcguuauagagaagaugaacacacaguuuacugcugugggcaaggaguucaaucaccuggagaaacgcauugaaaacuuaaauaagaaagucgacgaugguuuccuggacaucuggaccuacaacgccgagcuccuugugcuguuggaaaaugagcgaacacuagauuaucaugacuccaacguaaagaaccuguacgagaaaguuagaaaucagcucaagaacaaugcaaaggaaaucgggaacggcuguuuugaguucuaucacaaaugcgauaauacuuguauggaaucugugaagaacggaaccuacgacuauccuaaauacagcgaggaagccaagcugaauagggaggagauugauggcgucaaacuugaaucaacacggaucuaucaaauucuggcuauauacaguaccguggcguccagcuugguccucgugguuucucugggggcaaucucauuuuggaugugcaguaacggcagcuuacagugccguauuuguaucuga

SEQ ID NO: 136444 - RNA, 1701 nt, Artificial Sequence
  derived and/or modified CDS sequence (opt3) from hemagglutinin__InfluenzaA__AFF57128
augaaggccauccuggugguccuccuuuacaccuucgcuacagcaaacgccgacacucugugcauuggcuaucacgcgaauaacagcacggauaccguugacacaguguuggagaaaaauguaacugugacccauuccgucaacuuacuggaagauaagcacaaugggaaacuauguaagcucagaggaguggcuccccugcaucuugguaaaugcaacauagccggcuggauccuggggaauccugagugugaaucuuugucaacagcaaguagcugguccuacauuguugagaccucuucgucagacaacggaacuugcuauccaggcgauuuuaucaauuacgaggagcucagggagcagcugagcaguguguccucuuucgaacgguuugagauuuucccgaagacaagcuccuggcccaaccacgacucaaauaagggugucaccgccgcuuguccucaugcaggggccaaaaguuuuuauaagaaccugaucuggcucgugaaaaagggaaauagcuacccaaaauuaucuaaguccuauauaaacgauaagggcaaagaaguacugguucuuuggggcauccaccaccccucaacgacugcugaccaacagagcauuuaccagaaugccgaugcguacguguucgucgggaccagucgcuauucuaagaaauuuaagccugagaucgcaauucgaccaaaagugcgugaccaggagggaagaaugaacuacuauuggacauugguggaacccggugauaagaucacuuucgaggccaccggcaaccuggucguuccuagguacgcuuuugccauggaacggaaugcaggguccggaauaauuaucagcgacacaccagugcaugauugcaacaccacgugucaaacuccgaaaggcgcuauuaauacaucgcuacccuuccagaacauccacccuaucaccauugguaagugcccaaaguauguaaaaucuacuaagcuccgccuggccacagggcuuagaaaugugcccuccauacagucaaggggacuguuuggcgcgaucgccggcuucauugaagggggauggaccgguauggucgacggcugguacggguaucaucaccagaacgaacaaggaaguggcuacgcagcugacuugaaaagcacgcagaaugccaucgauaagauaaccaacaaaguuaauuccgugauugagaagaugaacacacaguuuacugcuguggguaaggaguucaaucaccucgaaaaacggaucgagaaccugaauaagaaagucgacgauggguucuuagacaucuggaccuacaacgccgaacugcucgugcuucuggagaaugaacgcacauuggauuaucaugacucuaacguaaagaaccuauacgagaaaguucgaaaucagcugaagaacaaugcaaaggagauuggcaacggauguuuugaguucuaucacaaaugcgauaauacuuguauggaaagcgugaagaacggcaccuacgacuauccuaaauacucagaagaggccaagcucaauagagaagagaucgauggggucaaacuggagaguacaaggauuuaucaaauacuugcuaucuacuccaccguggcgagcucucuggucuuggugguuucacucggagcaauuaguuuuuggaugugcagcaacgguucccugcagugccggaucuguaucuga

SEQ ID NO: 136445 - RNA, 1701 nt, Artificial Sequence
  derived and/or modified CDS sequence (opt3) from hemagglutinin__InfluenzaA__AFF57132
augaaggccauccuggugguccuccuuuacaccuucgcuacagcaaacgccgacacucugugcauuggcuaucacgcgaauaacagcacggauaccguugacacaguguuggagaaaaauguaacugugacccauuccgucaacuuacuggaagauaagcacaaugggaaacuauguaagcucagaggaguggcuccccugcaucuugguaaaugcaacauagccggcuggauccuggggaauccugagugugaaucuuugucaacagcaaguagcugguccuacauuguugagaccucuucgucagacaacggaacuugcuauccaggcgauuuuaucgacuacgaagaacucagggagcagcugagcaguguguccucuuucgaacgguuugagauuuucccgaagacaagcuccuggcccaaucacgauucaaacaagggugucaccgccgcuuguccucaugcaggggccaaaggauuuuauaagaaucugaucuggcucgugaaaaagggcaacaguuacccaaaauuaagcaagucuuauauaaaugacaagggcaaagaaguacugguucuuugggggauccaccaccccuccacgacugcugaucaacagucaauuuaccagaacgccgacaccuacguguucgucggaacaagccgcuauaguaagaaauuuaagccugagaucgcgauucgaccaaaagugcgugaucaggaggguagaaugaauuacuauuggacuuugguggaacccggcgacaagaucaccuucgaggcaacagggaaccuggucguuccuagguacgccuuugcuauggaacggaacgccggaucuggcauaauuaucuccgauaccccagugcaugacugcaauacgacuugucaaacaccgaaaggugcaauuaacaccagccuacccuuccagaauauccacccuaucacuauugggaagugcccaaaguauguaaaaucgacaaagcuccgccuggcuaccggacuuagaaacgugcccucuauacaguccaggggccuguuuggcgccaucgcgggguucauugagggagguuggacgggcauggucgacgggugguacggauaucaucaccagaaugaacaaggcucagguuacgccgcagauuugaaaaguacccagaacgcuaucgacaagauaacaaauaaagugaacagcguuauugagaagaugaauacucaguuuaccgccguggggaaggaguucaaccaccucgaaaaacggaucgagaaucugaacaagaaagucgaugacggcuucuuagauaucuggacauacaaugcugaacugcucgugcuucuggagaacgaacgcacuuuggacuaucaugauuccaauguaaagaaccuauacgagaaaguucgaaaccagcugaagaauaacgccaaggagauuggaaauggcuguuuugaguucuaucacaaaugcgacaacaccuguauggagucugugaagaaugaaacauacgauuauccuaaauacagcgaggaagcaaagcucaacagagaggagaucgacggggucaaacuggaaucaaccaggauuuaucaaauacuugccaucuacaguacuguggcuuccagccuggucuuggugguuucucucggagcgauuucauuuuggaugugcaguaaugguagccugcagugccggaucuguaucuga

SEQ ID NO: 136446 - RNA, 1701 nt, Artificial Sequence
  derived and/or modified CDS sequence (opt3) from hemagglutinin__InfluenzaA__AFF57136
augaaggccauccuggugguccuccuuuacaccuucgcuacagcaaacgccgacacucugugcauuggcuaucacgcgaauaacagcacggauaccguugacacaguguuggagaaaaauguaacugugacccauuccgucaacuuacuggaagauaagcacaaugggaaacuauguaagcucagaggaguggcuccccugcaucuugguaaaugcaacauagccggcuggauccuggggaauccugagugugaaucuuugucaacagcaaguagcugguccuacauuguugagaccucuucgucagacaacggaacuugcuauccaggcgauuuuaucgacuacgaggagcucagggagcagcugagcaguguguccucuuucgaacgguuugagauuuucccgaagacaagcuccuggcccaaucacgauucaaacaagggugucaccgccgcuuguccucaugcaggggccaaaaguuuuuauaagaaucugaucuggcucgugaaaaagggaaacagcuacccaaaauuaucuaaguccuauauaaaugacaagggcaaagaaguacugguucuuuggggcauccaccaccccucaacgagcgcugaucaacagaguuuguaccagaacgccgacgcguacguguucgucgggucuucccgcuauagcaagaaauuuaagccugagauugcaauccgaccaaaagugcgugauagagagggaaggaugaauuacuauuggacucugguggaacccggugacaagauuaccuucgaggccacaggcaaccuagucguuccucgguacgcuuuugccauggaacgcaacgcagggucgggaaucauaauuucugauacuccaguguaugacugcaauaccacaugucagaccccgaaaggcgcuaucaacacgucccuccccuuccaaaauauucauccuaucacuaucgguaagugcccaaaguacguaaaaucaacaaagcugagacuugccaccgggcugaggaacgugcccaguauucagagccggggauuguuuggcgcgauagccggcuucaucgaagggggauggacugguauggucgacggcugguauggguaccaccaucagaaugaacagggauccggcuacgcagcugaucucaaaucuacacaaaacgccauugacgagaucaccaauaaggugaacagcguuauagagaaaaugaauacgcaguuuaccgcuguggguaaggaguucaaccaccuggaaaagcgcauugaaaauuuaaacaaaaaggucgaugacggguuccuggauaucuggacauauaaugccgagcuccuugugcuguuggaaaacgagcgaacucuagacuaccacgauucaaauguaaagaaccuguaugagaagguuagaagucagcucaaaaacaaugcaaaggaaaucggcaacggauguuuugaguucuaccauaagugcgacaauaccuguauggaauccgugaaaaacggcacauaugauuacccuaaguauagcgaggaagccaaacugaauagggaggagauugacggggucaaacuugaaucuacucggaucuaccagauucuggcuauauacucaaccguggcgaguagcuugguccucgugguuucccugggagcaaucucuuuuuggaugugcucgaacgguagcuuacaaugccguauuuguaucuga

SEQ ID NO: 136447 - RNA, 1701 nt, Artificial Sequence
  derived and/or modified CDS sequence (opt3) from hemagglutinin__InfluenzaA__AFF57144
augaaggccauccuggugguccuccuuuacaccuucgcuacagcaaacgccgacacucugugcauuggcuaucacgcgaauaacagcacggauaccguugacacaguguuggagaaaaauguaacugugacccauuccgucaacuuacuggaagauaagcacaaugggaaacuauguaagcucagaggaguggcuccccugcaucuugguaaaugcaacauagccggcuggauccuggggaauccugagugugaaucuuugucaacagcaaguagcugguccuacauuguugagaccucuucgucagacaacggaacuugcuauccaggcgauuuuaucgacuacgaagaacucagggagcagcugagcaguguguccucuuucgaacgguuugagauuuucccgaagacaagcuccuggcccaaucacgauucaaacaagggugucaccgccgcuuguccucaugcaggggccaaaaguuuuuauaagaaucugaucuggcucgugaaaaagggaaacagcuacccaaaauuaucuaaguccuauauaaaugacaagggcaaagaaguacugguucuuuggggcauccaccaccccucaacgagcgaugaccaacagaguuuguaccagaacgaggaugcuuacguguucgucgggucuucccgcuauagcaagaaauuuaagccugagauugccauccgaccaaaagugcgugacagagaaggaaggaugaauuacuauuggacucugguggagcccggugauaagauuaccuucgaagcgacaggcaaccuagucguuccucgguacgcauuugccauggagcgcaacgcugggucgggaaucauaauuucugacacuccagugcaugacugcaauaccacaugucagaccccgaaaggcgccaucaacacgucccuccccuuccaaaauauucacccuaucacuaucgguaagugcccaaaguauguaaaaucaacaaagcugagacuugcaaccgggcugaggaacgugcccaguauucagagccggggauuguuuggcgcuauagccggcuucaucgaagggggauggacugguauggucgauggcugguacggguaucaucaccagaaugagcagggauccggcuacgcggccgaccucaaaucuacacaaaacgcaauugaugagaucaccaauaaggugaacagcguuauagaaaagaugaauacgcaguuuaccgcuguggguaaggaguucaaccaccuggaaaagcgcauugagaauuuaaacaaaaaggucgacgauggguuccuggacaucuggacauacaaugccgaacuccuugugcuguuggagaacgagcgaacucuagauuaucaugacucaaauguuaaaaaccuguacgaaaagguaagaagucagcucaaaaacaaugcuaaggagaucggcaacggauguuuugaguucuaucacaagugcgauaauaccuguauggaguccgugaaaaacggcacauacgacuauccuaaguacagcgaagaggccaaacugaauagggaggaaauugauggggucaaacuugagucuacucggaucuaucagauucuggcaauauacucaaccguggccaguagcuugguccucgugguuucccugggagcuaucucuuuuuggaugugcucgaacgguagcuuacaaugccguauuuguaucuga

SEQ ID NO: 136448 - RNA, 1701 nt, Artificial Sequence
  derived and/or modified CDS sequence (opt3) from hemagglutinin__InfluenzaA__AFF57148
augaaggccauccuggugguccuccuuuacaccuucgcuacagcaaacgccgacacucugugcauuggcuaucacgcgaauaacagcacggauaccguugacacauuguuagagaaaaaugugacuguaacccauuccgugaaccugcuagaagauaagcacaaugggaaacucuguaagcugagaggagucgcuccccuucaucuggguaaaugcaacauagccggcuggaucuuggggaauccugagugugaaucucucucaacagcaaguagcugguccuacauuguggagaccucuucgucagacaacggaacuugcuauccaggcgauuuuaucgacuacgaagaacugagggagcagcugagcaguguuuccucuuucgaacgguuugagauuuucccgaagacaagcuccuggcccaaucacgauucaaacaagggugugaccgccgcuuguccucaugcaggggccaaaaguuuuuauaagaaucucaucugguuagucaaaaagggaaacagcuacccaaaacugucuaaguccuauauaaaugacaagggcaaagaagugcuuguauuguggggcauccaccaccccucaacgagcgaugaccaacagagucuguaccagaacgaggaugcuuacguuuucguggggucuucccgcuauagcaagaaauuuaagccugagauugccauccgaccaaaaguccgugacagagaaggaaggaugaauuacuauuggacucuaguggagcccggugauaagauuaccuucgaagcgacaggcaaccucguggucccucgguacgcauuugccauggagcgcaacgcugggucgggaaucauaauuucugacacuccaguucaugacugcaauaccacaugucagaccccgaaaggcgccaucaacacgucccugcccuuccaaaauauucacccuaucacuaucgguaagugcccaaaguaugugaaaucaacaaaacuuagacuggcaaccggguugaggaacguacccaguauucagagccggggacucuuuggcgcuauagccggcuucaucgaagggggauggacugguaugguggauggcugguacggguaucaucaccagaaugagcagggauccggcuacgcggccgaccugaaaucuacacaaaacgcaauugaugagaucaccaauaaggucaacagcgugauagaaaagaugaauacgcaguuuaccgcuguugguaaggaguucaaccacuuagaaaagcgcauugagaaucugaacaaaaagguggacgauggguuccucgacaucuggacauacaaugccgaacuucuggucuugcuagagaacgagcgaacucuggauuaucaugacucaaaugugaaaaaccucuacgaaaagguaagaagucagcugaaaaacaaugcuaaggagaucggcaacggauguuuugaguucuaucacaagugcgauaauaccuguauggaguccguuaaaaacggcacauacgacuauccuaaguacagcgaagaggccaaacuuaauagggaggaaauugauggggugaagcuggagucuacucggaucuaucagauuuuggcaauauacucaaccgucgccaguagccucgugcuggucguguccuuaggagcuaucucuuuuuggaugugcucgaacgguagccugcaaugccguauuuguaucuga

SEQ ID NO: 136449 - RNA, 1701 nt, Artificial Sequence
  derived and/or modified CDS sequence (opt3) from hemagglutinin__InfluenzaA__AFF57160
augaaggccauccuggugguccuccuuuacaccuucgcuacagcaaacgccgacacucugugcauuggcuaucacgcgaauaacagcacggauaccguugacacaguguuggagaaaaauguaacugugacccauuccgucaacuuacuggaagauaagcacaaugggaaacuauguaagcucagaggaguggcuccccugcaucuugguaaaugcaacauagccggcuggauccuggggaauccugagugugaaucuuugucaacagcaaguagcugguccuacauuguugagaccucuucgucagacaacggaacuugcuauccaggcgauuuuaucgacuacgaggagcucagggagcagcugagcaguguguccucuuucgaacgguuugagauuuucccgaagacaagcuccuggcccaaucacgauucaaacaagggugucaccgccgcuuguccucaugcaggggccaaaaguuuuuauaagaaucugaucuggcucgugaaaaagggaaacagcuacccaaaauuaucugaauccuauauaaaugacaagggcaaggagguacugguucuuuggggcauccaccaccccucaacgagcgcugaucaacagaguuuguaccagaacgaggacgccuacguguucgucgggucuucccgcuauagcaaaaaguuuaaaccugaaauugcgauccgaccaaaggugcgugauagagagggaaggaugaauuacuauuggacucugguggaacccggugacaaaauuaccuucgaggcaacaggcaaccuagucguuccucgguacgccuuugcuauggaacgcaacgccgggucgggaaucauaauuucugauacuccagugcaugacugcaauaccacaugucagaccccgaagggcgcaaucaacacgucccuccccuuccaaaauauucacccuaucacuaucgguaaaugcccaaaguauguaaagucaacaaaacugagacuugcuaccgggcugaggaacgugcccaguauucagagccggggauuguuuggcgccauagcgggcuucaucgaagggggauggacugguauggucgacggcugguacggguaucaucaccagaaugagcagggauccggcuacgccgcagaucucaagucuacacaaaacgcuauugacgaaaucaccaauaaagugaacagcguuauagagaagaugaauacgcaguuuaccgccguggguaaagaguucaaccaccuggaaaagcgcauugaaaauuuaaacaagaaagucgaugacggguuccuggauaucuggacauacaaugcugagcuccuugugcuguuggagaacgaacgaacucuagacuaucaugauucaaauguaaagaaccuguacgagaaaguuagaagucagcucaagaacaaugccaaagaaaucggcaacggauguuuugaguucuaucacaagugcgacaauaccuguauggaauccgugaagaacggcacauacgauuauccuaaauacagcgaggaggcaaagcugaauagggaagagauugacggggucaaacuugaaucuacucggaucuaucagauucuggccauauacucaaccguggcuaguagcuugguccucgugguuucccugggagcgaucucuuuuuggaugugcucgaacgguagcuuacaaugccguauuuguaucuga

SEQ ID NO: 136450 - RNA, 1701 nt, Artificial Sequence
  derived and/or modified CDS sequence (opt3) from hemagglutinin__InfluenzaA__AFF57164
augaaggccauccuggugguccuccuuuacaccuucgcuacagcaaacgccgacacucugugcauuggcuaucacgcgaauaacagcacggauaccguugacacaguguuggagaaaaauguaacugugacccauuccgucaacuuacuggaagauaagcacaaugagaaacuauguaagcucagagggguggcuccccugcaucuuggaaaaugcaacauagccgguuggauccugggcaauccugaaugugagucuuugucaacagcaaguagcugguccuacauuguugaaaccucuucgucagacaacgggacuugcuauccaggagauuuuaucgacuacgaggagcucagggaacagcugagcaguguguccucuuucgagcgguuugaaauuuucccgaagacaagcuccuggcccaaucacgauucaaacaagggcgucaccgccgcuuguccucaugccggugcaaaaaguuuuuauaagaaucugaucuggcucgugaaaaaggggaacagcuacccaaaauuaucuaaguccuauauaaaugacaagggaaaagagguacugguucuuuggggcauccaccaccccucaacgagcgcugaucaacagaguuuguaccagaacgccgacgcguacguguucgucggaucuucccgcuauagcaagaaauuuaagccugagauugcaauccgaccaaaagugcgugauagagaagggaggaugaauuacuauuggacucugguggagcccggagacaagauuaccuucgaagccacagguaaccuagucguuccucgguacgcuuuugccauggagcgcaacgcaggcucggggaucauaauuucugauacuccagugcaugacugcaauaccacaugucagaccccgaaaggagcuaucaacacgucccuccccuuccaaaauauucacccuaucacuaucggcaagugcccaaaguauguaaaaucaacaaagcugagacuugccaccggucugaggaacgugcccaguauucagagccggggguuguuuggagcgauagccggcuucaucgaaggcggguggacuggaauggucgacgguugguacggcuaucaucaccagaaugagcagggguccggauacgcagcugaucucaaaucuacacaaaacgccauugacgagaucaccaauaaggugaacagcguuauagaaaagaugaauacgcaguuuaccgcugugggcaaggaguucaaccaccuggaaaagcgcauugagaauuuaaacaaaaaggucgaugacgguuuccuggauaucuggacauacaaugccgaacuccuugugcuguuggagaacgagcgaacucuagacuaucaugauucaaauguuaaaaaccuguacgaaaagguaagaagucagcucaaaaacaaugcaaaggagaucgggaacggcuguuuugaguucuaucacaagugcgacaauaccuguauggaauccgugaaaaacggaacauacgauuauccuaaguacagcgaagaggccaaacugaauagggaggaaauugacggcgucaaacuugagucuacucggaucuaucagauucuggcuauauacucaaccguggcgaguagcuugguccucgugguuucccugggggcaaucucuuuuuggaugugcucgaacggcagcuuacaaugccguauuuguaucuga

SEQ ID NO: 136451 - RNA, 1701 nt, Artificial Sequence; identical to SEQ ID NO: 136450
  derived and/or modified CDS sequence (opt3) from hemagglutinin__InfluenzaA__AFF57168

SEQ ID NO: 136452 - RNA, 1701 nt, Artificial Sequence
  derived and/or modified CDS sequence (opt3) from hemagglutinin__InfluenzaA__AFF57172
augaaggccauccuggugguccuccuuuacaccuucgcuacagcaaacgccgacacucugugcauuggcuaucacgcgaauaacagcacggauaccguugacacaguguuggagaaaaauguaacugugacccauuccgucaacuuacuggaagauaagcacaaugggaaacuauguaagcucagaggaguggcuccccugcaucuugguaaaugcaacauagccggcuggauccuggggaauccugagugugaaucuuugucaacagcaaguagcugguccuacauuguugagaccucuucgucagacaacggaacuugcuauccaggcgauuuuaucgacuacgaagaacucagggagcagcugagcaguguguccucuuucgaacgguuugagauuuucccgaagacaagcuccuggcccaaucacgauucaaacaagggugucaccgccgcuuguccucaugcaggggccaaaaguuuuuauaagaaucugaucuggcucgugaaaaagggaaacagcuacccaaaauuaucuaaguccuauauaaaugacaagggcaaagaaguacugguucuuuggggcauccaccaccccucaacgagcgcugaucaacagaguuuguaccagaacgaggacgccuacguguucgucgggucuucccgcuauagcaagaaauuuaagccugagauugcgauccgaccaaaagugcgugauagagaaggaaggaugaauuacuauuggacucugguggagcccggugacaagauuaccuucgaagcaacaggcaaccuagucguuccucgguacgccuuugcuauggagcgcaacgccgggucgggaaucauaauuucugauacuccagugcaugacugcaauaccacaugucagaccccgaaaggcgcaaucaacacgucccuccccuuccaaaauauucacccuaucacuaucgguaagugcccaaaguauguaaaaucaacaaagcugagacuugcuaccgggcugaggaacgugcccaguauucagagccggggauuguuuggcgccauagcgggcuucaucgaagggggauggacugguauggucgacggcugguacggguaucaucaccagaaugagcagggauccggcuacgccgcagaucucaaaucuacacaaaacgcuauugacgagaucaccaauaaggugaacagcguuauagaaaagaugaauacgcaguuuaccgccguggguaaggaguucaaccaccuggaaaagcgcauugagaauuuaaacaaaaaggucgaugacggguuccuggauaucuggacauacaaugcugaacuccuugugcuguuggagaacgagcgaacucuagacuaucaugauucaaauguuaaaaaccuguacgaaaagguaagaagucagcucaaaaacaaugccaaggagaucggcaacggauguuuugaguucuaucacaagugcgacaauaccuguauggaguccgugaaaaacggcacauacgauuauccuaaguacagcgaagaggcaaaacugaauagggaggaaauugacggggucaaacuugagucuacucggaucuaucagauucuggccauauacucaaccguggcuaguagcuugguccucgugguuucccugggagcgaucucuuuuuggaugugcucgaacgguagcuuacaaugccguauuuguaucuga

SEQ ID NO: 136453 - RNA, 1701 nt, Artificial Sequence
  derived and/or modified CDS sequence (opt3) from hemagglutinin__InfluenzaA__AFF57176
augaaggccauccuggugguccuccuuuacaccuucgcuacagcaaacgccgacacucugugcauuggcuaucacgcgaauaacagcacggauaccguugacacaguguuggagaaaaauguaacugugacccauuccgucaacuuacuggaagauaagcacaaugggaaacuauguaagcucagaggaguggcuccccugcaucuugguaaaugcaacauagccggcuggauccuggggaauccugagugugaaucuuugucaacagcaaguagcugguccuacauuguugagaccucuucgucagacaacggaacuugcuauccaggcgauuuuaucgacuacgaagaacucagggagcagcugagcaguguguccucuuucgaacgguuugagauuuucccgaagacaagcuccuggcccaaucacgauucaaacaagggugucaccgccgcuuguccucaugcaggggccaaaaguuuuuauaagaaucugaucuggcucgugaaaaaggaaaacagcuacccaaaauuaucuaaguccuauauaaaugacaagggaaaagagguacugguucuuuggggcauccaccaccccucaacgagcgcugaucaacagaguuuguaccagaacgccgacgcguacguguucgucggaucuucccgcuauagcaagaaauuuaagccugagauugcaauccgaccaaaagugcgugauagagaagggaggaugaauuacuauuggacucugguggagcccggagacaagauuaccuucgaagccacagguaaccuagucguuccucgguacgcuuuugccauggagcgcaacgcaggcucggggaucauaauuucugauacuccagugcaugacugcaauaccacaugucagaccccgaaaggagcuaucaacacgucccuccccuuccaaaauauucacccuaucacuaucggcaagugcccaaaguauguaaaaucaacaaagcugagacuugccaccggucugaggaacgugcccaguauucagagccggggguuguuuggagcgauagccggcuucaucgaaggcggguggacuggaauggucgacgguugguacggcuaucaucaccagaaugagcagggguccggauacgcagcugaucucaaaucuacacaaaacgccauugacgagaucaccaauaaggugaacagcguuauagaaaagaugaauacgcaguuuaccgcugugggcaaggaguucaaccaccuggaaaagcgcauugagaauuuaaacaaaaaggucgaugacgguuuccuggauaucuggacauacaaugccgaacuccuugugcuguuggagaacgagcgaacucuagacuaucaugauucaaauguuaaaaaccuguacgaaaagguaagaagucagcucaaaaacaaugcaaaggagaucgggaacggcuguuuugaguucuaucacaagugcgacaauaccuguauggaguccgugaaaaacggaacauacgauuauccuaaguacagcgaagaggccaaacugaauagggaggaaauugacggcgucaaacuugagucuacucggaucuaucagauucuggcuauauacucaaccguggcgaguagcuugguccucgugguuucccugggggcaaucucuuuuuggaugugcucgaacggcagcuuacaaugccguauuuguaucuga

SEQ ID NO: 136454 - RNA, 1701 nt, Artificial Sequence
  derived and/or modified CDS sequence (opt3) from hemagglutinin__InfluenzaA__AFF57184
augaaggccauccuggugguccuccuuuacaccuucgcuacagcaaacgccgacacucugugcauuggcuaucacgcgaauaacagcacggauaccguugacacaguguuggagaaaaauguaacugugacccauuccgucaacuuacuggaagauaagcacaaugggaaacuauguaagcucagaggaguggcuccccugcaucuugguaaaugcaacauagccggcuggauccuggggaauccugagugugaaucuuugucaacagcaaguagcugguccuacauuguugagaccucuucgucagacaacggaacuugcuauccaggcgauuuuaucgacuacgaagaacucagggagcagcugagcaguguguccucuuucgaacgguuugagauuuucccgaagacaagcuccuggcccaaucacgauucaaacaagggugucaccgccgcuuguccucaugcaggggccaaaaguuuuuauaagaaucugaucuggcucgugaaaaaggaaaacagcuaccaaaaauuaucuaaguccuauauaaaugacaagggaaaagagguacugguucuuuggggcauccaccacccaucaacgagcgcugaucagcagaguuuguaccagaacgccgacgcguacguguucgucggaucuucccgcuauagcaagaaauuuaagcccgagauugcaauccgaccuaaagugcgugauagagaagggaggaugaauuacuauuggacucugguggagccaggagacaagauuaccuucgaagccacagguaaccuagucguuccccgguacgcuuuugccauggagcgcaacgcaggcucggggaucauaauuucugauacuccugugcaugacugcaauaccacaugucaaaccccaaaaggagcuaucaacacgucccucccguuccagaauauucaccccaucacuaucggcaagugcccuaaguauguaaaaucaacaaagcugagacuugccaccggucugaggaacgugccaaguauucagagccggggguuguuuggagcgauagccggcuucaucgaaggcggguggacuggaauggucgacgguugguacggcuaucaucaccagaaugagcaaggguccggauacgcagcugaucucaaaucuacacagaacgccauugacgagaucaccaauaaggugaacagcguuauagaaaagaugaauacgcaguuuaccgcugugggcaaggaguucaaccaccuggaaaagcgcauugagaauuuaaacaaaaaggucgaugacgguuuccuggauaucuggacauacaaugccgaacuccuugugcuguuggagaacgagcgaacucuagacuaucaugauucaaauguuaaaaaccuguacgaaaagguaagaagucagcucaaaaacaaugcaaaggagaucgggaacggcuguuuugaguucuaucacaagugcgacaauaccuguauggaguccgugaaaaacggaacauacgauuaucccaaguacagcgaagaggccaaacugaauagggaggaaauugacggcgucaaacuugagucuacucggaucuaucaaauucuggcuauauacucaaccguggcgaguagcuugguccucgugguuucccugggggcaaucucuuuuuggaugugcucgaacggcagcuuacagugccguauuuguaucuga

SEQ ID NO: 136455 - RNA, 1701 nt, Artificial Sequence; identical to SEQ ID NO: 136447
  derived and/or modified CDS sequence (opt3) from hemagglutinin__InfluenzaA__AFF57188

SEQ ID NO: 136456 - RNA, 1707 nt, Artificial Sequence
  derived and/or modified CDS sequence (opt3) from hemagglutinin__InfluenzaA__AFF60787
auggagaagaucgugcuucucuucgccauugucagccuuguuaaauccgaccagauaugcaucggcuaccacgcuaacaauucuaccgaacaaguggauacaauuauggagaagaacguaacugugacgcaugcacaggacauccuggagaaaacccacaaugggaaguugugugauuuagacggagucaaaccccugauucuaagagauugcucaguggccgguuggcuccugggcaacccuaugugugacgaguuuaucaauguuccagaauggaguuauauaguggagaaggcgaacccggucaaugaucuuugcuaccccggggacuucaacgauuaugaggaacugaagcauuugcucagcaggaucaaucacuuugagaaaauucagaucauuccuaaguccucuuggucgucacaugaagcuagccugggagugaguuccgccuguccauaccagggcaaaucuagcuucuuucggaacguaguuuggcugaucaagaaaaauuccacauaucccacuauaaagcgcucauacaacaauaccaaccaagaggaccucuuagugcugugggguauucaccacccuaaugaugcagccgagcagacaaagcuguaucagaacccaaccacuuacaucagugucgggacaagcaccuugaaccagcgacuggugccccguauugcuacgagaucugaagugaauggacaauccggcaggauggaguucuuuuggacuauccuaaaaccuaacgacgcaaucaauuucgaaucaaacggcaauuuuauugccccagaguacgcuuauaagauagucaaaaagggggauagcaccaucaugaaaagugaacucgaguacggaaacugcaauacaaagugucagacuccgaugggugccauuaacucuuccaugcccuuccauaauauccacccucugaccauaggcgagugcccaaaauauguuaagagcaaccggcuugugcuggcgacaggguugcgcaauucgccccagagagaaaggcggcgcaagaaacgaggacucuuuggcgcaauugccgguuucaucgaagggggauggcagggcaugguagacggcugguacggguaucaucacucuaacgaacaaggauccgguuacgcugccgacaaggagucaacccagaaagcaaucgauggcgugacgaauaaggucaacaguauuaucgacaaaaugaauacucaguuugaagcuguggggagagaguucaacaaccuggagaggcggauugaaaauuuaaacaagaagauggaggauggauuccuggacguuuggacauauaaugccgaacuccuugugcugauggagaacgaacguaccuuggauuuucacgacagcaaugucaaaaaccuauacgauaaggugcgccugcaacucagagacaaugcgaaagagcugggcaacgguuguuucgaguuuuaccauaagugcgauaaugaauguauggaguccguaaggaacgggacuuaugacuacccucaguauucugaagaggcccggcuuaaacgagaggaaauaagcggcguuaagcuggagucaaucggaauuuaccagaucuugaguaucuauuccacaguggcaagcucucucgcucuggccauuauggucgcuggcuuaucacuguggaugugcaguaaugggagccuacagugccgcauauguaucuga

SEQ ID NO: 136457 - RNA, 1701 nt, Artificial Sequence
  derived and/or modified CDS sequence (opt3) from hemagglutinin__InfluenzaA__AFG29042
augaaggccauccuggugguccuccuuuacaccuucgcuacagcaaacgccgacacucugugcauuggcuaucacgcgaauaacagcacggauaccguugacacaguguuggagaagaauguaacugugacccauuccgucaacuuacuggaagauaagcacaaugggaaacuauguaagcucagaggaguggcuccccugcaucuugguaaaugcaacauagccggcuggauccuggggaauccugagugugaaucuuugucaacagcaaguagcugguccuacauuguugagaccuuuucuucggacaacggaacuugcuauccaggcgauuucaucgacuacgaggagcucagggagcagcugucaagcgugaguuccuuugaacgguucgagauuuuuccgaagacaucuagcuggcccaaucacgauuccaacaagggugucaccgccgcuuguccucaugcaggggccaaaucauucuauaagaaucugaucuggcucgugaaaaagggaaacaguuacccaaaauuaagcaagucuuauauaaaugacaagggcaaagaaguacugguucuuuggggcauccaccaccccuccacgucagcugaucaacagagcuuguaccagaacgccgacgcguacguguuugucgggaccagucgcuauucuaagaaauucaagccugagauugcaauccgaccaaaagugcgugaucaggagggaagaaugaauuacuauuggacucugauugaacccggugacaagaucacauuugaggccacuggcaaccuaguggucccuagguacgcuuucgccauggaacggaacgcaggguccggaauaauuaucagcgauaccccaguucaugacugcaauacaaccugucaaacgccgaaaggcgcuauuaacacuucgcuccccuuucagaauauccacccuaucacaauugguaagugcccaaaguaugugaaaucuaccaagcugcgccuugccacugggcugagaaacguacccuccauacagucaaggggauuguucggcgcgaucgccggcuuuauugaagggggauggacagguaugguggacggcugguacggguaucaucaccagaaugaacaaggaaguggcuacgcagcugaucucaaaagcacccagaacgccaucgacgagauaacgaauaaggucaacuccgugauugagaaaaugaauacccaguucacagcuguugguaaggaguucaaccaccuggaaaagcggaucgaaaauuuaaacaaaaagguggaugacggguuucuggauaucuggacuuacaaugccgagcuccuuguccuguuggaaaacgagcgcacccuagacuaucaugauucuaaugugaaaaaccuguacgagaagguacgaagccagcucaaaaacaaugcaaaggaaauuggcaacggauguuucgaguuuuaucacaagugcgacaauacauguauggaaucaguuaaaaacggcacuuacgauuauccuaaguacagugaggaagccaaacugaauagagaggagaucgacggggugaaacuugaauccaccaggauuuaucaaauacuggcuaucuacagcacagucgcgucuucauuggugcucgucgugagucugggagcaauuagcuucuggaugugcuccaacgguucuuuacagugccggaucuguaucuga

SEQ ID NO: 136458 - RNA, 1701 nt, Artificial Sequence
  derived and/or modified CDS sequence (opt3) from hemagglutinin__InfluenzaA__AFG29044
augaaggccauccuggugguccuccuuuacaccuucgcuacagcaaacgccgacacucugugcauuggcuaucacgcgaauaacagcacggauaccguugacacaguguuggagaaaaauguaacugugacccauuccgucaacuuacuggaagauaagcacaaugggaaacuauguaagcucagaggaguggcuccccugcaucuugguaaaugcaacauagccggcuggauccuggggaauccugagugugaaucuuugucaacagcaaguagcugguccuacauuguugagaccccaaacucugacaauggaacuugcuauccgggcgauuuuaucgacuacgaagaacucagggagcagcugucgucagugagcaguuucgaacgguuugagauuuuccccaagacauccucuuggccuaaccacgauagcaauaagggugucaccgccgcuuguccacaugcaggggccaaauccuuuuauaagaaccugaucuggcucgugaaaaagggaaauucauaccccaaauuaaguaagagcuauauaaacgacaagggcaaagaaguacugguucuuuggggcauccaccacccuccaacgucuacugaucaacaguccuuguaccagaaugcugacgccuacguguucgucgggaccucacgcuauagcaagaaauuuaagcccgagauugcgauccgaccuaaagugcguggacaggaggguagaaugaacuacuauuggacacugguggaaccaggcgauaagauuacuuucgaggcaaccgggaaccuagucguuccgagguacgccuuugcuauggaacggaaugccggaaguggcaucauaauuucugacacacccgugcaugauugcaacaccacgugucaaacuccuaaaggugcaaucaauacaucccucccauuccagaacauucaccccaucaccaucgggaagugcccuaaguauguaaaaagcacuaagcugcgccuugcuacaggacugagaaaugugccaucgauucagucuaggggcuuguuuggcgccauagcgggguucaucgagggagguuggaccggcauggucgacgggugguacggauaucaucaccagaacgaacaaggcuccgguuacgccgcagaccucaaaucaacgcagaaugcuauugauaagaucaccaacaaagugaauaguguuauagagaagaugaacacacaguuuacugccguggggaaggaguucaaucaccuggaaaaacggauugagaacuuaaauaagaaagucgacgauggcuuccuggacaucuggaccuacaacgcugaacuccuugugcuguuggagaaugaacgcacacuagauuaucaugacagcaacguaaagaaccuguacgagaaaguucgaucccagcucaagaauaacgccaaggagaucggaaauggcuguuuugaguucuaucacaaaugcgauaacacuuguauggagucugugaagaaugggaccuacgacuaucccaaauacagcgaagaggcaaagcugaacagagaagagauugauggagucaaacuugagucaacaaggaucuaucaaauucuggccauauacaguaccguggcuuccagcuugguccucgugguuucucugggugcgaucucauuuuggaugugcaguaauggcagcuuacagugccggauuuguaucuga

SEQ ID NO: 136459 - RNA, 1701 nt, Artificial Sequence; identical to SEQ ID NO: 130717
  derived and/or modified CDS sequence (opt3) from hemagglutinin__InfluenzaA__AFG31060

SEQ ID NO: 136460 - RNA, 1701 nt, Artificial Sequence; identical to SEQ ID NO: 133272
  derived and/or modified CDS sequence (opt3) from hemagglutinin__InfluenzaA__AFG31070

SEQ ID NO: 136461 - RNA, 1701 nt, Artificial Sequence; identical to SEQ ID NO: 130704
  derived and/or modified CDS sequence (opt3) from hemagglutinin__InfluenzaA__AFG31080

SEQ ID NO: 136462 - RNA, 1701 nt, Artificial Sequence
  derived and/or modified CDS sequence (opt3) from hemagglutinin__InfluenzaA__AFG31100
augaaggccauccuggugguccuccuuuacaccuucgcuacagcaaacgccgacacucugugcauuggcuaucacgcgaauaacagcacggauaccguugacacaguguuggagaaaaauguaacugugacccauuccgucaacuuacuggaagauaagcacaaugggaaacuauguaagcucagaggaguggcuccccugcaucuugguaaaugcaacauagccggcuggauccuggggaauccugagugugaaucuuugucaacagcaaguagcugguccuacauuguugagaccucuucgucagacaacggaacuugcuauccaggcgauuuuaucgacuacgaggagcucagggagcagcugagcaguguguccucuuucgaacgguuugagauuuucccgaagacaagcuccuggcccaaucacgaucugaacaagggugucaccgccgcuuguccucaugcaggggccaaaucauuuuauaagaaucucaucugguuagugaaaaagggaaacaguuacccaaaacugagcaagucuuauauaaaugacaagggcaaagaaguacuuguuuuguggggcauccaccaccccuccacgucagcugaucaacagagccuguaccagaacgccgacgcguacguguucgucgggaccagucgcuauucuaagaaauuuaagccugagauugcaauccgaccaaaagugcgugaucaggagggaagaaugaauuacuauuggacucuaguggaacccggugacaagauuacauucgaggccacuggcaaccucgucguuccuagguacgcuuuugccauggaacggaacgcaggguccggaaucauaauuagcgauaccccagugcaugacugcaauacaaccugucaaacgccgaaaggcgcuaucaacacuucgcugcccuuccagaauauucacccuaucacaaucgguaagugcccaaaguauguaaaaucuaccaaacuucgccuggccacuggguugagaaacgugcccuccauucagucaaggggacucuuuggcgcgauagccggcuucaucgaagggggauggacagguauggucgacggcugguacggguaucaucaccagaaugaacaaggaaguggcuacgcagcugaucugaaaagcacccagaacgccauugacgagaucacgaauaaggugaacuccguuauagagaaaaugaauacccaguuuacagcuguggguaaggaguucaaccacuuagaaaagcggauugaaaaucugaacaaaaaggucgaugacggguuccucgauaucuggacuuacaaugccgagcuucugguguugcuagaaaacgagcgcacccuggacuaucaugauucuaauguaaagaaccucuacgagaagguucgaagccagcugaaaaacaaugcaaaggaaaucggcaacggauguuuugaguucuaucacaagugcgacaauacauguauggaaucagugaaaaacggcacuuacgauuauccuaaguacagugaggaagccaaacuuaauagagaggagauugacggggucaagcuggaauccaccaggaucuaucaaauuuuggcuauauacagcacaguggcgucuucacucguccugaucgugaguuuaggagcaauuagcuuuuggaugugcuccaacgguucucugcagugccggaucuguaucuga

SEQ ID NO: 136463 - RNA, 1701 nt, Artificial Sequence; identical to SEQ ID NO: 130717
  derived and/or modified CDS sequence (opt3) from hemagglutinin__InfluenzaA__AFG31110

SEQ ID NO: 136464 - RNA, 1701 nt, Artificial Sequence; identical to SEQ ID NO: 130959
  derived and/or modified CDS sequence (opt3) from hemagglutinin__InfluenzaA__AFG31120

SEQ ID NO: 136465 - RNA, 1701 nt, Artificial Sequence; identical to SEQ ID NO: 130959
  derived and/or modified CDS sequence (opt3) from hemagglutinin__InfluenzaA__AFG31130

SEQ ID NO: 136466 - RNA, 1701 nt, Artificial Sequence; identical to SEQ ID NO: 130959
  derived and/or modified CDS sequence (opt3) from hemagglutinin__InfluenzaA__AFG31140

SEQ ID NO: 136467 - RNA, 1701 nt, Artificial Sequence; identical to SEQ ID NO: 131819
  derived and/or modified CDS sequence (opt3) from hemagglutinin__InfluenzaA__AFG31150

SEQ ID NO: 136468 - RNA, 1701 nt, Artificial Sequence; identical to SEQ ID NO: 131819
  derived and/or modified CDS sequence (opt3) from hemagglutinin__InfluenzaA__AFG31160

SEQ ID NO: 136469 - RNA, 1701 nt, Artificial Sequence; identical to SEQ ID NO: 130717
  derived and/or modified CDS sequence (opt3) from hemagglutinin__InfluenzaA__AFG31170

SEQ ID NO: 136470 - RNA, 1701 nt, Artificial Sequence; identical to SEQ ID NO: 130717
  derived and/or modified CDS sequence (opt3) from hemagglutinin__InfluenzaA__AFG31180

SEQ ID NO: 136471 - RNA, 1701 nt, Artificial Sequence; identical to SEQ ID NO: 130717
  derived and/or modified CDS sequence (opt3) from hemagglutinin__InfluenzaA__AFG31190

SEQ ID NO: 136472 - RNA, 1701 nt, Artificial Sequence; identical to SEQ ID NO: 130717
  derived and/or modified CDS sequence (opt3) from hemagglutinin__InfluenzaA__AFG31200

SEQ ID NO: 136473 - RNA, 1701 nt, Artificial Sequence; identical to SEQ ID NO: 130717
  derived and/or modified CDS sequence (opt3) from hemagglutinin__InfluenzaA__AFG31210

SEQ ID NO: 136474 - RNA, 1701 nt, Artificial Sequence; identical to SEQ ID NO: 130717
  derived and/or modified CDS sequence (opt3) from hemagglutinin__InfluenzaA__AFG31220

SEQ ID NO: 136475 - RNA, 1701 nt, Artificial Sequence; identical to SEQ ID NO: 133272
  derived and/or modified CDS sequence (opt3) from hemagglutinin__InfluenzaA__AFG31230

SEQ ID NO: 136476 - RNA, 1701 nt, Artificial Sequence; identical to SEQ ID NO: 130717
  derived and/or modified CDS sequence (opt3) from hemagglutinin__InfluenzaA__AFG31240

SEQ ID NO: 136477 - RNA, 1701 nt, Artificial Sequence; identical to SEQ ID NO: 130717
  derived and/or modified CDS sequence (opt3) from hemagglutinin__InfluenzaA__AFG31250

SEQ ID NO: 136478 - RNA, 1701 nt, Artificial Sequence; identical to SEQ ID NO: 130717
  derived and/or modified CDS sequence (opt3) from hemagglutinin__InfluenzaA__AFG31260

SEQ ID NO: 136479 - RNA, 1701 nt, Artificial Sequence; identical to SEQ ID NO: 130717
  derived and/or modified CDS sequence (opt3) from hemagglutinin__InfluenzaA__AFG31270

SEQ ID NO: 136480 - RNA, 1701 nt, Artificial Sequence; identical to SEQ ID NO: 130717
  derived and/or modified CDS sequence (opt3) from hemagglutinin__InfluenzaA__AFG31280

SEQ ID NO: 136481 - RNA, 1701 nt, Artificial Sequence; identical to SEQ ID NO: 130717
  derived and/or modified CDS sequence (opt3) from hemagglutinin__InfluenzaA__AFG31290

SEQ ID NO: 136482 - RNA, 1701 nt, Artificial Sequence
  derived and/or modified CDS sequence (opt3) from hemagglutinin__InfluenzaA__AFG31300
augaaggccauccuggugguccuccuuuacaccuucgcuacagcaaacgccgacacucugugcauuggcuaucacgcgaauaacagcacggauaccguugacacaguguuggagaagaauguaacugugacccauuccgucaacuuacuggaagauaagcacaaugggaaacuauguaagcucagaggaguggcuccccugcaucuugguaaaugcaacauagccggcuggauccuggggaauccugagugugaaucuuugucaacagcaaguagcugguccuacauuguugagaccucuucgucagacaacggaacuugcuauccaggcgauuuuaucgacuacgaggagcucagggagcagcugagcaguguguccucuuucgaacgguuugagauuuucccgaagacaagcuccuggcccaaucacgauucaaacaagggugucaccgccgcuuguccucaugcaggggccaaaaguuuuuauaagaaucugaucuggcucgugaaaaagggaaacagcuacccaaaauuaucuaaguccuauauaaaugacaagggcaaagaaguacugguucuuuggggcauccaccaccccucaacgagcgcugaucaacagaguuuguaccagaacgccgacgcguacguguucgucgggacuucucgcuauuccaagaaauuuaagccugagauugcaauccgaccaaaagugcgugaucaggagggaagaaugaauuacuauuggacccugguggaacccggugacaagauuacauucgaggccacuggcaaccuagucguuccuagguacgcuuuugccauggaacggaacgcagggagcggaaucauaauuucggauaccccagugcaugacugcaauacaaccugucaaacgccgaaaggcgcuaucaacacuucucuccccuuccagaauauuaacccuaucacaaucgguaagugcccaaaguauguaaaauccaccaagcugcgccuugccacugggcugagaaaugugcccucaauucagaguaggggauuguuuggcgcgauagccggcuucaucgaagggggauggacagguauggucgacggcugguacggguaucaccaucagaacgaacaaggaagcggcuacgcagcugaucucaaauccacccagaaugccauugacgagaucacgaacaagguaaauucuguuauagagaaaaugaacacccaguuuacagcuguggguaaggaguucaaucaccuggaaaagcggauugaaaacuuaaauaaaaaggucgaugacggguuccuggauaucuggacuuacaacgccgagcuccuugugcuguuggaaaaugagcgcacccuagacuaucacgauagcaacgugaaaaaccuguacgagaagguucgaucacagcucaaaaauaacgcaaaggaaaucggcaauggauguuuugaguucuaucauaagugcgacaacacauguauggaaagugugaaaaauggcacuuacgauuauccuaaguacuccgaggaagccaaacugaacagagaggagauugacggggucaaacuugaaagcaccaggaucuaucaaauucuggcuauauacucuacaguggcgucaaguuugguccucgugguuagccugggagcaaucuccuuuuggaugugcucuaaugguucguuacagugccggauuuguaucuga

SEQ ID NO: 136483 - RNA, 1701 nt, Artificial Sequence; identical to SEQ ID NO: 133272
  derived and/or modified CDS sequence (opt3) from hemagglutinin__InfluenzaA__AFG31310

SEQ ID NO: 136484 - RNA, 1701 nt, Artificial Sequence; identical to SEQ ID NO: 130717
  derived and/or modified CDS sequence (opt3) from hemagglutinin__InfluenzaA__AFG31323

SEQ ID NO: 136485 - RNA, 1701 nt, Artificial Sequence; identical to SEQ ID NO: 130717
  derived and/or modified CDS sequence (opt3) from hemagglutinin__InfluenzaA__AFG31333

SEQ ID NO: 136486 - RNA, 1701 nt, Artificial Sequence; identical to SEQ ID NO: 130717
  derived and/or modified CDS sequence (opt3) from hemagglutinin__InfluenzaA__AFG31343

SEQ ID NO: 136487 - RNA, 1701 nt, Artificial Sequence; identical to SEQ ID NO: 130717
  derived and/or modified CDS sequence (opt3) from hemagglutinin__InfluenzaA__AFG31353

SEQ ID NO: 136488 - RNA, 1701 nt, Artificial Sequence; identical to SEQ ID NO: 130717
  derived and/or modified CDS sequence (opt3) from hemagglutinin__InfluenzaA__AFG31363

SEQ ID NO: 136489 - RNA, 1701 nt, Artificial Sequence; identical to SEQ ID NO: 130717
  derived and/or modified CDS sequence (opt3) from hemagglutinin__InfluenzaA__AFG31376

SEQ ID NO: 136490 - RNA, 1701 nt, Artificial Sequence; identical to SEQ ID NO: 130717
  derived and/or modified CDS sequence (opt3) from hemagglutinin__InfluenzaA__AFG31386

SEQ ID NO: 136491 - RNA, 1701 nt, Artificial Sequence; identical to SEQ ID NO: 130717
  derived and/or modified CDS sequence (opt3) from hemagglutinin__InfluenzaA__AFG31396

SEQ ID NO: 136492 - RNA, 1701 nt, Artificial Sequence; identical to SEQ ID NO: 130717
  derived and/or modified CDS sequence (opt3) from hemagglutinin__InfluenzaA__AFG31406

SEQ ID NO: 136493 - RNA, 1701 nt, Artificial Sequence; identical to SEQ ID NO: 130717
  derived and/or modified CDS sequence (opt3) from hemagglutinin__InfluenzaA__AFG31416

SEQ ID NO: 136494 - RNA, 1701 nt, Artificial Sequence; identical to SEQ ID NO: 130717
  derived and/or modified CDS sequence (opt3) from hemagglutinin__InfluenzaA__AFG31426

SEQ ID NO: 136495 - RNA, 1701 nt, Artificial Sequence; identical to SEQ ID NO: 130717
  derived and/or modified CDS sequence (opt3) from hemagglutinin__InfluenzaA__AFG31436

SEQ ID NO: 136496 - RNA, 1701 nt, Artificial Sequence; identical to SEQ ID NO: 130717
  derived and/or modified CDS sequence (opt3) from hemagglutinin__InfluenzaA__AFG31446

SEQ ID NO: 136497 - RNA, 1701 nt, Artificial Sequence; identical to SEQ ID NO: 130717
  derived and/or modified CDS sequence (opt3) from hemagglutinin__InfluenzaA__AFG31456

SEQ ID NO: 136498 - RNA, 1701 nt, Artificial Sequence; identical to SEQ ID NO: 130717
  derived and/or modified CDS sequence (opt3) from hemagglutinin__InfluenzaA__AFG31466

SEQ ID NO: 136499 - RNA, 1701 nt, Artificial Sequence; identical to SEQ ID NO: 131819
  derived and/or modified CDS sequence (opt3) from hemagglutinin__InfluenzaA__AFG31486

SEQ ID NO: 136500 - RNA, 1701 nt, Artificial Sequence; identical to SEQ ID NO: 130717
  derived and/or modified CDS sequence (opt3) from hemagglutinin__InfluenzaA__AFG31496

SEQ ID NO: 136501 - RNA, 1701 nt, Artificial Sequence; identical to SEQ ID NO: 130717
  derived and/or modified CDS sequence (opt3) from hemagglutinin__InfluenzaA__AFG31506

SEQ ID NO: 136502 - RNA, 1701 nt, Artificial Sequence; identical to SEQ ID NO: 130717
  derived and/or modified CDS sequence (opt3) from hemagglutinin__InfluenzaA__AFG31516

SEQ ID NO: 136503 - RNA, 1701 nt, Artificial Sequence; identical to SEQ ID NO: 130808
  derived and/or modified CDS sequence (opt3) from hemagglutinin__InfluenzaA__AFG31526

SEQ ID NO: 136504 - RNA, 1701 nt, Artificial Sequence; identical to SEQ ID NO: 130717
  derived and/or modified CDS sequence (opt3) from hemagglutinin__InfluenzaA__AFG31536

SEQ ID NO: 136505 - RNA, 1701 nt, Artificial Sequence; identical to SEQ ID NO: 133272
  derived and/or modified CDS sequence (opt3) from hemagglutinin__InfluenzaA__AFG31546

SEQ ID NO: 136506 - RNA, 1701 nt, Artificial Sequence; identical to SEQ ID NO: 133272
  derived and/or modified CDS sequence (opt3) from hemagglutinin__InfluenzaA__AFG31556

SEQ ID NO: 136507 - RNA, 1701 nt, Artificial Sequence; identical to SEQ ID NO: 130717
  derived and/or modified CDS sequence (opt3) from hemagglutinin__InfluenzaA__AFG31566

SEQ ID NO: 136508 - RNA, 1701 nt, Artificial Sequence; identical to SEQ ID NO: 130959
  derived and/or modified CDS sequence (opt3) from hemagglutinin__InfluenzaA__AFG31586

SEQ ID NO: 136509 - RNA, 1701 nt, Artificial Sequence; identical to SEQ ID NO: 130959
  derived and/or modified CDS sequence (opt3) from hemagglutinin__InfluenzaA__AFG31596

SEQ ID NO: 136510 - RNA, 1701 nt, Artificial Sequence; identical to SEQ ID NO: 130959
  derived and/or modified CDS sequence (opt3) from hemagglutinin__InfluenzaA__AFG31606

SEQ ID NO: 136511 - RNA, 1701 nt, Artificial Sequence; identical to SEQ ID NO: 130959
  derived and/or modified CDS sequence (opt3) from hemagglutinin__InfluenzaA__AFG31616

SEQ ID NO: 136512 - RNA, 1701 nt, Artificial Sequence; identical to SEQ ID NO: 130959
  derived and/or modified CDS sequence (opt3) from hemagglutinin__InfluenzaA__AFG31626

SEQ ID NO: 136513 - RNA, 1701 nt, Artificial Sequence; identical to SEQ ID NO: 130717
  derived and/or modified CDS sequence (opt3) from hemagglutinin__InfluenzaA__AFG31636

SEQ ID NO: 136514 - RNA, 1701 nt, Artificial Sequence; identical to SEQ ID NO: 130717
  derived and/or modified CDS sequence (opt3) from hemagglutinin__InfluenzaA__AFG31646

SEQ ID NO: 136515 - RNA, 1701 nt, Artificial Sequence; identical to SEQ ID NO: 131881
  derived and/or modified CDS sequence (opt3) from hemagglutinin__InfluenzaA__AFG31656

SEQ ID NO: 136516 - RNA, 1701 nt, Artificial Sequence; identical to SEQ ID NO: 131881
  derived and/or modified CDS sequence (opt3) from hemagglutinin__InfluenzaA__AFG31666

SEQ ID NO: 136517 - RNA, 1701 nt, Artificial Sequence
  derived and/or modified CDS sequence (opt3) from hemagglutinin__InfluenzaA__AFG71865
augaagaccaucauugcccugagcuacauauucugccucgcucuuggccaggaccugcccgggaacgauaauuccacagcaacuuuguguuuaggacaccaugccgugccuaacgguacgcuggucaaaaccaucacaaaugaccaaauugagguuacuaacgcgaccgaacuugugcagucuucaaguacaggcaagaucugcaauaacccacacaggauucucgaugggaucgacuguacccugauagaugcucuacugggagacccgcauugcgauguauuucagaaugagacuugggacuuguucguggaaagaagcaaagccuuuuccaacuguuaucccuacgaugucccugacuaugcaucucuccggucgcugguggccucaagcggcacacuggaguucaucaccgaagguuuuacguggacugggguuacccagaauggaggcaguaacgcuugcaagcgcggcccagggauuggauucuuuucccgacucaauugguuaacaaaaucugguagcacuuaccccgugcugaacgucaccaugccuaauaacgauaauuucgacaaacuuuauaucuggggcgugcaccauccauccacaaaccaagagcagaccucauuguacguacaggcaagugggcguguuacggugagcacuagaaggucucagcaaacaauuauccccaacauaggaucccggccuuggguccgcggccugucaagcagaauuaguaucuauuggaccauugugaagccaggugaugugcuagucaucaauucuaacgggaaucucaucgccccgaggggauacuuuaagaugcggacuggcaaguccagcauuaugcgcucggacgcucccauagacacauguaucucugagugcauuaccccuaacggcuccaucccaaaugauaaacccuuccagaacguuaauaagauaacguacggggccuguccuaaauaugugaagcagaacacccugaaacuugcgacaggaaugcgaaauguaccagaaaagcagacuagaggucuguuuggcgcaauugccggguucaucgagaacggaugggaaggcaugaucgacgguugguacggguuuaggcaccaaaauucagagggcaccggacaggcugccgauuugaagaguacacaggcagcuauugaccaaaucaacggcaaacucaaucgggugauugagaagacuaacgaaaaauuccaccagauagagaaggaguucagcgaagucgaagggcguauccaggaucuggagaaauauguggaggacaccaagauugauuuaugguccuacaaugccgaacugcucguugcgcuugagaaccagcauacaaucgaccugaccgauucugaaaugaacaaguuguuugagaaaacucgcagacaacuaagggaaaaugccgaggacaugggaaacgguugcuucaagaucuaucacaaaugugauaaugcaugcauugagagcauacggaacggcacguacgaccaugacguguaucgagaugaagcucugaauaaccgcuuucagaucaagggggucgagcucaaaucaggauacaaggacuggauucuguggaucaguuucgccauuuccugcuuucuucugugugugguauugcucggcuucaucaugugggcuugccagagagguaauauaagguguaacaucugcauuuga

SEQ ID NO: 136518 - RNA, 1701 nt, Artificial Sequence; identical to SEQ ID NO: 129604
  derived and/or modified CDS sequence (opt3) from hemagglutinin__InfluenzaA__AFG71876

SEQ ID NO: 136519 - RNA, 1701 nt, Artificial Sequence
  derived and/or modified CDS sequence (opt3) from hemagglutinin__InfluenzaA__AFG71898
augaagaccaucauugcccugagcuaccucuucugccuugcuuuuggccaggaccugcccgggaacgauaauuccacagcaacuuuguguuuaggacaccaugccgugccuaacgguacgcuggucaaaaccauaacagacgaucaaaucgagguuacuaaugcgaccgaacuugugcagucuucaaguacaggcaagauuugcaacaauccacacagaauccucgacgggauugauuguacccugaucgacgcucuacugggagauccgcauugcgacguauuccagaacgagacuugggauuuguuuguggaaaggagcaaagccuucuccaauuguuaucccuacgacgucccugauuaugcaucucuccggucgcugguggccucaagcggcacacuggaguuuaccacggaagguuucacuuggaccgggguuacacagaacggaggcaguaaugcuugcaagcgcggcccaggguccggauuuuucucucgacucaacugguuaacuaaaagcgguuccaccuaccccgugcugaaugucacaaugucaaacaaugacaacuuugauaaacuuuauauauggggcgugcaccauccuaguaccaaucaagagcagacgagcuuguacguacaggcaucugggcguguuacuguguccacaagaaggucacagcaaaccaucauuccaaacaucggaagccggcccuggguccgcggccugaguucuagaauuuccaucuauuggacuauagugaagccuggugacgugcuagucauuaacagcaaugggaaccucaucgccccaaggggauacuucaagaugcggacaggcaagucgucuauuaugcgcuccgacgcuccgaucgauaccuguguuucagagugcaucacgcccaauggcaguauuccuaacgacaaaccauuucagaaugugaacaagauaaccuacggggccugucccaaauauguaaagcagaauacacugaaacuugcgacuggaaugcgaaacgugccugaaaagcagaccagaggucuguucggcgcaaucgccggguuuauugagaauggaugggaaggcaugaucgaugguugguacggguucaggcaccaaaacagcgagggcacaggacaggcugccgacuugaaguccacucaggcagcuauagaucaaauuaauggcaaacucaaccgggucaucgagaagaccaaugaaaaauuccaccagaucgagaaggaauuuucugagguggaagggcguauucaggaccuggagaaauauguugaggauacaaagaucgacuuauggagcuacaacgccgaacugcucguggcgcuugagaaucagcauaccauugaucugacugacucagaaaugaacaaguuguucgagaaaacgcgcagacaacuaagggaaaacgccgaggauaugggaaaugguugcuuuaagauauaucacaaaugugacaacgcaugcaucgagaguauucggaauggcacauacgaccaugaugucuaucgagacgaagcucugaacaaucgcuuccagaucaaggggguggagcucaaauccggauacaaggauuggauccuguggauuagcuuugccauaucuugcuuccuucuguguguaguuuugcucggcuuuaucaugugggcuugccagagagguaacauuagguguaauaucugcauuuga

SEQ ID NO: 136520 - RNA, 1701 nt, Artificial Sequence
  derived and/or modified CDS sequence (opt3) from hemagglutinin__InfluenzaA__AFG71920
augaagaccaucauugcccugagcuacauauucugccucgcucuuggccaggaccugcccgggaacgauaauuccacagcaacuuuguguuuaggacaccaugccgugccuaacgguacgcuggucaaaaccaucacaaaugaccaaauugagguuacuaacgcgaccgaacuugugcagucuucaaguacaggcaagaucugcaauaacccacacaggauucucgaugggaucaauuguacccugauagacgcucuacugggagauccgcauugcgacguauuucaggaugagacuugggacuuguucguggaaagaagcaaagccuuuuccaacuguuaucccuacgaugucccugacuaugcaucucuccggucgcugaucgccucaagcggcacacuggaguucauuaccgaagguuuuacguggacuggggugacccagaauggaggcaguaacgcuugcaagcgcggcccaggguccggauucuuuucucgacucaauugguuaacaaaaagcgguuccacuuaccccguucugaacgugaccaugccuaauaacgauaauuucgacaaguuguauaucuggggcguccaccauccaucaacaaaccaagagcagaccaguuuguacgugcaggcaagcgggcguguaacgguuucuacuagaaggucccagcaaacaauuauccccaacauaggaucacggccuugggugcgcggccugagcaguagaauuucuaucuauuggaccauugucaagccaggugaugugcuagugaucaauuccaacgggaaucucaucgccccgaggggauacuuuaaaaugcggacuggcaagagcucgauuaugcgcucugacgcucccauagacacauguaucuccgagugcauuaccccuaacggcucaaucccaaaugauaaacccuuccagaacgucaauaagauaacguacggggccuguccuaaauauguuaagcagaacacccugaaacuugcgacaggaaugcgaaaugugccagaaaagcagacuagaggucuguuuggcgcaauugccggguucaucgagaacggaugggaaggcaugaucgacgguugguacggguuuaggcaccaaaauagugagggcaccggacaggcugccgaucuuaagagcacacaggcagcuauugaccaaaucaacggcaaacucaaucggguaauugagaagacuaacgaaaaauuccaccagauagagaaggaguucuccgaaguggaagggcguauccaggaucuggagaaauaugucgaggacaccaagauugauuuauggucuuacaaugccgaacugcucguggcgcuugagaaccagcauacaaucgaccugaccgauagcgaaaugaacaaguuguuugagaaaacucgcagacaacuaagggaaaaugccgaggacaugggaaacgguugcuucaagaucuaucacaaaugugauaaugcaugcauugagucaauacggaacggcacguacgaccaugacguuuaucgagaugaagcucugaauaaccgcuuucagaucaaggggguggagcucaaaaguggauacaaggacuggauucuguggaucuccuucgccauuagcugcuuucuucugugugucguguugcucggcuucaucaugugggcuugccagagagguaauauaagguguaacaucugcauuuga

SEQ ID NO: 136521 - RNA, 1701 nt, Artificial Sequence
  derived and/or modified CDS sequence (opt3) from hemagglutinin__InfluenzaA__AFG71931
augaagaccaucauugcccugagcuacauauucugccucgugaucggccaggaccuucccgggaacgaaaauuccacagcuacucuguguuugggacaccaugcagucccuaacgguacguuaguuaaaaccauuacaaaugaucaaaucgaagugacuaacgccaccgagcugguacagucuucaaguacaggcaagauuugcaauaacccacacagaauccuagacgggauagauuguacccucaucgacgcgcugcuuggagauccgcauugcgacggcuuucagaaugaaacuugggaucuguucguggagaggagcaaggcuuuuuccaacuguuaucccuacgacgucccugauuaugccucuuugcggucgcucguggcaucaagcgguacacuggaguucauuaccgagggguuuacguggacuggaguuacccagaauggcggcaguaacgccugcaaacgcgggccaggaaucgguuucuuuucccgacugaauuggcucacaaaaucuggcagcacuuaccccguguuaaacgucaccaugccuaauaacgacaauuucgauaagcuguauauuuggggagugcaccauccauccacaaaccaagagcagaccucacuuuacguacaggcuagugggcguguuacggugagcacuagaaggucucagcaaacaaucauacccaacauuggcucccggccuuggguccgcgguuugucaagcagaaucaguauuuauuggaccaucgugaagccaggggacgugcuggucaucaauucuaacggaaaucuaauugcaccgaggggcuacuuuaaaaugcggacuggcaaguccagcauaaugcgcucggaugcccccaucgacacauguauuucugaaugcaucaccccuaacggguccauaccaaaugacaaacccuuccagaacguuaauaagauuacguacggagcuuguccuaaauaugugaagcagaacacccucaagcuggccacagguaugcgaaauguaccagagaaacagacuagaggccuuuuuggggcgaucgcaggauucaucgaaaacggcugggaggguaugauugaugggugguacggcuuuaggcaccaaaauucagagggaaccggccaggccgcugaccugaagaguacacaggccgcaaucgaucaaauuaacgggaaauugaaucgggugauagaaaagacuaacgagaaauuccaccagaucgaaaaggaguucagcgaagucgagggacguauucaggaccucgagaaauauguggaagauaccaagaucgaccugugguccuacaaugcugaguuacugguugcccucgaaaaccagcauacaaucgaucuuaccgacucugagaugaacaagcuguuugagaaaacucgcagacaauugagggaaaaugcggaggauauggguaacggcugcuucaagauuuaucacaaaugugacaaugccugcauagaaagcauccggaacgggacguacgaucaugacguguaucgagacgaggcacuaaauaaccgcuuucagauuaagggagucgaacugaaaucaggcuacaaggauuggauccucuggauuaguuucgcuaucuccugcuuucugcuuugugugguacuguuggguuucauaaugugggccugccagagagggaauaucagguguaacauuugcaucuga

SEQ ID NO: 136522 - RNA, 1701 nt, Artificial Sequence
  derived and/or modified CDS sequence (opt3) from hemagglutinin__InfluenzaA__AFG71942
augaagaccaucauugcccugagcuacauauucuaucucgcucuuucccaggaccugcccggcaacgauaauucuaaagcaacauugugcuuagggcaccaugccgugccuaacggaacucuggucaagacgaucaccgacgaucaaacagagguuacuaaugcgaccgaacuugugcagucaaguagcacagguaaaauuuguaacaauccacacagaauccucgacggcauggauugcacccugauugacgcucuacugggggauccgcauugugacguauuucagaacgagacuugggauuuguucguggaaagguccaaggccuuuucuaauugcuaccccuaugacgucccugauuacgcaucgcuccggucacugguggccagcaguggaacacuggaguucaucaccgaaggcuuuacguggacugagguuacccagaacgguggguccauagcuuguaaacgcggaccagacucuggcuucuuuagccgacucaauugguuaacaaaguccggccguacuuaucccgugcugaacgucaccaugccuaauaacgauaauuucgacaaacuuuacaucuggggagugcaccauccaucaacagaccaagagcagaccaacuuguauguacagacgagugggagaguuacugugagcacaaggcggucucagcaaaccauuauccccaauauugguucccgcccuugggucagaggccugucaagcaggaucaguauauacuggacuauugugaaaccaggggaugugcuagucaucaacucuaacggaaaucucauugcaccgcggggcuacuuuaagaugcgcacagguaaauccagcaucaugcgaucggacgcccccaucgauaccugcauuucugaauguauaacgccuaacggguccaucccaaaugacaagcccuuccagaacguuaauaaaauuaccuauggagcuugcccuaaguacgugaagcagaacacacugaaacuugccacuggcaugagaaauguaccagagaagcagaccaggggccuguuuggggcgaucgcaggauucauagaaaacgguugggagggcaugauugaugggugguauggauuucggcaccaaaauucagagggcacaggucaggccgcugacuugaaaaguacucaggccgcaaucgaucaaaucaacgggaagcucaaucguauuaucgaaaagaccaacgagaaguuccaccagauugaaaaagaguucagcgaaguggagggccgcauacaggaccuggagaaguacgucgaagauacaaagaucgacuuaugguccuauaaugcugagcugcucguggcccuugaaaaccagcauaccauugaucugacugacucugagaugaauaaauuguuugaaaagacgagaaggcaacuacgggagaacgcggaggacaugggaaacggcuguuucaaaaucuaccacaagugcgauaaugccuguaucgaaagcauucgaaacgggacauaugaccaugauguuuaccgcgacgaggcacugaauaacagauuucagauaaaaggaguggaacucaagucagguuacaaggauuggauccuguggauuaguuucgcuaucuccugcuuucuucugugcgucguguugcucggcuucauuaugugggccugucagagggggaauauccggugcaacauauguaucuga

SEQ ID NO: 136523 - RNA, 1701 nt, Artificial Sequence
  derived and/or modified CDS sequence (opt3) from hemagglutinin__InfluenzaA__AFG71953
augaagaccaucauugcccugagcuacauauucugccucgugcuuggccaggaccugcccgggaacgauaaauccacagcuacuuuguguuuaggacaccaugcagucccuaaugguacgcugguuaagaccaucacaaacgaccaaauugaggugacuaaugccaccgaacugguacagucuucaaguacaggcaaaaucugcaacaauccacacaggauucucgaugggaucgacuguacccugauagaugcgcuucugggagacccgcauugcgauggcuuucagaacgagacuugggacuuguucguggaaagaagcaaggcuuuuuccaauuguuaucccuacgaugucccugacuaugccucucuccggucgcugguggcaucaagcgguacacuggaguucaucaccgaaggguuuacguggacuggaguuacccagaacggcggcaguaaugccugcaaacgcgggccaggauccgguuucuuuucucgacucaacugguuaacaaagagcggcuccacuuaccccgugcugaaugucaccaugccuaacaaugauaacuucgacaaacuuuauauuuggggagugcaccauccaucaacaaaucaagagcagaccaguuuguacguacaggcuagcgggcguguuacggugucuacuaagagaucccagcaaacaaucauucccaacaucggcucaaggccuuggguccgggguccaagcagucgcauaucuauuuauuggaccacugugaagccgggggauauccugauuaucaacuccaauggaaaccuaaucgcacccagaggcuacuuuaaaaugaggacaggcaagagcucgauuaugcggucugacgccccuauaggggcuuguaucuccgagugcauuaccccaaauggaucaauccccaacgacaaaccuuuccagaaugugaacaagauaacguacggugccuguccaaaguaugucaaacagaauacccucaagcuggcgacaggcaugcgcaacguucccgaaaaacagacucgagggcuuuuuggagcaauugccggcuucaucgagaaugguugggaagggaugaucgauggcugguacggauuuagacaccaaaacagugagggcaccgggcaggcugccgaccuaaagagcacacaggcagcuauugaucaaaucaauggaaaauugaacagggugauugagaagacuaaugaaaaauuccaccagauagagaaggaguucuccgaaguagaaggucggauccaggaccucgagaaguauguggaggauaccaaaauugaccuguggucuuacaacgccgaauuacuggucgcgcucgagaaucagcauacaaucgaucuuaccgacagcgaaaugaacaagcuguuugagaaaacucgucgccaauugagagaaaacgccgaggauaugggcaaugggugcuucaagaucuaucacaaaugugacaacgcaugcauuggaucaauaaggaauggcacguacgaucaugacguguaucgggacgaggcucuaaacaaucgauuucagaucaaggguguugaacugaagaguggguacaaagauuggauucucuggaucuccuucgccauuagcugcuuucugcuuugugugguccuguugggcgugaucaugugggcuugccagaagggaaacauacgcuguaauaucugcauuuga

SEQ ID NO: 136524 - RNA, 1701 nt, Artificial Sequence; identical to SEQ ID NO: 128353
  derived and/or modified CDS sequence (opt3) from hemagglutinin__InfluenzaA__AFG71975

SEQ ID NO: 136525 - RNA, 1701 nt, Artificial Sequence
  derived and/or modified CDS sequence (opt3) from hemagglutinin__InfluenzaA__AFG71996
augaagaccaucauugcccugagcuacauauucugccucgugcuuggccagaacuuucccgggaaugacaacuccacagcuacucuguguuugggacaccaugcagucccuaaugguacguuaguuaaaaccaucacaaacgaucaaauugaggugacuaaugccaccgaacugguacagucuucaaguacaggcaagaucugcaacaauccacacaggauucuagacgggaucgauuguacccucauagacgcgcugcuuggagauccgcauugcgacggcuuccagaacgagacuugggaucuguuuguggaaagaagcaaggcuuucuccaauuguuaucccuacgacgucccugauuaugccucuuugcggucgcucguggcaucaagcgguacacuggaguuuaucaacgaaggguucaccuggacgggaguuacucagaauggcggcaguaacgccugcaaacgcgggccagacauuggauuuuucucccgacugaauuggcucuacaaaucugguaacaccuaucccguguuaaaugucagcaugccuaacaacgauaauuuugacaagcuguacaucuggggcgugcaccauccauccacagaucaagagcagacuucacuuuauguacaggcuagugggcguguuaccgugagcacaaagagaucucagcaaaccauuauccccaacauaggauccaggccuuggguccggggcuugucaagccgcauuaguaucuacuggacgauugugaaaccaggugacauccuggugaucaauucuaacgggaaucuaauugcaccgagaggauacuucaagaugaggacuggcaaauccagcauaaugcggucggacgccucuaucggcacauguauuuccgagugcaucacccccaacgggucaauaccuaaugauaagccauuucagaacgucaauaaaauuacuuauggagcuugucccaaguacguuaagcagaacacacucaaacuggccaccgguaugcgcaaugugccugaaaagcagacgcgaggcaucuucggggcgaucgcaggauuuauugagaacggcugggaagguaugaucgacgggugguauggcuucagacaccaaaauagugagggaaccggccaggccgcugaucuuaaaagcacacaggccgcaauugaccaaauaaacgggaagcugaauaggaucauugagaaaacuaacgaaaaguuccaccagaucgagaaagaauuuuccgagguagaaggacggauccaggauuuggagaaguacguggaggacaccaagauugaucucuggucuuauaacgcugaacuguuagucgcccuggagaaucagcauacaauagaccucacugauagcgaaaugaacaaacuuuucgagaagacccgucgccaacugagagaaaaugcggaggacauggguaacggcugcuuuaaaaucuaccacaagugugauaaugccugcauugggucaaucaggaacggaacauaugaccaugacguguaccgggaugaggcauugaauaaccgauuccagauuaaaggcguugaacuaaagagugguuacaaggacuggauccuguggauauccuuugcuaucagcugcuuccuccugugugugguccuucugggguuuauuaugugggccugccagaaaggcaauauccgcuguaacauuugcaucuga

SEQ ID NO: 136526 - RNA, 1701 nt, Artificial Sequence
  derived and/or modified CDS sequence (opt3) from hemagglutinin__InfluenzaA__AFG72007
augaagaccaucauugcccugagcuacauauucugccucgugcuuggcagagacuuucccaggaacgauaauuccacagcuacucuguguuuggggcaccaugcagucccuaacggaacguuaguuaaaaccaucacaaaugaccagauugaggugacuaacgccaccgaacugguacaaucuucaaguacagguaagaucugcaauaacccacaccggauucuagauggcauggacuguacccucaucgaugcgcugcuuggggacccgcauugcgauggacugcagaauggcacuugggacuuguucguggagcgcagcaaggcuuuuuccaacuguuaucccuacgaugucccugacuaugccucucuccgaucgcugguggcaucaagcgguacacuggaguucauaaaugaaggguuuaccuggacgggaguuacucagaacggcggcaguaaugccugcaagcgugggccagauuccggauucuuuucuagacucaacugguuauacaaaagcgguaauaccuaucccgugcugaacgucacaaugccuaauaacgacaacuucgauaaacuuuacaucuggggcgugcaccauccauccacugaccaggaccaaaccucauuguauguacaggcuagugggaggguuacagugagcaccaagcggucucagcagacggucauucccaauaucggaccucgcccaugggugagaggccuguccucaaggauuagcaucuacuggacuauagugaaaccgggugauauucuacucaucaacaguaaugggaaccugauugcaccccggggauacuuuaagaugcgcacaggcaaaucuuccaucaugcgaagcgacgccccuaucggcaccuguauuucggaaugcauaacuccaaaugggucuauccccaacgauaagccuuuccaaaaugucaacaaaauuacauauggagcuuguccaaaguacguuaagcagaauacccuuaaacuggccacggguaugagaaacgugcccgagaagcagaccaggggcaucuuuggggcgauagcaggauucauugagaauggcugggaagguaugaucgacgggugguauggcuuucggcaccagaacuccgagggaacaggccaagccgcugauuugaaaucaacucaggccgcaaucgaccagauuaaugggaagcucaaccguguaaucgagaaaaccaaugaaaaguuccaccaaauugagaaagaguucagugaaguggaaggacgcauacaggaucuggagaaguacgucgaagacacaaagaucgauuuauggagcuauaacgcugagcugcucguggcccuugagaaccagcauacuauugaccugaccgauuccgaaaugaauaaauuguuugagaagacaagaaggcagcuacgggaaaacgcggaggacauggguaauggcugcuucaaaaucuaccaccgaugugacaacgccugcaucgggucuauucgcaauggaaccuaugaucaugacguuuacagagaugaagcacugaacaauagguuucaaauaaagggcguggagcucaaaagcgguuacaaggacuggauccuguggauuucauucgcuaucaguugcuuucuucugugugucguguugcucggguucauuaugugggccugccagaagggcaacauccgguguaauauaugcaucuga

SEQ ID NO: 136527 - RNA, 1701 nt, Artificial Sequence
  derived and/or modified CDS sequence (opt3) from hemagglutinin__InfluenzaA__AFG72029
augaagaccaucauugcccugagcuacauauucugccucguguuuggccagaaccuucccgggaaugacaacuccacagcuacucuguguuugggacaccaugcagucccuaaugguacguuaguuaaaaccaucacaaacgaucaaauugaggugacuaaugccaccgaacugguacagucuucaaguacaggcagaaucugcgacagcccacacaggauucuagaugggaagaacuguacccucaucgacgcgcugcuuggagauccgcauugcgacggcuuccagaaugagaaaugggaucuguuuguggaacgguccaaggcuuucucuaacuguuaucccuacgacgucccugauuaugccucguugcgcucacucauagcaagcagugguacucuggaguuuaucaaugaaggguucaacuggacaggagugacccaguccggcggcucuuacgccugcaaacgagggagcgacaauuccuuuuucucacgucugaacuggcucuaugagagugagagcaaguacccaguuuuaaaugugacgaugcccaacaauggaaacuuugauaagcuguauauuugggguguccaccauccuucuacugacaaagaacaaaccaaccuuuacgugagagcuuccggcaggguaacaguuucaacuaagcggagccagcagaccaucauuccaaauaucgggagucgccccugggugagaggauugucuuccaggauaagcauuuacuggacaaucgucaaaccuggcgauauucugcuaaucaacucgaaugguaaccucaucgcaccacggggguauuucaagauucgcaccggaaaaucuuccauaaugcgaucagacgccccgaucggcacguguaguagcgagugcauuacucccaauggcuccaucccuaacgacaagccauuucagaaugugaacaagauaacauacggggcuugucccaaauaugugaagcaaaauacccugaaacuugccacuggaaugagaaacgucccugaaaagcagacaagggguauuuucggcgcgaucgcaggguuuaucgagaauggaugggagggcaugguugaugguugguacggguuccggcaccagaacucugaaggcaccggacaggccgcugaccugaaaagcacgcaagccgcaauugaucagaucaauggcaaguugaaccgugugauugagaaaaccaaugaaaaguuccaccagauagagaaggaauuuucagagguagaggggcgcauccaagaccucgaaaaauauguggaggauacaaagauugaccuguggaguuacaacgcugaauuacuggucgcccucgagaaccagcauacuaucgaucuuaccgacuccgaaaugaauaaacuguucgagaagacaagaaggcaguugcgggagaacgcggaagauaugggaaaugguugcuuuaaaaucuaucacaagugugacaacgccugcauuggcagcauacgaaaugggacuuacgaucaugacguguaccgcgacgaggcacuaaacaauagauuccagaucaagggaguugaacugaaaucuggcuauaaggauuggauucucuggaucucauuugcuauuaguugcuuccugcuuugugugguccuguuggguuuuaucaugugggccugccaaaaagggaacauaagguguaauaucugcauuuga

SEQ ID NO: 136528 - RNA, 1701 nt, Artificial Sequence
  derived and/or modified CDS sequence (opt3) from hemagglutinin__InfluenzaA__AFG72040
augaagaccaucauugcccugagcuacauauucugccucguguuugcucagaaccuucccggcaaugacaacuccacagcaacucuguguuuggggcaccaugccgucccuaauggaacguuaguuaaaaccaucacaaacgaucaaauugaggugacuaaugcgaccgaacugguacagucuucaaguacagguagaaucugcgacagcccacacaggauucuagauggcaagaacuguacccucguggacgcucugcuuggggauccgcauugcgacggauuccagaaugagaaaugggaucuguuugucgaacgguccaaggccuucucuaacuguuaucccuacgacgugccugauuaugcaucguugcgcucacucguugccagcaguggcacucuggaguuuaucaaugaauccuucaacuggacaggugugacccagucugggggaagcuacgcuugcaaacgaggcuccgacaauucauuuuucagucgucugaacuggcucuaugagagcgagucuaaguacccagucuuaaaugugacgaugcccaacaauggcaacuuugauaagcuguauauauggggaguacaccauccuuccacugacaaagaacaaaccaaccuuuacguuagagcaucagggagggugacagucagcacuaagcggagucagcagaccaucauuccaaauaucgguucucgccccugggugagaggcuuguccagcaggauuucgaucuacuggacaauagugaaaccuggggauauucugcuaaucaacucuaauggaaaccucauugccccacggggcuauuucaagauccgcaccgguaaauccucaaucaugcgaagugacgcuccgauugggacguguagcuccgagugcauaacucccaauggaucuaucccuaacgacaagccauuucagaaugucaacaagauuacauacggcgccugucccaaauauguuaagcaaaauacccugaaacuugcgacuggcaugagaaacgugccugaaaagcagacaagggggaucuucggagcaauagccgguuuuauugagaauggcugggaggggaugguagauggaugguacggcuuccggcaccagaacagcgaagguaccgggcaggcugccgaccugaaaucaacgcaagcagcuaucgaucagaucaauggcaaguugaaccgugugauugagaaaaccaaugaaaaguuccaccagaucgagaaggaauuuagugaggucgagggacgcauucaagaccucgaaaaauauguggagaacacaaagauagaucugugguccuacaacgccgaauuacugguugcgcucgagaaucagcauacuaucgaccuuaccgauagcgaaaugaacaaacuguucgagaagacaagaaggcaguugcgggagaaugccgaagacaugggcaacgggugcuuuaaaauuuaucacaagugugauaaugcaugcaucggaucuauccgaaacgguacuuacgaccaugauguguaccgcgacgaggcucuaaauaacagauuccagauuaagggcgucgaacugaaaucaggguauaaggacuggauacucuggaucaguuuugccauuagcugcuuccugcuuugugugguacuguugggauuuaucaugugggcuugccaaaaaggcaauauuagguguaacaucugcauauga

SEQ ID NO: 136529 - RNA, 1701 nt, Artificial Sequence
  derived and/or modified CDS sequence (opt3) from hemagglutinin__InfluenzaA__AFG72051
augaagaccaucauugcccugagcuacauauucugccucguguuugcucagaaccuucccggcaaugacaacuccacagcaacucuguguuuggggcaccaugccgucccuaauggaacguuaguuaaaaccaucacaaacgaucaaauugaggugacuaaugcgaccgaacugguacagucuucaaguacagguagaaucugcgacagcccacacaggauucuagauggcaagaacuguacccucguggacgcucugcuuggggauccgcauugcgacggauuccagaaugagaaaugggaucuguuugucgaacgguccaaggccuucucuaacuguuaucccuacgacgugccugauuaugcaucguugcgcucacucguugccagcaguggcacucuggaguuuaucaaugaauccuucaacuggacaggugugacccagucugggggaagcuacgcuugcaaacgaggcuccgacaauucauuuuucagucgucugaacuggcucuaugagagcgagucuaaguacccagucuuaaaugugacgaugcccaacaauggcaacuuugauaagcuguauauauggggaguacaccauccuuccacugacaaagaacaaaccaaccuuuacguuagagcaucagggagggugacagucagcacuaagcggaaucagcagaccgugaucccaaacauugguagucgccccugggugagaggcuugucuuccaggaucagcauuuacuggacaaucgucaaaccuggggauauacugcuaauuaauucgaacggaaaucucaucgccccacggggcuauuucaagauucacaacgguaaaucuuccaucaugcgcucagacgcuccgaucgggaccuguaguagcgagugcauuacgcccaauggauccauaccuaacgacaagccauuucagaauguuaacaagaucacuuacggcgccugucccaaauaugugaagcaaaauacacugaaacuugcgaccggcaugcgaaacguaccugaaaagcagacuagagggauuuucggagcaaucgccgguuuuauagagaauggcugggaggggaugguggauggaugguacggcuucaggcaccggaacucugaagguacagggcaggcugccgaccugaaaagcacccaggcagcuauugaucaaaucaauggcaaguugaaccgugucaucgagaaaacgaacgaaaaguuccaucagauugagaaggaauuuucagagguggagggacgcauccaggaccucgaaaaauauguugaggauaccaagauugaccuguggaguuacaaugccgaauuacugguggcgcucgagaaccaacacacaauagaucuuacugacuccgaaaugaauaaacuguucgagaagaccagaaggcaguugcgggagaacgccgaagauaugggcaaugggugcuuuaaaaucuaucauaagugugacaacgcaugcauuggaagcauccgaaaugguacauacgaucacgacgucuaccgcgacgaggcucuaaacaauagauuccagaucaagggcguggaacugaaaucuggguauaaggauuggauucucuggauaucauuugccaucaguugcuuccugcuuuguguaguucuguugggauuuauuaugugggcuugccagaaaggcaacaucagguguaauauuugcaucuga

SEQ ID NO: 136530 - RNA, 1701 nt, Artificial Sequence
  derived and/or modified CDS sequence (opt3) from hemagglutinin__InfluenzaA__AFG72085
augaagaccaucauugcccugagcuacauauucugccucguguuugcucagaaacuucccggcaacgacaauuccacagcaacucuguguuuggggcaccaugccgucccuaacggaacguuaguuaagaccaucacaaaugaucaaauugaggugacuaacgcgaccgaacugguacagucuucaaguacagguagaaucugcgacagcccacacaggauucuagauggcaaaaauuguacccucaucgacgcucugcuuggggauccgcauugcgacggauuccagaacgagaagugggaucuguuuguggaacgguccaaagccuauucuaauuguuaccccuaugacgucccugauuacgcaucguugcgcucacucguggccagcaguggcacucuggaguucauaaacgaagacuuuaauuggaucgguguuacacaguccgggggaucuugcgcuuguaagcgaggcagcgugaacuccuucuuuucacgucugaauuggcuccacgagagugagcaaaaguauccagcauuaaacgucaccaugcccaauaacggcaaauucgauaagcuguacauuuggggagugcaucacccuagcacggacagagaacagacuaaucuuuauguaagggccucugggcggguuaccguguccacaaaacgcucacagcagacugucaucccaaacauugguagcagacccugggugaggggcuugaguucucggaucuccauauacuggaccauugugaagccuggggauauccugcuaauuaacagcaucggaaaucucaucgcuccacgcggcuacuuuaaaauucgaacagguaagucgucuauaaugagauccgacgccccgaucgggaccugcucaagugaguguauuacgcccaacggaagcaucccuaaugacaagccauuccaaaacgucaauaaaauaacuuauggcgcgugccccagguacguuaagcagaacacacugaaacuugcaaccggcaugcggaaugugccugaaaagcagacucgugggauuuuuggagccaucgcugguuucaucgagaacggcugggaggggaugguagauggaugguauggcuuucgccaccaaaauuccgaagguacagggcaggccgcagaccugaaaucuacccaggcugccauugaucagaucaacggcaaguugaauagacucauugagaaaacgaacgaaaaguuccaucaaauagagaaggaguucagcgaaguggagggaaggauccaggaccuggaaaaauacgucgaggauaccaagauugacuuauggucauauaaugcggaacugcucguggcccuugagaaccagcacacaaucgaucugacugacagugaaaugaauaaauuguuugagaagacccggaaacagcuacgagagaacgcagaagauaugggcaacggguguuucaagaucuaccauaagugcgacaaugcuugcauuggauccauacgcaacgguacauaugaucacgacguuuacagagacgaggcccugaauaacagguuucaaaucaaaggcguggaacucaagagcggguacaaagauuggauucuguggaucucuuucgcuauuucauguuuucuucugugcgucguguugcucggauucaucaugugggccugucagaagggcaauauacggugcaacaucuguauuuga

SEQ ID NO: 136531 - RNA, 1701 nt, Artificial Sequence
  derived and/or modified CDS sequence (opt3) from hemagglutinin__InfluenzaA__AFG72107
augaagaccaucauugcccugagcuacauauucugccucguguuugcucagaaacuucccggcaacgacaauuccacagcaacucuguguuuggggcaccaugccgucccuaacggaacguuaguuaagaccaucacaaaugaucaaauugaggugacuaacgcgaccgaacugguacagucuucaaguacagguagaaucugcgacagcccacacaggauucuagauggcaaaaauuguacccucaucgacgcucugcuuggggauccgcauugcgacggauuccagaacgagaagugggaucuguuuguggaacgguccaaagccuucucuaauuguuaucccuacgacgucccugauuaugcaucguugcgcucacucauagccagcaguggcacucuggaguuuaucaacgaagaguucaauuggacaggugugacccagaacgggggauccuacgcuugcaagcgaggcucuguuaauagcuuuuucucccgucugaacuggcuccacgagucagaauauaaguacccagcauuaaaugugacgaugcccaacaauggcagauuugacaaacuguauauuuggggaguccaucacccuaguacugauagggagcaaaccaaccuuuacgugcgggccagcgggcgcguaacaguuucuacuaagagaucccagcagaccgugaucccaaacauuggucccaggccuuggguccggggcuugucaagccgcaucaguauauacuggacaauugugaaaccaggggacauccugcuaauuaauucuaccggaaaccucaucgcuccgcgaggcuauuucaagauccacacggguaaauccagcauuaugagaucggaugcccccauagggacuuguucuuccgaaugcaucacaccuaauggaucaauuccaaacgacaagcccuuucagaaugugaacaagaucaccuacggcgcguguccuagguaugucaaacaaaauacucugaagcuggcaacaggcaugcggaacguuccagagaaacagacccgugggauauucggagccauugcugguuuuaucgagaauggcugggaagggaugguggacggaugguacggcuuccgccaucagaacagugaggguacggggcaggccgcagaucuuaagagcacccaagcugccaucgaccagauuaauggcaaauugaacagacucaucgaaaagacaaaugagaaauuccaccagauugaaaaggaguuuuccgagguagaaggaaggauacaagaucuggagaaguauguggaagacacuaaaaucgauuuauggucuuacaacgcggagcugcucgucgcccuugaaaaucagcauaccauugaccugacagauagcgagaugaacaaguuguucgagaaaacucggaagcagcuacgagaaaacgcagaggacaugggcaaugggugcuuuaaaaucuaucacaagugugauaacgcuugcaucggaucaauucgcaaugguaccuacgaccacgauguguacagagacgaagccguuaacaauagguuccagauaaagggcguggagcugaaaaguggguauaaggacuggauccucuggauuuccuuugcuaucagcugcuuccugcuuugugucauucuguugggauuuaucaugugggccugccaaaaaggcaacauacgguguaauaucugcauuuga

SEQ ID NO: 136532 - RNA, 1701 nt, Artificial Sequence
  derived and/or modified CDS sequence (opt3) from hemagglutinin__InfluenzaA__AFG72118
augaagaccaucauugcccugagcuacauauucugccucguguuugcucagaaacuucccggcaacgacaauuccacagcaacucuguguuuggggcaccaugccgucccuaacggaacguuaguuaagaccaucacaaaugaucaaauugaggugacuaacgcgaccgaacugguacaaaauucuucaacagguagaaucugcaacaguccacacaggauucuagacggcaaaaauuguacccucaucgaugcucugcuuggggacccgcauugcgauggauuccagaacaaggagugggaccuguuuguggaacggagcaaagccuauuccaauuguuaccccuaugaugucccugacuacgcaucuuugcgcucgcucguggccucaagcggcacucuggaguucauaaacgaagauuuuaauuggacagguguugcucagagugggggauccuaugcaugcaagcgaggcucugugaacagcuucuuuucccgucugaauuggcuccacgagucagaguacaaguauccagccuuaaacgucaccaugcccaauaacggcaaauucgacaagcuguacaucuggggagugcaucacccuaguacggauagagaacagacuaaccuuuacguaagggcuagcgggcggguuaccgugucuacaaaacgcucccagcagacugucauuccaaauaucgguucaagacccugggugaggggcuugagcagucggauuucuaucuauuggaccauagugaagccuggggacauucugcuaaucaacuccacaggaaaucucauugccccacgcggcuacuuuaaaauccgaaccgguaagagcucgaucaugagaucugaugcgccgauugggacguguuccucagagugcauaacucccaacggaaguaucccuaaugacaagccauuccagaacgucaauaggauuacauauggcgcauguccccgguacguuaaacaaaacacccugaaacuugccacuggcaugcguaaugugccugaacgccagacaagagggaucuuuggagcuauagccgguuucauugagaacggcugggaggggaugguagacggaugguauggcuuuaggcaccagaauagcgaagguaccgggcaggcagcugaucugaaguccacgcaagccgcgaucgaccagaucaacggcaaguugaaucggcucauugagaaaaccaacgaaaaguuccaucagaucgagaaagaguucucugaaguggagggacgcauucaagaucuggaaaaguacgucgaggacacaaagauagauuuauggagcuauaaugccgaacugcucguggcacuugagaaccagcacacuaucgaccugaccgauucagaaaugaacaaauuguuugagaagacacgaaaacagcuaagagagaaugcugaagacaugggcaacgggugcuucaagauuuaccauaaaugugauaaugccugcaucggaaguaucaggaacgguacuuacaaucacgacguuuaucgggaugaggcucugaacaaucgcuuucagauuaagggcguggaacucaaguccggguacaaagacuggauacuguggaucagcuucgccauuucuugcuuucuucugugugucguguugcucggauucaucaugugggcaugccaaaagggcaacauuagauguaauaucugcauauga

SEQ ID NO: 136533 - RNA, 1701 nt, Artificial Sequence
  derived and/or modified CDS sequence (opt3) from hemagglutinin__InfluenzaA__AFG72129
augaagaccaucauugcccugagcuacauauucugccucguguuugcucagaaacuucccggcaacgacaauuccacagcaacucuguguuuggggcaccaugccgucccuaacggaacguuaguuaagaccaucacaaaugaucaaauugaggugacuaacgcgaccgaacugguacagucuucaaguacagguagaaucugcgacagcccacacaggauucuagauggcaaaaauuguacccucaucgacgcucugcuuggggauccgcauugcgacggauuccagaacaaggagugggaucuguuuguggaacgguccaaagccuauucuaauuguuaccccuaugacgucccugauuacgcaucguugcgcucacucguggccagcaguggcacucuggaguucauaaacgaagacuuuaauuggacagguguugcucaguccgggggaucuuaugcaugcaagcgaggcagcgugaacuccuucuuuucacgucugaauuggcuccacgagagugaguacaaguauccagccuuaaacgucaccaugcccaauaacggcaaauucgauaagcuguacaucuggggagugcaucacccuagcacggacagagaacaaacuaaucuuuacguaagggcuucugggcggguuaccguguccacaaaacgcucacagcagacugucauuccaaacaucgguagcagacccugggugaggggcuugaguucugggauuuccaucuauuggaccauagugaagccuggagauauucugcuaaucaacagcacaggcaaucucauugccccacgggguuacuuuaaaauccgcaccgggaagucgucuaucaugcgauccgacgcgccgauuggaacguguucaagugagugcauaacucccaacggcagcaucccuaaugacaagccauuccagaacgucaauagaauuacauauggcgcaugucccagguacguuaaacaaaacacccugaaacuugccacugggaugcggaaugugccugaaaagcagacacguggaaucuuuggugcuauagccggcuucauugagaacgggugggagggaaugguagauggcugguaugguuuucgccaccaaaauuccgaagggaccggccaggcagcugaccugaagucuacgcaggccgcgaucaaccagaucaauggaaaauugaacagacucauugagaagaccaaugaaaaauuccaucagaucgagaaggaguucagcgaaguggagggcaggauucaagaucuggaaaaguacgucgaggacacaaaaauagauuuauggucauauaacgccgaacugcucguggcacuugagaaucagcacacuaucgaccugaccgauagugaaaugaacaaguuguuugagaaaacacggaagcagcuacgagagaacgcugaagacauggggaauggaugcuucaaaauuuaccauaagugugauaacgccugcaucgguuccauccgcaauggcacuuacgaccacgauguuuauagagacgaggcucugaacaauagguuucagauuaaggggguggaacucaaaagcggauacaaggacuggauacuguggaucucuuucgccauuucaugcuuucuucugugugucguguugcucggcuucaucaugugggcaugccaaaaagguaacauucgguguaauaucugcauauga

SEQ ID NO: 136534 - RNA, 1701 nt, Artificial Sequence
  derived and/or modified CDS sequence (opt3) from hemagglutinin__InfluenzaA__AFG72140
augaagaccaucauugcccugagcuacauauucugccucguguuugcucagaaacuucccggcaacgacaauuccacagcaacucuguguuuggggcaccaugccgucccuaacggaacguuaguuaagaccaucacaaaugaucaaauugaggugacuaacgcgaccgaacugguacagucuucaaguacagguagaaucugcgacagcccacacaggauucuagauggcaaaaauuguacccucaucgacgcucugcuuggggauccgcauugcgacggauuccagaacaaggagugggaucuguuuguggaacgguccaaagccuauucuaauuguuaccccuaugacgucccugauuacgcaucguugcgcucacucguggccagcaguggcacucuggaguucauaaacgaagacuuuaauuggacagguguugcucaguccgggggaucuuaugcaugcaagcgaggcagcgugaacuccuucuuuucacgucugaauuggcuccacgagagugaguacaaguauccagccuuaaacgucaccaugcccaauaacggcaaauucgauaagcuguacaucuggggagugcaucacccuagcacggacagagaacaaacuaaucuuuacguaagggcuuuggggcggguuaccgugucuacaaaacgcucccagcagacugucauuccaaacaucgguucaagacccugggugaggggccugagcagucggauuucuaucuauuggaccauagugaagccuggggauauucuacucaucaacuccacaggaaaucugauugccccacgcggcuacuuuaaaauccgaaccgguaagagcucgaucaugagaucugacgcgccgauugggacguguuccucagagugcauaacucccaacggaaguaucccuaauaacaagccauuccagaaugucaacaggauuacauauggcgcauguccccgguacguuaaacaaaauacccuuaagcuggccacuggcaugcguaacgugccugaaaaacagacacgcgggaucuuuggagcuauagccgguuucauugagaauggcugggaggggaugguagacggaugguauggcuuuagacaccagaacagcgaagguaccgggcaggcagcugauuugaaguccacgcaagccgcgaucgaccagaucaauggcaaacucaacaggcugauugagaagaccaaugaaaaauuccaucagaucgagaaggaguucucugaaguggagggacggauucaagauuuagaaaaguacgucgaggacacaaaaauagaucuguggagcuauaacgccgaacuccuuguggcacuggagaaucagcacacuaucgacuugaccgauucagaaaugaacaagcuauuugagaaaacacgaaagcagcugcgcgagaacgcugaagacaugggcaaugggugcuucaaaauuuaccauaagugugauaacgccugcaucggaaguaucagaaaugguacuuacgaccacgauguuuauagggacgaggcucucaacaaucgguuucagauuaagggcguggaacugaaauccggguacaaggacuggauacuuuggaucagcuucgccauuucuugcuuucuguugugugucgugcuccugggauucaucaugugggcaugccaaaaaggcaacauucgcuguaauaucugcauauga

SEQ ID NO: 136535 - RNA, 1701 nt, Artificial Sequence
  derived and/or modified CDS sequence (opt3) from hemagglutinin__InfluenzaA__AFG72151
augaagaccaucauugcccugagcuacauacucugccuuguguucgcucagaaacugcccggcaacgacaauuccacagcaacuuuguguuuagggcaccaugccgucccuaacggaacgcugguuaagaccaucacaaaugaucaaauugaggugacuaacgcgaccgaacuuguacagucuucaaguacagguagaaucugcgacagcccacacaggauucucgauggcaaaaauuguacccugaucgacgcucuacugggggauccgcauugcgacggauuucagaacaaggagugggauuuguucguggaacgguccaaagccuauucuaauuguuaccccuaugacgucccugauuacgcaucgcuccgcucacugguggccagcaguggcacucuggaguuuacaaacgaagacuucaauuggaccgguguugcucaguccggggagucuuaugcaugcaagcgaggaagcgugaaguccuuuuucucacgucucaacugguuacacgagagugauuacaaauauccagcccugaaugucacgaugcccaacaauggcaaguuugacaaacuuuacauauggggcgugcaucacccuagcacugauagagaacaaaccucuuuguacguaagggcuuccgggcggguuacagugucaacuaagcgcagccagcagaccgucaucccaaacauuggaaguagacccugggugaggggucugucuucccggaucagcauuuauuggacaaucgugaaaccuggcgacauacuacucauuaauucgaccgggaaccugaucgccccacgcggauacuucaagauucgaacgggcaagucuuccaucaugagaucagacgcgccgaucgguacuuguaguagcgagugcauuacacccaacggguccauaccuaaugauaaaccauuucagaacgucaauaggaucaccuauggagcauguccccgguacguuaagcaaaacacucuuaaacuggccacaggcaugcguaaugugccugaaaagcagacccgcggcauuuucggggcuaucgccggauuuauagagaacgguugggagggcaugguagacgggugguauggauucagacaccaaaauucugaaggcacgggucaggcagcugauuugaaaagcacccaggccgcgauugaccagaucaacgggaagcucaauaggcugaucgagaaaacaaacgaaaaguuucaucagauugagaaggaguucucagaaguggagggccggauccaagauuuagaaaaauacgucgaggacacuaagauugaucuguggaguuauaaugccgaacuccuuguggcacuggagaaccagcacaccauagacuugacagauuccgaaaugaauaaacuauucgagaagacucgaaaacagcugcgcgagaacgcugaagacaugggaaauggcugcuuuaagaucuaccauaagugugauaacgccugcauugggagcaucagaaacggaaccuacgaccacgacguuuauagggaugaggcucucaauaaccgguuccagaucaaagguguggaacugaagucuggcuacaaagacuggauucuuuggauaucauuugccaucaguugcuuccuguugugugucgugcuccugggguuuauuaugugggcaugccaaaagggaaauauccgcuguaacauuugcaucuga

SEQ ID NO: 136536 - RNA, 1701 nt, Artificial Sequence
  derived and/or modified CDS sequence (opt3) from hemagglutinin__InfluenzaA__AFG72184
augaagaccaucauugcccugagcuacauacucugccuuguguucgcucagaaacugcccggcaacgacaauuccacagcaacuuuguguuuagggcaccaugccgucccuaacggaacgcugguuaagaccaucacaaaugaucaaauugaggugacuaacgcgaccgaacuuguacagucuucaaguacagguagaaucugcgacagcccacacaggauucucgauggcaaaaauuguacccugaucgacgcucuacugggggauccgcauugcgacgauuuucagaacaaggagugggacuuguucguggaacgguccaaagccuauucuaauuguuaccccuaugaugucccugacuacgcaucgcuccgcucacugguggccagcaguggaacucuggaguuuauaaacgaagauuucaauuggacaggcguugcucaguccggugagucuuaugcaugcaagcgagggagcgugaaguccuuuuucucacgucucaacugguuacacgagagugaauacaaauauccagcccugaaugucaccaugcccaacaaugacaaguuugauaaacuuuacaucuggggagugcaucacccuagcacggagagagaacaaacuucuuuguacauuagggcuuccggccggguaaccguuucaacaaagcgcagccagcagacugugaucccaaacauuggcaguagacccugggucagggggcugucuucccggaucagcauauauuggaccauugugaaaccuggagacauccuacucauuaauucgacagguaaccugaucgccccacgcggcuacuucaagauccgaaccgggaagucuuccauuaugagaucagacgcgccgauaggaacguguaguagcgagugcaucacucccaacggcuccauuccuaaugauaaaccauuucagaacgugaauaggaucacauauggugcauguccccgguacgucaagcaaaacacccuuaaacuggccacugggaugcguaauguuccugagaagcagacacgcggaauauucggcgcuauugccggcuuuaucgaaaacgggugggagggaaugguggacgguugguauggcuucagacaccaaaauucugaagggaccggacaggcagcugauuugaaaagcacgcaggccgcgaucgaccagauuaacggcaagcucaauaggcugaucgagaaaaccaacgaaaaguuucaucagauugagaaggaguucucagaaguagagggucggauacaagauuuagaaaaauacguggaggacacaaagaucgaucuguggaguuauaaugccgaacuccuugucgcacuggagaaccagcacacuauugacuugaccgauuccgagaugaauaaacuauucgaaaagacacgaaaacagcugcgcgagaacgcugaagacauggggaauggcugcuuuaagaucuaccauaagugugauaacgccugcaucggaagcauuagaaacggcacuuacgaccacgacguguauagggaugaggcucucaauaaccgguuccagauaaaagggguugaacugaagucuggauacaaagacuggauccuuuggauuucauuugccaucaguugcuuccuguugugugugguccuccuggguuuuauuaugugggcaugccaaaagggcaauauccgcuguaacauaugcaucuga

SEQ ID NO: 136537 - RNA, 1701 nt, Artificial Sequence; identical to SEQ ID NO: 136535
  derived and/or modified CDS sequence (opt3) from hemagglutinin__InfluenzaA__AFG72195

SEQ ID NO: 136538 - RNA, 1701 nt, Artificial Sequence
  derived and/or modified CDS sequence (opt3) from hemagglutinin__InfluenzaA__AFG72206
augaagaccaucauugcccugagcuacauacucugccuuguguucgcucagaaacugcccggcaacgacaauuccacagcaacuuuguguuuagggcaccaugccgucccuaacggaacgcugguuaagaccaucacaaaugaucaaauugaggugacuaacgcgaccgaacuuguacagucuucaaguacagguaaaaucugcgacagcccacacaggauucucgauggcaagaauuguacccugaucgacgcucuacugggggauccgcauugcgacggauuucagaacaaagagugggauuuguucguggaaagauccaaggccuauucuaauuguuaccccuaugacgucccugauuacgcaucgcuccggucacugguggccagcaguggcacucuggaguuuauaaacgaagacuucaauuggacagguguugcucaguccggggagucuuaugcaugcaagcgcggaagcgugaaauccuuuuucucacgacucaacugguuacacgagagugauuacaaguauccagcccugaaugucaccaugcccaacaauggcaaauuugacaaguuguacaucuggggcgugcaucacccuagcacggaucgugaacaaacuucuuuguacauuagagcuuccgggaggguaaccguuucaacaaaacggagccagcagacugugaucccaaacauuggaagucgccccugggucagaggucugucuuccaggaucagcauauauuggaccauugugaagccuggcgacauccuacucauuaauucgacagggaaccugaucgccccacggggauacuucaagauccgcaccggcaaaucuuccauuaugcgaucagacgcgccgauagguacguguaguagcgagugcaucacucccaacggguccauuccuaaugauaagccauuucagaacgugaauagaaucacauauggagcaugucccagguacgucaaacaaaacacccuuaagcuggccacuggcaugcggaauguuccugaaaaacagacacguggcauauucggggcuauugccggauuuaucgagaacgguugggagggcaugguggacgggugguauggauuccgccaccaaaauucugaaggcaccggucaggcagcugaucuuaagagcacgcaggccgcgaucgaccagauuaacgggaaacucaauagacugaucgagaagaccaacgaaaaguuucaucagauugagaaagaguucucagaaguagagggcaggauacaagauuuagaaaaguacguggaggacacaaaaaucgaucuguggaguuauaaugccgaacuccuugucgcacuggagaaccagcacacuauugacuugaccgauuccgaaaugaauaagcuauucgagaaaacacggaagcagcugcgagagaacgcugaagacaugggaaauggcugcuuuaagaucuaccauaaaugugauaacgccugcaucgggagcauucgcaacggaacuuacgaccacgacguguauagagaugaggcucucaauaacagguuccagauaaaggguguugaacugaaaucuggcuacaaggacuggauccuuuggauuucauuugccaucaguugcuuccuguugugugugguccuccugggguuuauuaugugggcaugccaaaaaggaaauauccgguguaacauaugcaucuga

SEQ ID NO: 136539 - RNA, 1701 nt, Artificial Sequence
  derived and/or modified CDS sequence (opt3) from hemagglutinin__InfluenzaA__AFG72217
augaagaccaucauugcccugagcuacauacucugccuuguguucgcucagaaacugcccggcaacgacaauuccacagcaacuuuguguuuagggcaccaugccgucccuaacggaacgcugguuaagaccaucacaaaugaucaaauugaggugacuaacgcgaccgaacuuguacagucuucaaguacagguagaaucugcgacagcccacacaggauucucgauggcaaaaauuguacccugaucgacgcucuacugggggauccgcauugcgacggauuucagaacaaggagugggauuuguucguggaacgguccaaagccuauucuaauuguuaccccuaugacgucccugauuacgcaucgcuccgcucacugguggccagcaguggcacucuggaguuuauaaacgaagacuucaauuggacagguguugcucaggaugggggauccuaugcaugcaagcgaggcucugugaacagcuuuuucucccgucucaauugguuacacaagcuggaguacaaauauccagcccuuaacgucaccaugcccaauaacggcaaguuugacaaauuguacaucuggggagugcaucacccuucaacggauagugaccaaacuagccuguacguaagagcuucugggaggguuaccguguccacaaagcggucacagcagacugucaccccaaauauugguagccgccccugggugagaggccuaaguucuaggaucuccauuuauuggacaaucgugaaaccuggggacauacuccugauuagcucgaccggaaaccuuaucgccccacggggcuacuucaagauucgcaacgguaagucuuccaucaugcgaucagaugcgccgaucgggaauuguaguagcgagugcauuacgcccaacggauccauaccuaaugacaaaccauuucagaacgucaauagaaucacuuauggcgcaugucccagguacguuaagcaaaacacacugaaauuggccaccggcaugcggaaugugccugaaaagcagacucgugggauuuucggagcuaucgccgguuuuauagagaacggcugggaagggaugguagauggaugguauggcuuccgccaccaaaauucugaggguacagggcaggcagcugacauuaaaagcacccaggccgcgaucgaucagaucaacggcaagcucaauagacugauugagaaaacgaacgaaaaguuucaucagaucgagaaggaguucucagaaguggaaggaaggauucaagacuuagagaaauacgucgaggauaccaagauagaccuguggaguuauaaugccgaacuccuuguggcacuggagaaccagcacacaaucgauuugacugacuccgaaaugaauaaacuauucgagaagacccggaaacagcugcgagaaaacgcugaggauaugggcaacgggugcuuuaagauuuaccauaagugugacaaugccugcaucggaagcauccgcaacgguacauacgaccacgauguuuauagagacgaggcucucaauaacagguuccagauuaaaggcguggaacugaagucuggguacaaagaucuuauacuguggaucucauuugccauuaguugcuucuugcucugugucgugcuguuaggauuuaucaugugggcaugccaaaagggcaauauucgguguaacaucugcauauga

SEQ ID NO: 136540 - RNA, 1701 nt, Artificial Sequence
  derived and/or modified CDS sequence (opt3) from hemagglutinin__InfluenzaA__AFG72228
augaagaccaucauugcccugagcuacauacucugccuuguguucgcucagaaacugcccggcaacgacaauuccacagcaacuuuguguuuagggcaccaugccgucccuaacggaacgcugguuaagaccaucacaaaugaucaaauugaggugacuaacgcgaccgaacuuguacagucuucaaguacagguagaaucugcgacagcccacacaggauucucgauggcaaaaauuguacccugaucgacgcucuacugggggauccgcauugcgacggauuucagaacaaggagugggauuuguucguggaacgguccaaagccuauucuaauuguuaccccuaugacgucccugauuacgcaucgcuccgcucacugguggccagcaguggcacucuggaguuuacaaacgaagacuucaauuggaccgguguugcucaguccggggagucuuaugcaugcaagcgaggaagcgugaaguccuuuuucucacgucucaacugguuacacgagagugauuacaaauauccagaacugaaugucacgaugcccaacaauggcaaguuugacaaacuuuacauauggggcgugcaucacccuagcacugauagagagcaaaccucuuuguacguaagggccuccgggcggguuacagugucaacuaagcgcagccagcagaccgucaucccaaacauuggaaguagacccugggugaggggucugucuucccggaucagcauuuauuggacaaucgugaaaccuggcgacauacuacucauuaauucgaccgggaaccugaucgcuccacgcggauacuucaagauucgaacgggcaagucuuccaucaugagaucagacgccccgaucgguacuuguaguagcgaaugcauuacacccaacggguccauaccuaaugauaaaccauuucagaacgucaauaggaucaccuauggagcguguccccgguacguuaagcaaaacacucuuaaacuggcaacaggcaugcguaaugugccugagaagcagacccgcggcauuuucggggccaucgcuggauuuauagagaacgguugggaaggcaugguagacgggugguauggauucagacaccaaaauucugagggcacgggucaggccgcagauuugaaaagcacccaggcugccauugaccagaucaacgggaagcucaauaggcugaucgagaaaacaaacgaaaaguuucaucagauugaaaaggaguucucagagguggaaggccggauccaagauuuagagaaauacgucgaagacacuaagauugaucuguggaguuauaaugcggagcuccuuguggcccuggaaaaccagcacaccauagacuugacagauuccgagaugaauaaacuauucgagaagacucgaaaacagcugcgcgaaaacgcagaggacaugggaaauggcugcuuuaagaucuaccauaagugugauaacgcuugcauugggagcaucagaaacggaaccuacgaccacgacguuuauagggaugaagcccucaauaaccgguuccagaucaaagguguggagcugaagucuggcuacaaagacuggauucuuuggauaucauuugcuaucaguugcuuccuguugugugucgugcuccugggguuuauuaugugggccugccaaaagggaaauauccgcuguaacauuugcaucuga

SEQ ID NO: 136541 - RNA, 1701 nt, Artificial Sequence
  derived and/or modified CDS sequence (opt3) from hemagglutinin__InfluenzaA__AFG72239
augaagaccaucauugcccugagcuacauacucugccuugugcuggcucagaaauugcccggcuccgacaacucuacagcaacuuuaugucuggggcaccaugccgucccuaauggaacgcuaguuaagaccaucacaaacgaucaaauugaggugacuaaugcgaccgaacucguacagucaaguacaaccgguagaaucugcgacagcccacacaggauucuggauggcaaaaacuguacucuuaucgacgcucuguugggggauccgcauugcgacggauuccagaauaaggagugggaucucuuuguggaacgguccaaagccuauucuaacuguuaccccuaugacgucccugauuacgcaucgcugcgcucacugguggccagcaguggcacacucgaguucaccaaugaagacuuuaacuggacggguguugcucaguccggggagucuuaugcaugcaagcgaggaagcgugaaguccuucuuuucacguuuaaauuggcugcacgagagugauuacaaauauccagcccuuaacgucacuaugcccaauaacggcaaguucgacaaauuguacauauggggcgugcaucacccuagcaccgauagagaacaaacaucucuguacguaagggcuuccgggcggguuacugugucaaccaagcgcagccagcagacagucaucccaaauauuggaaguagacccugggugaggggucuaucuucccggaucagcauuuauuggaccaucgugaaaccuggcgacauacuccugauuaacucgacggggaaucuuaucgccccacgcggauacuuuaagauucgaacuggcaagucuuccaucaugagaucagacgcgccgaucgguacauguaguagcgagugcauuacccccaacggguccauaccuaacgauaaaccauuccagaaugucaacaggaucacuuauggagcauguccccgguacguuaagcaaaauacacugaaauuggccaccggcaugcguaacgugccugaaaagcagacgcgcggcauuuuuggggcuaucgccggauucauagagaaugguugggagggcaugguagacgggugguauggauuuagacaccagaacucugaaggcaccggucaggcagcugaucucaaaagcacacaagccgcgauugaccagaucaaugggaagcugaacagguuaaucgagaaaacuaaugaaaaguuccaucagauugagaaggaauuuucagagguggagggccggauccaagaucuggaaaaauacgucgaggacaccaagauugaucucuggaguuauaacgccgaacuucugguggcauuggagaaucagcacacaauagaccuaacugauuccgaaaugaacaaacuguucgagaagacccgaaaacagcuccgcgagaaugcugaagacaugggaaacggcugcuucaagaucuaccauaagugugauaaugccugcauugggagcaucagaaacggaacauacgaccacgacguuuauagggaugaggcucugaacaaucgguuucagaucaaagguguggaacuuaagucuggcuacaaagacuggauucuguggauaucauucgccaucaguugcuuuuugcucugugucgugcuguuaggguucauuaugugggcaugccaaaagggaaacauccgcuguaauauuugcaucuga

SEQ ID NO: 136542 - RNA, 1701 nt, Artificial Sequence; identical to SEQ ID NO: 136535
  derived and/or modified CDS sequence (opt3) from hemagglutinin__InfluenzaA__AFG72272

SEQ ID NO: 136543 - RNA, 1701 nt, Artificial Sequence
  derived and/or modified CDS sequence (opt3) from hemagglutinin__InfluenzaA__AFG72316
augaagaccaucauugcccugagccacauacucugccuuguguucgcucagaaacugcccggcaacgacaauuccacagcaacuuuguguuuagggcaucacgccgucccuaacggaacgcugguuaagaccaucacaaaugaucaaauugaggugacuaacgcgaccgaacuuguacagucuucaaguacagguagaaucugcgacagcccacauaggauucucgauggcaaaaauuguacccugaucgacgcucuacugggggauccgcacugcgacggauuucagaacaaggagugggauuuguucguggaacgguccaaagccuacucuaauuguuaucccuacgacgucccugauuaugcaucgcuccgcucacugguggccagcaguggcacucuggaguuuauaaacgaagacuucaauuggacagguguugcucaggaugggggauccuacgcaugcaagcgaggcucugugaacagcuuuuucucccgucucaauugguuacauaagcuggaguauaaauacccagcccuuaacgucaccaugcccaauaacggcaaguuugacaaauuguauaucuggggagugcaccacccuucaacggauagugaccaaacuagccuguacguaagagcuucugggaggguuaccguguccacaaagcggucacagcagacugucaccccaaauauugguagccgccccugggugagaggccuaaguucuaggaucuccauuuacuggacaaucgugaaaccuggggacauacuccugauuaacagcaccggaaaccuuaucgccccacggggcuauuucaagauucgcaaugguaagucgucuaucaugcgauccgaugucccgaucgggaacuguucaagugagugcauuacgcccaauggaagcauaccuaacgacaaaccauuucagaauguuaacagaaucacuuacggcgcgugucccagguaugugaagcaaaauacacugaaauuggcaaccggcaugcggaacguaccugaaaagcagacucgugggauuuucggagccaucgcugguuuuauagagaauggcugggaagggaugguggauggaugguacggcuuccgccaucagaacuccgaggguacagggcaggccgcagaccucaaaucuacccaagcugccauugaucagaucaauggcaagcugaacagauuaaucgagaaaacgaaugaaaaguuucaccagauugagaaggaguucagcgaagucgaaggaaggauccaagaccuggagaaauauguggaggauaccaagauugaccucuggucauacaacgcggaacuucugguugccuuggagaaucagcauacaauagaucuaacugacagugaaaugaacaaacuguucgagaagacccggaaacagcuccgagaaaacgcagaggauaugggcaaugggugcuuuaagaucuaucacaagugugacaacgcuugcauuggauccauccgcaaugguacauacgaccacgauguguacagagacgaggcccugaacaauagguuccagaucaaaggcgucgaacuuaagagcggguauaaagauuggauucuguggauaucuuuugcuaucucaugcuucuugcucugugugguacuguuaggauuuauuaugugggccugccaaaagggcaacauccgguguaauauuugcaucuga

SEQ ID NO: 136544 - RNA, 1701 nt, Artificial Sequence
  derived and/or modified CDS sequence (opt3) from hemagglutinin__InfluenzaA__AFG72339
augaagaccaucauugcccugagcuacauacucugccuuguguucgcucagaaacugcccggcaacgacaauuccacagcaacuuuguguuuagggcaccaugccgucccuaacggaacgcugguuaagaccaucacaaaugaucaaauugaggugacuaacgcgaccgaacuuguacagucuucaaguacagguagaaucugcgacagcccacacaggauucucgauggcaaaaauuguacccugaucgacgcucuacugggggauccgcauugcgacggauuucagaacaaggagugggauuuguucguggaacgguccaaagccuauucuaauuguuaccccuaugacgucccugauuacgugucgcuccgcucacugguugcaagcaguggcacucuggaguuuauaaacgaagacuucaauuggacagguguggcccaggaugggggauccuauaccugcaagcgaggcucugucaacagcuuuuucucccgucucaauugguuacacaagucagaguacaaauauccagcucugaacgugacgaugcccaauaacggcaaguuugacaaacuuuacaucuggggaguacaucacccuaguacugauagcgaccaaaccucuuuguacguuagagcauccgggagggugacagucucaacuaagcggagccagcagaccgugacaccaaauauugguagucgccccugggugagaggccugucuuccaggaucagcauuuauuggaccaucgucaaaccuggggacauacuacucauuaacucgacgggaaaccugaucgccccacggggcuacuucaagauucgcaaugguaagucuuccaucaugcgaucagaugcuccgaucgggacuuguaguagcgagugcauuacacccaacggauccauaccuaaugacaaaccauuucagaacguuaauagaaucaccuauggcgccugucccagguacgugaagcaaaacacucuuaaacuggcgacaggcaugcggaauguaccugaaaagcagacccgugggauuuucggagcaaucgccgguuuuauagagaacggcugggaagggaugguggauggaugguauggcuuccgccaccaaaauucugaggguacggggcaggcugccgacuugaaaagcacccaggcagcuauugaucagaucaacggcaagcucaauagacugaucgagaaaacaaacgaaaaguuucaucagauugagaaggaguucucagaagucgaaggaaggauccaagacuuagagaaauacguggaggauacuaagauugaccuguggaguuauaaugccgaacuccuuguugcgcuggagaaccagcacaccauagauuugacagacuccgaaaugaauaaacuauucgagaagacucggaaacagcugcgagaaaacgccgaggauaugggcaacgggugcuuuaagaucuaccauaagugugacaaugcaugcauuggaagcauccgcaacgguaccuacgaccacgauguguauagagacgaggcucucaauaacagguuccagaucaaaggcgucgaacugaagucuggguacaaagauuggauucuuuggauaucauuugccaucaguugcuuccuguugugugugguacuccugggauuuauuaugugggcuugccaaaagggcaauauccgguguaacauuugcaucuga

SEQ ID NO: 136545 - RNA, 1701 nt, Artificial Sequence
  derived and/or modified CDS sequence (opt3) from hemagglutinin__InfluenzaA__AFG72350
augaagaccaucauugcccugagcuacauacucugccuuguguucgcucagaaacugcccggcaacgacaauuccacagcaacuuuguguuuagggcaccaugccgucccuaacggaacgcugguuaagaccaucacaaaugaucaaauugaggugacuaacgcgaccgaacuuguacagucuucaaguacagguagaaucugcgacagcccacacaggauucucgauggcaaaaauuguacccugaucgacgcucuacugggggauccgcauugcgacggauuucagaacaaggagugggauuuguucguggaacgguccaaagccuauucuaauuguuaccccuaugacgucccugauuacgugucgcuccgcucacugguugcaagcaguggcacucuggaguuuauaaacgaagacuucaauuggacagguguggcccaggaugggcgauccuaugcuugcaagcguggaucugucaacagcuuuuucuccagacucaauugguuacacaagucagaguacaaauauccagcacugaacgugaccaugcccaauaacggcaaguuugacaaacuuuacaucuggggcguacaucacccuaguacggauagcgaccaaacuucuuuguacguuagggccuccgggcgggugaccgucucaacaaagcgcagccagcagacugugaccccaaauauuggaaguagacccugggugaggggucugucuucccggaucagcauuuauuggacaaucgucaaaccuggcgacauacuacucauuaacucgaccgggaaccugaucgcuccacgcggauacuucaagauucgaaauggcaagucuuccaucaugagaucagaugccccgaucgguauuuguaguagcgagugcauaacgcccaacggguccaucccuaaugacaaaccauuucagaacguuaauaggauuacuuauggagcguguccccgguacgugaagcaaaacacacuuaaacuggcaaccggcaugcguaauguaccugaaaagcagacucgcggcaucuucggggccauagcuggauuuauugagaacgguugggaaggcaugguggaugggugguauggauucagacaccaaaauucugagggcacaggucaggccgcagacuugaaaagcacccaggcugccaucgaucagaucaacgggaagcucaauaggcugauugagaaaacgaacgaaaaguuucaucagaucgagaaggaguucucagaagucgaaggccggauucaagacuuagagaaauacguggaggauaccaagauagaccuguggaguuauaaugcggaacuccuuguugcccuggagaaccagcacacaaucgauuugacugacuccgaaaugaauaaacuauucgagaagacccgaaaacagcugcgcgaaaacgcagaggauaugggaaacggcugcuuuaagauuuaccauaagugugacaaugcuugcaucgggagcaucagaaacggaacauacgaccacgauguguauagggacgaggcccucaauaaccgguuccagauuaaaggugucgaacugaagucuggcuacaaagauuggauacuuuggaucucauuugcuauuaguugcuuccuguugugugugguacuccugggguuuaucaugugggccugccaaaagggaaauauucgcuguaacaucugcauauga

SEQ ID NO: 136546 - RNA, 1701 nt, Artificial Sequence
  derived and/or modified CDS sequence (opt3) from hemagglutinin__InfluenzaA__AFG72372
augaagaccaucauugcccugagcuacauacucugccuuguguucgcucagaaacugcccggcaacgacaauuccacagcaacuuuguguuuagggcaccaugccgucccuaacggaacgcugguuaagaccaucacaaaugaucaaauugaggugacuaacgcgaccgaacuuguacagucuucaaguacagguagaaucugcgacagcccacacaggauucucgauggcaaaaauuguacccugaucgacgcucuacugggggauccgcauugcgacggauuucagaacaaggagugggauuuguucguggaacgguccaaagccuauucuaauuguuaccccuaugacgucccugauuacgcaucgcuccgcucacugguggccagcaguggcacucuggaguuuauaaacgaagacuucaauuggacagguguugcucaggaugggaaguccuauaccugcaagcgaggaucugugaacagcuuuuucucccgucucaauugguuacacaaacuggaguacaaguauccagcacuuaacgucacgaugcccaauaacggcaaauuugacaaguuguacaucuggggcgugcaucacccuucaacugauagugaccaaaccagccuguacguaagagccucugggaggguuacaguguccacuaaacggucacagcagaccgucauuccaaauaucggaagccgccccugggugagaggucuaaguucuaggauuuccaucuauuggacaauagugaagccuggcgacauucuccugaucaacagcaccgggaaccuuauugcuccacggggauacuucaagauccgcaauggcaaaucgucuaucaugcgauccgaugccccgauugguaacuguucaagugagugcauaacgcccaaugggagcaucccuaacgacaagccauuucagaaugucaacagaauuacuuauggagcgugucccagguacguuaaacaaaauacacugaaguuggcaaccggcaugcggaacgugccugaaaaacagacucguggcaucuucggggccauagcuggauuuauugagaaugguugggaaggcaugguagaugggugguauggauuccgccaccagaacuccgagggcacaggucaggccgcagaccucaagucuacccaagcugccaucgaucagaucaaugggaaacugaacagauuaauugagaagacgaaugaaaaguuucaucagaucgagaaagaguucagcgaaguggaaggcaggauucaagaccuggagaaguacgucgaggauaccaaaauagaccucuggucauauaacgcggaacuucugguggccuuggagaaucagcacacaaucgaucuaacugacagugaaaugaacaagcuguucgagcggacccgaaaacagcuccgcgaaaacgcagaggauaugggaaauggcugcuuuaagauuuaccauaagugugacaacgcuugcaucggguccaucagaaauggaacauacgaccacgauguuuauagggacgaggcccugaacaaucgguuccagauuaaagguguggaacuuaagagcggcuacaaagauuggauacuguggaucucuuuugcuauuucaugcuucuugcucugugucgugcuguuaggguuuaucaugugggccugccaaaagggaaacauucgcuguaauaucugcauauga

SEQ ID NO: 136547 - RNA, 1701 nt, Artificial Sequence; identical to SEQ ID NO: 129072
  derived and/or modified CDS sequence (opt3) from hemagglutinin__InfluenzaA__AFG72383

SEQ ID NO: 136548 - RNA, 1701 nt, Artificial Sequence
  derived and/or modified CDS sequence (opt3) from hemagglutinin__InfluenzaA__AFG72394
augaagaccaucauugcccugagcuacauacucugccuuguguucgcucagaaacugcccggcaacgacaauuccacagcaacuuuguguuuagggcaccaugccgucccuaacggaacgcugguuaagaccaucacaaaugaucaaauugaggugacuaacgcgaccgagcuaguacagucuucaaguacagguagaaucugcgacagcccacacaggauucucgauggcaaaaauuguacccugaucgacgcuuugcugggggauccgcauugcgacggauuucagaacaaggaaugggauuuguucguggaacgguccaaagccuauucuaauuguuaccccuaugacgucccugauuacgcaucgcuccgcucacugguggccagcaguggcacucuggaguuuauaaacgaagacuucaauuggacagguguugcucaggaugggaaguccuaugcaugcaagcgaggaucugugaacagcuuuuucucccgucucaauugguuacacaaacuggaguacaaguauccagcccuuaacgucaccaugcccaauaacggcaaauuugacaaguuguacaucuggggcgugcaucacccuucaacggauagugaccaaacuagccuguacguaagagcuucugggaggguuaccguggccacaaaacggucccagcagacugucauuccaaauaucggauuccgccccugggugagaggucagucaagcggcauuaguaucuauuggaccauagugaagccuggggacauucuacucaucaacucuacaggaaaccugauugcgccaaggggcuacuuuaagauccggaaugguaaauccagcaucaugcgcucggaugcaccgauugggaacuguucuuccgagugcauaacccccaauggaucaaucccuaacgacaagccauuccaaaaugucaaccgaauuacguauggcgccugucccagauacguuaaacagaauacucuuaagcuggcuacaggcaugaggaacgugccugaaaaacagacccgggggaucuuuggagccauagcagguuucauugagaauggcugggaagggaugguagauggaugguauggcuuucgucaccagaacagugaggguacugggcaagcugccgaccuuaagagcacacaggcggccaucgaucagaucaauggcaaacucaaccgccugauugagaagaccaaugaaaaguuccaucaaaucgagaaagaguucuccgaaguggaaggaaggauucaggacuuagagaaguacgucgaggauacgaaaauagaccuguggucuuauaacgcaggccuccuuguggcucuggaaaaucagcacaccaucgauuugacagacagcgagaugaacaagcuauuugaaagaacucggaaacagcugcgagagaacgccgaagauauggggaauggaugcuucaagauuuaccauaagugugacaacgcuugcaucgguucaauccgcaauggcaccuacgaccacgauguuuauagagacgaggcccucaacaauagguuucaaauuaaagggguggagcugaagaguggauacaaagauuggauacuuuggaucuccuucgcaauuagcugcuuucuguugugugucgugcuccugggcuucaucaugugggccugccagaaggguaacauucgguguaauaucugcauauga

SEQ ID NO: 136549 - RNA, 1701 nt, Artificial Sequence
  derived and/or modified CDS sequence (opt3) from hemagglutinin__InfluenzaA__AFG72405
augaagaccaucauugcccugagcuacauacucugccuuguguucgcucagaaacugcccggcaacgacaauuccacagcaacuuuguguuuagggcaccaugccgucccuaacggaacgcugguuaagaccaucacaaaugaucaaauugaggugacuaacgcgaccgaacuuguacagucuucaaguacagguagaaucugcgacagcccacacaggauucucgauggcaaaaauuguacccugaucgacgcucuacugggggauccgaacugcgacggauuucagaauaaggagugggauuuguucguggaacgguccaaagccuauucuaacuguuaccccuaugacgucccugauuacgcaucgcuccgcucacugguggccagcaguggcacucuggaguuuacaaaugaagacuucaacuggaccgguguugcucaggaugggggauccuaugcaugcaagcgaggcucugugaaguccuuuuucucccgucucaauugguuacauaaacuggaguacaaguauccagcccuuaacgucacgaugcccaauaacggcaaauuugacaaguuguacauauggggagugcaccauccuucaacugauagugaccaaaccagccuguacguaagagcuucugggaggguuacaguguccacuaaacggucacagcagaccgucacaccaaauaucgguagccgccccugggugagaggccuaaguucuaggauuuccaucuauuggaccauugugaagccuggggacauccuccugauaaacagcacgggaaaccuuauugccccacggggcuacuucaagauccgcaaugguaaaucgucuauuaugcgauccgaugcgccgaucgggacuuguucaagugagugcaucacacccaacggaagcauuccuaaugacaagccauuucagaacgucaauagaauaaccuauggcgcaugucccagguacguuaaacaaaacacucugaaguuggccacaggcaugcggaaugugccugaaaaacagacccgugggaucuucggagcuauugccgguuuuaucgagaacggcugggaagggaugguagauggaugguauggcuuccgccaccagaauagcgaggguacggggcaggcagcugaccucaagucuacccaagccgcgauaaaccagauuaauggcaaacugaacagauuaaucgagaagacaaaugaaaaguuucaccagaucgagaaagaguucagcgaaguggaaggaaggauucaagaucuggagaaguacgucgaggacacuaaaaucgaucucuggucauauaacgccgaacuucugguggcauuggagaaucagcauaccauugaccuaacagauagugaaaugaacaagcuguucgagaaaacucggaagcagcuccgagaaaacgcugaggacaugggcaaugggugcuuuaagauauaccacaaaugugauaacgccugcaucggauccauucgcaaugguaccuacgaccaugacguuuauagagaugaggcucugaacaauagguuccagaucaagggcguggaacuuaaaagcggguacaaggacuggauccuguggauuucuuuugccauaucaugcuucuugcucugugucgugcuguuaggauuuaucaugugggcaugccaaaaaggcaacauucgguguaauaucugcauuuga

SEQ ID NO: 136550 - RNA, 1701 nt, Artificial Sequence
  derived and/or modified CDS sequence (opt3) from hemagglutinin__InfluenzaA__AFG72449
augaagaccaucauugcccugagcuacauacucugccuuguguucgcucagaaacugcccggcaacgacaauuccacagcaacuuuguguuuagggcaccaugccgucccuaacggaacgcugguuaagaccaucacaaaugaucaaauugaggugacuaacgcgaccgaacuuguacagucuucaaguacagguagaaucugcuauagcccacacaggauucucgacggcaauaacuguacccugaucgaugcucuacugggggacccgcauugcgauggauuucagaauaaagagugggacuuguucguggaacgguccaaggccuacucuaacuguuaucccuacgaugucccugacuaugcaucgcuccgcucacugguggccagcaguggcacucuggaguuuauaaaugaagauuucaacuggacagguguugcucaggacgggaaauccuacgcaugcaagcgaggaucugugaagggcuuuuucagccgucucaauugguuacacaaacuggaguauaaguacccagcccuuaacgucaccaugcccaauaacggcaaauuugauaaguuguacaucuggggagugcaucacccuuccacggacucagaucaaacuucccuguauguaagagcuagcggggguguuaccgugucuacaaaaaggucccagcagacugucauuccaucaaucggcagccggcccugggugcgcgggcuaaguucuagaauuuccaucuacuggaccauagugaagccuggagacauucuccugaucaauagcacaggcaaccuuauugccccaagggguuauuucaagauccggaacgggaaaucgucuaucaugcgcuccgacgcgccgauuggaaauuguucaagugagugcauaacccccaacggcagcaucccuaaugauaagccauuucagaacgucaaucgaauuacguacggcgcaugucccagauauguuaaacaaaacacucugaaguuggccacagggaugaggaaugugccugaaaaacagacccggggaaucuucggugcuauagccggcuuuauugagaacgggugggaaggaaugguagacggcugguacgguuuccgucaccagaauagugaggggacuggccaggcagcugaucucaagucuacacaagccgcgaucgaccagaucaacggaaaacugaaucgcuuaauugagaagaccaacgaaaaguuucaucagaucgagaaagaguucagcgaaguggaaggcaggauucaagaucuggagaaguaugucgaggacacgaaaauagaucucuggucauacaaugccgaacuucugguggcauuggagaaccagcacaccaucgaccuaacagauagugaaaugaauaagcuguucgagagaacucggaaacagcuccgagaaaacgcugaggacauggggaacggaugcuuuaagauuuaccauaagugugauaaugccugcaucgguuccauccgcaacggcaccuaugaccacgacguuuacagagaugaggcucugaauaacagguuccagauuaaagggguggaacuuaagagcggauauaaagacuggauacuguggaucucuuuugccauuucaugcuucuugcucugugucgugcuguuaggcuuuaucaugugggcaugccaaaaggguaauauucgguguaacaucugcauauga

SEQ ID NO: 136551 - RNA, 1701 nt, Artificial Sequence; identical to SEQ ID NO: 129101
  derived and/or modified CDS sequence (opt3) from hemagglutinin__InfluenzaA__AFG72460

SEQ ID NO: 136552 - RNA, 1701 nt, Artificial Sequence
  derived and/or modified CDS sequence (opt3) from hemagglutinin__InfluenzaA__AFG72504
augaagaccaucauugcccugagcuacauacucugccuuguguucgcucagaaacugcccggcaacgacaauuccacagcaacuuuguguuuagggcaccaugccgucccuaacggaacgcugguuaagaccaucacaaaugaucaaauugaggugacuaacgcgaccgaacuuguacagucuucaaguacagguagaaucugcgacagcccacacaggauucucgauggcaaaaauuguacccugaucgacgcucuacugggggauccgcauugcgacggauuucagaacaaggagugggauuuguucguggaacgguccaaagccuauucuaauuguuaccccuaugacgucccugauuacgcaucgcuccgcucacugguggccagcaguggcacucuggaguuuauaaacgaagacuucaauuggacagguguugcucaggaugggaaguccuaugcaugcaagcgaggaucugugaaauccuuuuucagccgucucaacugguuacacaagcuggaguacaaauauccagcccuuaaugucaccaugcccaacaauggcaaguuugacaaauuguacaucuggggcgugcaucacccuucaacggauagugaccaaacuagccuguacguaagagcuucugggaggguuaccguguccacaaagcggucacagcagacugucauuccaaacaucggauuccgccccugggugagaggucuaagcaguaggauuucuaucuauuggaccauagugaagccuggcgacauucuccugaucaauuccacagggaaccuuauugccccacggggauacuuuaaaauccgcaacggcaagagcucgaucauucgaucugaugcgccgauagguaauuguuccucagagugcaucacccccaacgggaguauuccuaaugacaaaccauuccagaacgucaauagaaucacguauggagcaugucccagguacguuaagcaaaacacucugaaauuggccacaggcaugcggaaugugccugaaaagcagacccguggcauauuuggggcuauugccggauucaucgagaacgguugggaaggcaugguagaugggugguauggauuucgccaccagaauagcgagggcacuggucaggcagcugaccucaaauccacacaagccgcgaucgaucagauuaacgggaagcugaauagauuaaucgagaagaccaacgaaaaauuccaucagauugagaaggaguucucugaaguggaaggcaggauacaagaccuggagaaauacgucgaggauacgaagaucgaccucuggagcuauaaugccggacuucugguggcauuggaaaaccagcacaccauugaucuaacagacucagagaugaauaaacuguuugaacggacucgaaagcagcuccgcgagaacgcugaagauaugggcaacgggugcuucaagaucuaccauaaaugugacaaugccugcaucggaaguauuagaaacgguaccuacgaccacgauguuuauagggacgaggcucugaauaaccgguuucagauaaagggcguggagcuuaaauccggguacaaggauuggauccuguggauuagcuucgccaucucuugcuuuuugcucugugucgugcuguuaggauucauuaugugggcaugccaaaaaggcaauauccgcuguaacauaugcaucuga

SEQ ID NO: 136553 - RNA, 1701 nt, Artificial Sequence
  derived and/or modified CDS sequence (opt3) from hemagglutinin__InfluenzaA__AFG72515
augaagaccaucauugcccugagcuacauacucugccuuguguucgcucagaaacugcccggcaacgacaauuccacagcaacuuuguguuuagggcaccaugccgucccuaacggaacgcugguuaagaccaucacaaaugaucaaauugaggugacuaacgcgaccgaacuuguacagucuucaccaacagguagaaucugcgacaguccgcacaggauucucgauggcaaaaauuguacccugaucgacgcucuacugggggauccccauugcgacggauuucagaacaaggagugggauuuguucguggaacggagcaaagccuauuccaauuguuacccuuaugacgucccagauuacgcaucucuccgcucgcugguggccucaagcggcacucuggaguuuauaaacgaaaauuucaacuggacagguguugcucaggacgggaagaguuaugcaugcaagcgaggauccgugaauaguuucuucagccgucucaacugguuacacaaacuggaguacaaguaucccgcccuuaaugucaccaugccuaacaauggcaaauuugauaaguuguacaucuggggcgugcaucacccauccacggacucagaucaaacuucucuguacguaagagcuagcgggaggguuaccgugucuacaaaacggucccagcagacugucauucccgacaucggauaucgcccuugggugagaggucuaucaagcaggauuaguaucuacuggaccauagugaagccaggcgacauucuccugaucaacucuacagggaaccuuauugccccgcggggauauuucaagauccgcaauggcaaauccagcaucaugcgaucggaugcgcccauugguaacuguucuuccgagugcauaaccccuaaugggucaaucccaaacgacaagcccuuucagaaugucaacagaauuacguacggagcauguccuagguauguuaaacaaaauacucugaaguuggccacaggcaugcggaacgugccagaaaaacagacccguggcaucuucggggcuauagccggauuuauugagaaugguugggaaggcaugguagaugggugguacggauuccgccaccagaacagugagggcacuggucaggcagcugaccucaagagcacacaagccgcgaucgaucagaucaaugggaaacugaacagauuaguggagaagaccaaugaaaaguuucaucagauugagaaagaauuuuccgaggucgaaggcaggauccaagaccuggagaaguauguggaggauacgaaaauugaccucuggucuuacaacgccgaacuucugguugcauuggagaaucagcacaccauagaucuaacagacagcgaaaugaacaagcuguucgagcggacucgaaaacagcuccgcgaaaacgcugaggauaugggaaauggcugcuuuaagaucuaccauaagugugacaacgccugcauugggucaaucagaaauggaaccuaugaccacgauguguacagggacgaggcucugaacaaucgguuccagaucaaaggugucgaacuuaagaguggcuauaaagauuggauucuguggauauccuuugccaucagcugcuucuugcucugugugguacuguuaggguuuauuaugugggcaugccaaaagggaaacauccgcuguaauauuugcaucuga

SEQ ID NO: 136554 - RNA, 1701 nt, Artificial Sequence
  derived and/or modified CDS sequence (opt3) from hemagglutinin__InfluenzaA__AFG72526
augaagaccaucauugcccugagcuacauacucugccuuguguucgcucagaaacugcccggcaacgacaauuccacagcaacuuuguguuuagggcaccaugccgucccuaacggaacgcugguuaagaccaucacaaaugaucaaauugaggugacuaacgcgaccgaacuuguacagucuucaaguacagguagaaucugcgacagcccacacaggauucucgauggcaaaaauuguacccugaucgacgcucuacugggggauccgcauugcgacggauuucagaacaaggagugggauuuguucguggaacgguccaaagccuauucuucguguuaccccuaugacgucccugauuacgcaucacuccgcagccugguggccaguuccggcacucuggaguuuauaaaugaagacuucaacuggacagguguugcucaggaugggaagucuuaugcaugcaagcgaggaagcgucaauuccuuuuucucacgucucaacugguuacacaaacuggaguacaaguauccagcccuuaaugugaccaugcccaacaauggcaaauuugacaaguuguacaucuggggcgugcaucacccuaguacggauagcgaccaaacuucucuguacguaagagcuuccgggaggguuauugugucaaccaaacggagccagcagacagucaucccaaacauuggaagucgccccugggugagaggucuaucuuccaggaucagcauauauuggacuauugugaagccuggcgacauccuccugauuaauucgaccgggaaccuuaucgccccacggggauacuucaagauccgcacaggcaaaucuuccauuaugcgaucagaugcgccgauagguaacuguaguagcgagugcaucacccccaauggguccauuccuaacgacaagccauuucagaaugucaacagaaucacguauggagcaugucccagguacguuaaacaaaauacucugaaguuggccacaggcaugcggaacgugccugaaaaacagacccguggcauauucggggcuauugccggauuuaucgagaaugguugggaaggcaugguagaugggugguauggauuccgccaccagaacucugagggcacuggucaggcagcugaccucaagagcacacaaaccgccaucaaucagauuaacgggaaacugaauagauuaaucgagaagacgaacgaaaaguuucaucagauugagaaagaguucucagaaguggaaggcaggauacaagaucuggagaaguacgucgaggacaccaaaaucgaucucuggaguuauaaugcggaacuucugguggccuuggagaaccagcacacaauugaccuaacugauuccgaaaugaauaagcuguucgagcggacccgaaaacagcuccgcgaaaacgcagaggacaugggaaacggcugcuuuaagaucuaccauaagugugauaaugcuugcaucgggagcauuagaaacggaacauacgaccacgacguuuauagggaugaggcccugaauaaccgguuccagauaaaagguguggaacuuaagucuggcuacaaagacuggauccuguggauuucauuugcuaucaguugcuucuugcucugugucgugcuguuaggguuuauuaugugggccugccaaaagggaaauauccgcuguaacauaugcaucuga

SEQ ID NO: 136555 - RNA, 1701 nt, Artificial Sequence
  derived and/or modified CDS sequence (opt3) from hemagglutinin__InfluenzaA__AFG72581
augaagaccaucauugcccugagcuacauacucugccuuguguucgcucagaaacugcccggcaacgacaauuccacagcaacuuuguguuuagggcaccaugccgucccuaacggaacgcugguuaagaccaucacaaaugaucaaauugaggugacuaacgcgaccgaacuuguacagucuucaaguacagguagaaucugcgacagcccacacaggauucucgauggcaaaaauuguacccugaucgacgcucuacugggggauccgcauugcgacggauuucagaacaaggagugggauuuguucguggaacgguccaaagccuauucuaauuguuaccccuaugacgucccugauuacgcaucgcuccgcucacugguggccagcaguggcacucuggaguuuauaaacgaagacuucaauuggacagguguugcucaggaugggaaguccuaugcaugcaagcgaggaucugugaacagcuuuuucucccgucucaauugguuacacaaacuggaguacaaguauccagcccuuaacgucaccaugcccaauaacggcaaauuugacaaguuguacaucuggggcgugcaucacccuucaacggauagugaccaaacuagccuguacguaagagcuucugggggaguuaccguguccacaaaaaggucacagcagacugucauuccaaauaucgguuaucggcccugggugcgcggccuaagcaguagaauuucuaucuacuggaccauagugaagccuggggacauucuccugaucaacuccacaggaaaccuuauugccccaaggggcuauuucaagauccggaaugguaaaagcucgaucaugcgcucugaugcgccgauugggaacuguuccucagagugcauaacccccaauggaaguaucagcaacgacaagccuuuucagaaugucaaccgaauuacguacggcgcauguccaagauauguuaaacaaaauacucugaaguuggccacaggcaugaggaacgugcccgaaaaacagacccgggggaucuucggagcuauagccgguuuuauugagaauggcugggaagggaugguagauggaugguacggcuuccgucaccagaacuccgaggguacugggcaggcagcugaccucaagucuacacaagccgcgaucgaucagaucaauggcaaacugaaccgcuuaauugagaagaccaaugaaaaguuucaucagaucgagaaagaguucagcgaaguggaaggaaggauucaagaccuggagaaguaugucgaggauacgaaaauagaccucuggucauacaacgccgaacuucugguggcauuggagaaucagcacaccaucgaucuaacagacagugaaaugaacaagcuguucgagagaacucggaaacagcuccgagaaaacgcugaggauaugggcaaugggugcuuuaagauuuaccauaagugugacaacgccugcaucggauccauccgcaaugguaccuaugaccacgauguuuacagagacgaggcucugaacaauagguuccagauuaaaggcguggaacuuaagagcggguauaaagauuggauacuguggaucucuuuugccauuucaugcuucuugcucugugucgugcuguuaggauuuaucaugugggcaugccaaaagggcaacauucgguguaauaucugcauauga

SEQ ID NO: 136556 - RNA, 1701 nt, Artificial Sequence
  derived and/or modified CDS sequence (opt3) from hemagglutinin__InfluenzaA__AFG72603
augaagaccaucauugcccugagcuacauacucugccuuguguucgcucagaaacugcccggcaacgacaauuccacagcaacuuuguguuuagggcaccaugccgucccuaacggaacgcugguuaagaccaucacaaaugaucaaauugaggugacuaacgcgaccgaacuuguacagucuucaaguacagguagaaucugcgacagcccacacaggauucucgauggcaaaaauuguacccugaucgacgcucuacugggggauccgcauugcgacggauuucagaacaaggagugggauuuguucguggaacgguccaaagccuauucuaauuguuaccccuaugacgucccugauuacgcaucgcuccgcucacugguggccagcaguggcacucuggaguuuacaaaggaagguuucaacuggaccgggguugcucaggacggaaaguccuaugcaugcaaacgaggcucugugaauagcuuuuucucccgucucaacugguuacacaagcuggaguacaaauauccagcccuuaaugucacgaugcccaacaaugauaaguuugacaaauuguacauauggggcgugcaucacccuucaacugauagugaccaaaccagccuguacguacaggcuucugggagaguuacaguguccacuaagaggucacagcagaccgucaucccaaacauuggaagccggcccugggugcgcgguaucaguucuagaauuuccaucuauuggacaauagugaagccuggcgacauucuacucaucaauagcaccgggaaccugauugccccaaggggauacuucaaaauccggaacggcaagucgucuaucaugcgcuccgaugcgccgauugguaauuguaaaucagagugcauaacgcccaacgggaguaucccuaaugacaagccauuucaaaacgucaaucgaauuacuuauggagcaugucccagauacguuaaacagaacacacuuaagcuggccaccggcaugaggaaugugccugaaaaacagacucggggcaucuucggggcuauagccggauuuauugagaacgguugggaaggcaugguagaugggugguauggauuccgucaccagaauagcgagggcacaggucaagcagcugacuugaaguccacccaggccgcgacggaucagaucaacgggaagcucaaucgccugaucgagaaaaccaacgaaaaguuucaucaaauugagaaagaguucucugaaguggaaggcagaauccaggacuuagagaaguacgucgaggauacaaaaauugaccuguggagcuauaaugccgaacuccuuguggcacuggagaaccagcacacuauagauuugaccgacucagaaaugaauaagcuauucgagaggacacggaagcagcugcgagaaaacgcugaggauaugggaaacggcugcuuuaaaaucuaccauaagugugacaaugccugcauugggaguauccgcaacggaacuuacgaccacgauguuuauagagacgaggcucucaauaacagguuccaaaucaaagguguggaacugaaguccggcuacaaagauuggauucuuuggaucagcuuugccauaucuugcuuccuguugugugucgugcuccugggguuuauuaugugggcaugccagaagggaaauauccgguguaacauuugcaucuga

SEQ ID NO: 136557 - RNA, 1701 nt, Artificial Sequence
  derived and/or modified CDS sequence (opt3) from hemagglutinin__InfluenzaA__AFG72614
augaagaccaucauugcccugagcuacauacucugccuuguguucgcucagaaacugcccggcaacgacaauuccacagcaacuuuguguuuagggcaccaugccgucccuaacggaacgcugguuaagaccaucacaaaugaucaaauugaggugacuaacgcgaccgaacuuguacagucuucaaguacagguagaaucugcgacagcccacacaggauucucgauggcaaaaauuguacccugaucgacgcucuacugggggauccgcauugcgacggauuucagaacaaggagugggauuuguucguggaacgguccaaagccuauucuaauuguuaccccuaugacgucccugauuacgcaucgcuccgcucacugguggccagcaguggcacucuggaguuuacaaacgaagguuucaauuggaccgggguugcucaggacggaacguccuauucuugcaagcgaggcagcgugaaguccuuuuucucacgucucaacugguuacacaaacuggaguacaaguauccagcacuuaaugucgccaugcccaacaaugauaaauuugacaaguuguacauauggggcgugcaucacccuaguacugauagcgaccaaaccucucuguacguacaggcuuccgggagaguuacagugucaacuaaaaggagccagcagaccgucaucccaaacauuggaagucggcccugggugcgcggugugucuuccagaaucagcauuuauuggacaaucgucaagccuggcgacauacuacucauuaauucgaccgggaaccugaucgccccaaggggauacuucaagauucggucuggcaaauccucaaucaugcgcagugaugcgccgaucgguaacuguaauagcgagugcauuacgcccaacggguccauaccuaaugacaagccauuucaaaacguuaaucgaaucacuuauggagcaugucccagauacgugaaacagaacacacuuaagcuggccaccggcaugaggaauguaccugaaaaacagacucggggcauuuucggggcuaucgccggauuuauagagaacgguugggaaggcaugguggaugggugguauggauuccgucaccagaauagcgagggcacaggucaagcagcugacuugaagucuacccaggccgcgauuaaccagaucaaugggaaacucaaccgccugaucgagaagacgaaugaaaaguuucaucaaauugagaaagaguucucagaagucgaaggcagaauccaggauuuagagaaguacguggaggacaccaaaauugaucuguggaguuauaacgccgaacuccuuguugcacuggagaaucagcacacaauagacuugacugauuccgaaaugaacaagcuauucgagaggacccggaaacagcugcgagaaaacgcugaggacaugggaaauggcugcuuuaagaucuaccauaagugugauaacgccugcauugggagcauccgcaauggaacauacgaccacgacguguauagagaugaggcucucaacaauagguuccaaaucaaaggugucgaacugaagucuggcuacaaagacuggauucuuuggauaucauuugccaucaguugcuuccuguugugugugguacuccugggguuuauuaugugggcaugccagaagggaaacauccgguguaauauuugcaucuga

SEQ ID NO: 136558 - RNA, 1701 nt, Artificial Sequence
  derived and/or modified CDS sequence (opt3) from hemagglutinin__InfluenzaA__AFG72625
augaagaccaucauugcccugagcuacauacucugccuuguguucgcucagaaacugcccggcaacgacaauuccacagcaacuuuguguuuagggcaccaugccgucccuaacggaacgcugguuaagaccaucacaaaugaucaaauugaggugacuaacgcgaccgaacuuguacagucuucaaguacagguagaaucugcgacagcccacacaggauucucgauggcaaaaauuguacccugaucgacgcucuacugggggauccgcauugcgacggauuucagaacaaggagugggauuuguucguggaacgguccaaagccuauucuaauuguuaccccuaugacgucccugauuacgcaucgcuccgcucacugguggccagcaguggcacucuggaguuuacaaacgaagguuucaauuggaccgggguugcucaggacggaacguccuaugcaugcaagcgaggcucugucaagagcuuuuucucccgucucaacugguuacacaaacuggaguacaaguauccagcccuuaaugugacuaugcccaacaaugauaaauuugacaaguuguacauauggggcgugcaucacccuucaaccgauagugaccaaacaagccuguacguacaggcuucugggagaguuacuguguccaccaaaaggucacagcagacagucaucccaaacauuggaagccggcccugggugcgcgguaucaguucuagaauuuccaucuauuggaccauagugaagccuggcgacauucuacucaucaagagcacggggaaucugauugccccaaggggauacuucaaaauccggucgggcaagucuuccaucaugcgcucagaugcgccgauugguaacuguaacagugagugcauaacucccaaugggagcaucccuaacgacaaaccauuucaaaaugucaaccgaauuacauauggagcaugucccagauacguuaagcagaauacccuuaaacuggccacuggcaugaggaacgugccugaaaagcagacacggggcaucuucggggcuauagccggauuuauugagaaugguugggaaggcaugguagaugggugguauggauuccgucaccagaacuccgagggcaccggucaagcagcugacuugaaaucuacgcaggccgcgaucaaucagaucaacgggaagcucaaucgccugauugagaagaccaacgaaaaauuucaucaaaucgagaaggaguucagcgaaguggaaggcaggauucaggauuuagagaaauacgucgaggacacaaagauagaucuguggucauauaaugccgaacuccuuguggcacuggagaaccagcacacuaucgacuugaccgauagugaaaugaauaaacuauucgagagaacacggaagcagcugcgagaaaacgcugaggacaugggaaacggcugcuuuaagauuuaccauaaaugugauaaugccugcaucggguccauccgcaacggaacuuacgaccacgacguuuauagagaugaggcucucaauaacagguuccaaauuaaggguguggaacugaaaagcggcuacaaggacuggauacuuuggaucucuuuugccauuucaugcuuccuguugugugucgugcuccugggguuuaucaugugggcaugccagaaaggaaauauucgguguaacaucugcauauga

SEQ ID NO: 136559 - RNA, 1701 nt, Artificial Sequence
  derived and/or modified CDS sequence (opt3) from hemagglutinin__InfluenzaA__AFG72636
augaagaccaucauugcccugagcuacauacucugccuuguguucgcucagaaacugcccggcaacgacaauuccacagcaacuuuguguuuagggcaccaugccgucccuaacggaacgcugguuaagaccaucacaaaugaucaaauugaggugacuaacgcgaccgaacuuguacagucuucaaguacagguagaaucugcgacagcccacacaggauucucgauggcaaaaauuguacccugaucgacgcucuacugggggauccgcauugcgacggauuucagaacaaggagugggauuuguucguggaacgguccaaagccuauucuaauuguuaccccuaugacgucccugauuacgcaucgcuccgcucacugguggccagcaguggcacucuggaguuuacaaacgaagguuucaauuggaccgggguugcucaggacggaaaguccuaugcaugcaagcgaggcucugugaaauccuuuuucagccgucucaacugguuacacaagcuggaguuuaaauacccagcccuuaaugucacgaugcccaacaaugauaaguucgacaaauuguauauauggggcgugcaucacccuucaacugauagugaccaaaccagccuguacguacaggcuucugggagaguuacaguguccacuaagaggucacagcagaccgucaucccaaacauuggaagccggcccugggugcgcgguaucaguucuagaauuuccaucuacuggacaauagugaagccuggcgacauucuacucaucaauagcaccgggaaccugauugccccaaggggauauuuuaaaauccggaacggcaagucgucuaucaugcgcuccgaugcgccgauugacaauuguaacucagagugcauaacgcccaaugguaguaucccuaacgauaaaccauuccaaaaugucaaccgaauuacuuacggggcaugucccagauauguuaagcagaauacacuuaaacuggccaccggaaugaggaacgugccugaaaagcagacucggggcaucuuuggcgcuauagccggguucauugagaauggaugggaagguaugguagacggcugguacggguuucgucaccagaacagcgagggaacaggccaagcagcugauuugaaauccacccaggccgcgaucgaccagaucaaugguaagcucaaccgccugauugagaagacgaaugaaaaauuccaucaaaucgagaaggaguucucugaaguggaagggaggauucaggauuuagagaaauaugucgaggacaccaagauagaucuguggagcuacaacgccgaacuccuuguggcacuggagaaucagcacacaaucgacuugacugauucagaaaugaacaaacuauuugagagaacccggaagcagcugcgagaaaacgcugaggacaugggcaauggaugcuucaagauuuaucauaaaugugacaacgccugcaucggcaguauccgcaaugggacauacgaucacgacguuuacagagaugaggcucucaacaauagguuucaaauuaagggaguggaacugaaauccgguuauaaggacuggauacuuuggaucagcuucgccauuucuugcuuucuguugugugucgugcuccugggcuucaucaugugggcaugccagaaagggaacauucgguguaauaucugcauauga

SEQ ID NO: 136560 - RNA, 1701 nt, Artificial Sequence
  derived and/or modified CDS sequence (opt3) from hemagglutinin__InfluenzaA__AFG72658
augaagaccaucauugcccugagcuacauacucugccuugcuuucgcacagaaacugcccggcaacgacaauuccacagccacuuuguguuuagggcaccaugcggugccuaacggaacgcuggucaagaccaucacaaaugaucaaauugagguuacuaacgcuaccgagcuagugcagucuucaaguacagguagaaucugcgacagcccacacaggauucucgauggcaaaaauuguacccugaucgacgcccuucugggggauccgcauugcgacggauuucagaacaaggaaugggauuuguucguagaacgguccaaagcauauucuaauuguuaccccuaugacgugccugauuacgccucgcuccgcucacuggucgcuagcaguggcacucuggaguuuacaaacgaagguuucaauuggaccgggguggcacaggacggaaaguccuaugccugcaagcgaggcucuguuaacagcuuuuucucccgucucaauugguuacacaaacuggaguacaaguauccagcucuuaacgugacgaugcccaauaacgauaaauuugacaaguuguacauauggggcguccaucacccuucaacugauagugaccaaaccagccuguacgugcaggccucugggagaguaacaguuuccacuaaaaggucacagcagaccgugaucccaaauauuggaagccggcccuggguccgcgguaucaguucuagaauuuccaucuauuggacaauagugaagccuggcgacauucuacucaucaacagcaccgggaaccugauugcgccaaggggauacuucaagauccggaauggcaaaucgucuaucaugcgcuccgaugcaccgauugacaacuguaauucagagugcauaacgcccaacgguaguaucccuaaugauaagccauuucaaaacgugaaucgaauuacuuauggggccugucccagauacgucaaacagaacacacuuaagcuggcuaccggaaugaggaauguuccugaaaaacagacucggggcaucuucggcgccauagcaggguuuauugagaacggaugggaagguaugguggacggcugguauggguuccgucaccagaauagcgagggaacaggccaagcugccgauuugaaguccacccaggcggccaucgaccagaucaacgguaaacucaaucgccugauugagaagacgaacgaaaaguuucaucaaaucgagaaagaguucucugaaguagaagggaggauucaggauuuagagaaguacguggaggacaccaaaauagaucuguggagcuauaaugcagaacuccuugucgcucuggagaaccagcacacaaucgacuugacugauucagaaaugaacaagcuauucgagagaacccggaaacagcugcgagaaaaugccgaggacaugggcaacggaugcuuuaagauuuaccauaagugugacaaugcuugcaucggcaguauccgcaacgggacauacgaucacgacguguauagagaugaggcccucaauaacagguuccaaauuaaaggaguugaacugaaguccgguuacaaagacuggauacuuuggaucagcuuugcaauuucuugcuuccuguugugugugguccuccugggcuuuaucaugugggccugccagaaggggaauauucgguguaacaucugcauauga

SEQ ID NO: 136561 - RNA, 1701 nt, Artificial Sequence
  derived and/or modified CDS sequence (opt3) from hemagglutinin__InfluenzaA__AFG72680
augaagaccaucauugcccugagcuacauacucugccuuguguucgcucagaaacugcccggcaacgacaauuccacagcaacuuuguguuuagggcaccaugccgucccuaacggaacgcugguuaagaccaucacaaaugaucaaauugaggugacuaacgcgaccgaacuuguacagucuucaaguacagguaucauuugcgacagcccacacagaauccucgauggcaaaaauuguacccugauagacgcucuacugggggauccgcauugcgacggauuucagaacaaggagugggauuuguucguggaaagguccaaagccuauucuaauuguuaccccuaugacgucccugauuacgcaucgcuccggucacugguggccagcaguggcacucuggaguuuacaaacgaagguuucaauuggaccgggguugcucaggacggaacguccuaugcaugcaagcgcggcucugugaaguccuuuuucucccgacucaacugguuacacaaacuggaguacaaguauccagcccuuaaugucacuaugcccaacaaugauaaauuugacaaguuguacaucuggggcgugcaucacccuucaaccgauagugaccaaacaagccuguacguacaggcuucugggcguguuacuguguccaccagaaggucacagcagacagucauuccaaacaucggaagccggcccugggugcgcggugugaguucuagaauuuccaucuauuggaccauagucaaaccuggcgacauucuacucaucaauagcacggggaaccugauugccccaaggggauacuucaagauccggucgggcaagucuuccaucaugcgcucagaugcgccgauugguaacuguaauagugagugcauaacucccaacgggagcaucccuaaugacaaaccauuucaaaacguuaaucgaauuacauauggagcaugucccagauacgugaagcagaacacccuuaaacuggccacuggcaugaggaauguaccugaaaagcagacacggggcaucuucggggcuauagccggauuuauugagaacgguugggaaggcaugguggaugggugguauggauuccgucaccagaauagcgagggcaccggucaagcagcugacuugaaaucuacgcaggccgcgaucaaccagaucaaucgcaagcucaacagacugauugagaaaaccaaugaaaaguuucaucaaaucgagaaggaguucagcgaagucgaagggaggauucaggauuuagagaaauacguggaggacacaaagauagaucuguggucauauaacgccgaacuccuuguugcacuggagaaucagcacacuaucgacuugaccgauagugaaaugaacaaacuauucgagcggacacgaaagcagcugcgcgaaaacgcugaggacaugggcaauggaugcuuuaaaauuuaccauaagugugauaacgccugcaucggcuccaucagaaaugggacuuacgaccacgacguguauagggaugaggcucucaacaaucgguuccaaauuaagggagucgaacugaaaagcgguuacaaggacuggauacuuuggaucucuuuugccauuucaugcuuccuguugugugugguacuccugggcuuuaucaugugggcaugccagaaagggaacauucgcuguaauaucugcauauga

SEQ ID NO: 136562 - RNA, 1701 nt, Artificial Sequence
  derived and/or modified CDS sequence (opt3) from hemagglutinin__InfluenzaA__AFG72691
augaagaccaucauugcccugagcuacauacucugccuuguguucgcucagaaacugcccggcaacgacaauuccacagcaacuuuguguuuagggcaccaugccgucccuaacggaacgcugguuaagaccaucacaaaugaucaaauugaggugacuaacgcgaccgaacugguacagucuucaaguacagguagaaucugcgacagcccacacaggauucucgauggcaaaaauuguacccugaucgacgcccuucugggggauccgcauugcgacggauuuaagaacaaagagugggauuuguucguggaacgguccacugcuuauucuaauuguuaccccuaugacgucccugauuacgcaucgcuccgcucacugguggccagcaguggcacacuggaguuuaccaacgaagguuucaauuggacggggguugcucaggacggaacuuccuaugcaugcaagcgaggcucugucaagagcuuuuucucccgucucaacugguuacacaaacuggaguacaaguauccagcccuuaaugugaccaugcccaacaaugauaaauuugacaaguuguacauauggggcgugcaucacccuucaacagauagugaccagacuagccuguacguacaggcuucugggagaguuaccguguccacaaaaaggucacagcagaccgucaucccaaacauuggaagccggcccugggugcgcggugugaguucuagaaucuccauuuauuggacgaucgucaagccuggcgacauacuacucauuaauagcacugggaaccugaucgccccaaggggauacuucaagauucggucgggcaaaucuuccaucaugcgcucagaugcgccgaucgacaacuguaauagugagugcauuacacccaacgguagcauaccuaaugggaagccauuucagaacguuaaucgaaucaccuauggagcaugucccagauacgugaaacaaaacacucuuaagcuggccacaggcaugaggaauguaccugaaaaacagacccggggcauuuucggggcuaucgccggauuuauagagaacgguugggaaggcaugguggaugggugguauggauuccgucaccaaaauuccgagggcacgggucaggcagcugacuugaagucuacccaagccgcgauuaaccagaucaaugggaaacucaaccgccugaucgagaagacaaaugaaaaguuucaucagauugagaaagaguucagcgaagucgaaggcagaauccaagauuuagagaaguacguggaggacacuaaaauugaucuguggucauauaacgccgaacuccuuguugcacuggagaaucagcacaccauagacuugacagauagugaaaugaacaagcuauucgagaggacucggaaacagcugcgagaaaacgcugaggacaugggaaauggcugcuuuaagaucuaccauaagugugauaacgccugcauuggguccauccgcaauggaaccuacgaccacgacguguauagagaugaggcucucaacaauagguuccagaucaaaggugucgaacuaaagagcggcuacaaagacuggauucuuuggauaucuuuugccaucucaugcuuccuguugugugugguacuccugggguuuauuaugugggcaugccaaaagggaaacauccgguguaauauuugcaucuga

SEQ ID NO: 136563 - RNA, 1701 nt, Artificial Sequence
  derived and/or modified CDS sequence (opt3) from hemagglutinin__InfluenzaA__AFG72713
augaagaucauuauagcccugagcuacauccucugccuuguguucgcucagaaacugcccggcaacgacaauuccaccgcaacauuguguuuagggcaccaugccgucccuaacggaacucugguuaagacgauuaccaaugaucaaaucgaggugacaaacgcgacugaauugguacagucuucaaguaccgguagaauuugcgacagcccacaccagauccucgauggcaaaaauuguacacugauagacgcccuucugggggauccgcauugcgacggauuuaagaacaaagagugggauuuguucguggaaagguccaccgcuuauucuaauuguuaccccuaugacgucccugauuacgcaucgcuccggucacugguggccagcaguggcacucuggaguuuacaaacgaagguuucaauuggaccgggguugcucaggacggaacguccuaugcaugcaagcgcggcucugucaagagcuuuuucucccgacucaacugguuacacaaacuggaguacaaguauccagcccuuaaugugacuaugcccaacaaugauaaauuugacaaguuguacaucuggggcgugcaucacccuucaaccgauagugaccaaacaagccuguacguacaggcuucugggcguguuacuguguccaccaaaagaucacagcagacagucauuccaaacaucggaagcaggcccugggugcgggguauuaguucucgcaucuccauauauuggaccauugugaagccuggcgacauccuacucauuagcucgacggggaaucugaucgccccaagaggauacuucaagaucaggucuggcaaauccucaauuauacggagugaugcgccgaucgacaacuguaacagcgagugcauuacucccaaugguuccaucccuaacgauaagccauuucaaaaugucaaccgcauaacauauggggcauguccccgauacguuaaacagaauacccuuaagcuggccacuggaaugagaaacgugccugaaaaacagacaaggggcauuuucggcgcuaucgccggguuuaucgagaauggaugggaagguaugguagacggcugguauggguuccggcaccagaacucugagggaaccggccaagcagcugaucuaaagagcacgcaggccgcgauuaaucagaucaacgguaaacucaaucgucugauugagaagaccaacgaaaaguuucaucaaauagagaaagaguucucagaaguggaagggcgcauccaggacuuagagaaguacgucgaggauacaaaaauugaccuguggaguuauaaugccgaacuccuuguggcacuggagaaccagcacacuaucgauuugaccgacuccgaaaugaauaagcuauucgagagaacaaggaaacagcugcgggaaaacgcugaggauaugggcaacggaugcuuuaagaucuaccauaagugugacaaugccugcauuggcagcauacgaaacgggacuuacgaccacgauguuuaucgcgacgaggcucucaauaacagauuccaaaucaaaggaguggaacugaagucugguuacaaagauuggauucuuuggaucucauuugccauuaguugcuuccuguugugugucgugcuccugggcuuuaucaugugggcaugccagaaggggaauauaagguguaacaucugcauuuga

SEQ ID NO: 136564 - RNA, 1701 nt, Artificial Sequence
  derived and/or modified CDS sequence (opt3) from hemagglutinin__InfluenzaA__AFG72724
augaagaccaucauugcccugagcuacauacucugccuuguguucgcucagaaacugcccggcaacgacaauuccacagcaacuuuguguuuagggcaccaugccgucccuaacggaacgcugguuaagaccaucacaaaugaucaaauugaggugacuaacgcgaccgagcuaguacagucuucaaguacagguagaaucugcgacagcccacacaggauucucgauggcaaaaauuguacccugaucgacgcucugcugggggauccgcauugcgacggauuucagaacaaggaaugggauuuguucguggaacgguccaaagccuauucuaauuguuaccccuaugacgucccugauuacgcaucgcuccgcucacugguggccagcaguggcacucuggaguuuacaaacgaagguuucaauuggaccgggguugcucaggacggaacguccuaugcaugcaagcgaggcucugugaaguccuuuuucucccgucucaacugguuacacaaacuggaguacaaguauccagcccuuaaugucacuaugcccaacaaugauaaauuugacaaguuguacauauggggcgugcaucacccuucaaccgauagugaccaaacaagccuguacguacaggcuucugggagaguuacuguguccaccaaaaggucacagcagacagucaucccaaacauuggaagccggcccugggugcgcggugugaguucuagaaucuccauuuauuggaccaucgucaagccuggcgacauacuacucauuaauagcacggggaaccugaucgccccaaggggauacuucaagauucggucgggcaaaucuuccaucaugcgcucagaugcgccgaucgacaacuguaauagugagugcauuacucccaacgguagcauaccuaaugauaagccauuucaaaacguuaaucgaaucacauauggggcaugucccagauacgugaaacagaacacccuuaagcuggccacuggaaugaggaauguaccugaaaaacagacacggggcauuuucggcgcuaucgccggguuuauagagaacggaugggaagguaugguggacggcugguauggguuccgucaccagaauagcgagggaaccggccaagcagcugauuugaagucuacgcaggccgcgauuaaccagaucaaugguaaacucaaccgccugaucgagaagaccaaugaaaaguuucaucaaauugagaaagaguucagcgaagucgaagggagaauccaggacuuagagaaguacguggaggauacaaaaauugaccuguggucauauaacgccgaacuccuuguugcacuggagaaucagcacacuauagauuugaccgacagugaaaugaacaagcuauucgagaggacacggaaacagcugcgagaaaacgcugaggauaugggcaauggaugcuuuaagaucuaccauaagugugacaacgugugcauuggcuccauccgcaaugggacuuacgaccacgaugucuauagagacgaggcccucaacaauagguuccaaaucaaaggaguggaacuuaagagcgguuacaaagauuggauucuuuggauaucuuuugcuaucucaugcuuccuguuguguguaguucuccugggcuuuauuaugugggccugccagaaggggaacauccgguguaauauuugcaucuga

SEQ ID NO: 136565 - RNA, 1701 nt, Artificial Sequence
  derived and/or modified CDS sequence (opt3) from hemagglutinin__InfluenzaA__AFG72735
augaagaccaucauugcccugagcuacauacucugccuuguguucgcucagaaacugcccggcaacgacaauuccacagcaacuuuguguuuagggcaccaugccgucccuaacggaacgcugguuaagaccaucacaaaugaucaaauugaggugacuaacgcgaccgaacugguacagucuucaaguacagguagaaucugcgacagcccacacaggauucucgauggcaaaaauuguacccugaucgacgcccuucugggggauccgcauugcgacggauuuaagaacaaagagugggauuuguucguggaacgguccacugcuuauucuaauuguuaccccuaugacgucccugauuacgcaucgcuccgcucacugguggccagcaguggcacacuggaguuuaccaacgaagguuucaauuggacggggguugcucaggacggaacuuccuaugcaugcaagcgaggcucugucaagagcuuuuucucccgucucaacugguuacacaaacuggaguacaaguauccagcccuuaccgugacaaugcccaauaacgauaaauuugacaaguuguacauauggggcgugcaucacccuucaacugauagugaccagaccagcaucuacguacaggcuucugggagaguuacaguguccaccaaaaggucacaacagacggucauuccaaauaucggaagccggcccugggugcgcggugugaguucuagaauuuccaucuauuggacuauagucaagccuggcgacauucugcuaaucaacagcacagggaaucucauugccccaaggggauacuucaagauccggucgggcaaaucuuccaucaugcgcucagaugcgccgauugacaacuguaacagugagugcauaacccccaaugguagcaucccuaacgauaagccauuucagaauguuaaccgaauuacuuauggggcaugucccagauacgugaaacaaaauacacugaaacuugccaccggaaugaggaacguaccugaaaagcagacgcggggcaucuucggcgcuauagccggguuuauugagaauggaugggaagguaugguggacggcugguauggguuccgucaccagaacuccgagggaaccggccaggcagcugaucugaagucuacacaagccgcgaucaaucagaucaacgguaaauugaaucgccucauugagaagacuaacgaaaaguuucaucagaucgagaaagaguucagcgaagucgaagggaggauucaagaccuggagaaguacguggaggauaccaaaauagacaucuggucauauaaugccgaauuacugguugcacucgagaaccagcacacaauugaucuuacugacagugaaaugaauaagcuguucgagagaacccggaaacaguugcgagaaaacgcugaggauaugggcaacggaugcuuuaagaucuaccauaagugugacaaugccugcaucggcuccauucgcaacgggacauacgaccacgauguguauagagacgaggcucuaaauaacagguuccagauaaaaggagucgaacuaaagagcgguuacaaagauuggauccucuggauuucuuuugccaucucaugcuuccugcuuugugugguacuguugggcuuuauuaugugggcaugccaaaaggggaauauccgguguaacauaugcaucuga

SEQ ID NO: 136566 - RNA, 1701 nt, Artificial Sequence
  derived and/or modified CDS sequence (opt3) from hemagglutinin__InfluenzaA__AFG72757
augaagaccaucauugcccugagcuacauacucugccuuguguucgcucagaaaauccccggcaacgacaauuccacagcaacucuguguuuggggcaccaugccgucccuaacggaacguuaguuaagaccauuacaaaugaucaaaucgaggugacuaacgcgaccgaacugguacagucuucaaguacagguagaauuugcgacagcccacacaggauccuagauggcgagaauuguacccucauagacgcucugcuuggggauccgcauugcgacggauuucagaacaaagaaugggaucuguucguggagcgguccaaggccuauucuaauuguuaccccuaugacgucccugauuacgcaucguugcgcucacucguggccagcaguggcacucuggaauuuaacaaugaguccuucaacuggacagguguugcucagaaugggaccucuuaugcaugcaaacgaagcuccaucaagucauuuuucagucgucugaacuggcuccaccaauuaaaguacaaauauccagcccugaaugugacgaugcccaacaaugacaaguuugauaaacuuuacauuuggggaguccaucacccuagcacugacucugaucagaccuccaucuacgcucaggccucaggcagagugacaguaagcacuaagaggagucagcaaaccguuauuccaaacaucggcucucggcccugggugcgcgggauauccagcagaauuucgauccacuggacaauugucaaaccuggagacaucuugcugaucaacucuaccgguaaucuaauugcgccaaggggcuauuucaagauacgguccgggaagucaaguaucaugcgcagcgacgcaccgauuggaaaauguaacuccgagugcaucacgcccaauggcucuauaccuaacgauaagccauuucagaaugugaaccgaauuacuuacggugccugucccagauaugugaaacagaauacacucaagcuggcuaccgggaugaggaacgucccugaaaaacagacucggggaaucuucggcgccaucgcaggcuuuauugagaaugggugggaaggaaugguugacgguugguacggcuuccgucaucaaaacagcgaggggacaggacaggcugccgaucuuaagucaacccaggcggccaucaaucaaauuaacggcaaacugaaucgcuugauagagaagacgaacgaaaaguuucaccagaucgagaaagaguucagugaaguggaagguaggauucaggaccucgagaaguauguagaggauaccaaaaucgaccugugguccuacaaugcagaauuacugguggcucucgagaaccagcauacaaucgaucuuacugacagcgaaaugaacaagcuguucgagagaacccggaaacaauugcgagaaaaugccgaggauauggggaacggcugcuuuaagauuuaucacaagugugacaaugcuugcauaggaucuauccgcaacggcacauacgaucacgacgucuacagagacgaggcccuaaauaacagguuccagauuaaagggguggaacugaagucaggauauaaagauuggauccucuggauuaguuuugcaaucagcugcuuccugcuuuguguugugcuguuggguuuuauaaugugggccugccagaagggcaauauccgguguaacauuugcaucuga

SEQ ID NO: 136567 - RNA, 1701 nt, Artificial Sequence
  derived and/or modified CDS sequence (opt3) from hemagglutinin__InfluenzaA__AFG72779
augaagaccaucauugcccugagcuacauacucugccuuguguucgcucagaaacugcccggcaacgacaauuccacagcaacuuuguguuuagggcaccaugccgucccuaacggaacgcugguuaagaccaucacaaaugaucaaauugaggugacuaacgcgaccgaacuuguacagucuucaaguacagguagaaucugcgacagcccacacaggauucucgauggcgagaauuguacccugaucgacgcucuacugggggauccgcauugcgacggauuucagaacaaagaaugggauuuguucguggagcgguccaaggccuauucuaauuguuaccccuaugacgucccugauuacgcaucgcuccgcucacugguggccagcaguggcacucuggaauuuaacaaugaguccuucaacuggacagguguugcucagaaugggaccucuagcgcaugcaaacgacguuccauaaagucauuuuucaguagacucaacugguuacaccaacugaaguauaaauacccagcccuuaaugugacgaugcccaacaaugacaaguuugauaaauuguauaucuggggaguccaucacccuagcacugacucugaucagaccucccuguacgcucaggccucaggcagggugacaguaagcacucggcgcagucagcaaaccguuauuccaaacaucggcucuagacccugggugaggggagucuccagcgggauuucgaucuacuggacaauagugaagccuggugacauucuacucaucaacucuaccggcaaucugauugcgccacggggguauuucaaaauccgcuccggaaagucaaguaucaugcgaagcgacgcaccgauuggcaaguguaacuccgagugcauaacgcccaaugguucuaucccuaacgauaaaccauuucagaaugugaacagaauuacuuacggggccugucccagguaugucaagcagaauacacuuaaacuggcuaccggaaugcggaacguuccugaaaagcagacucguggcaucuucggcgccauagcaggguuuauugagaauggaugggaagguaugguggacggcugguacggguuccgccaccaaaacagcgagggaacaggccaggcugccgauuugaaaucaacccaggcggccaucaaucaaaucaacgguaagcucaauagacugauugagaaaacgaacgaaaaguuucaucagaucgagaaggaguucagugaaguagaagggaggauucaggacuuagagaaauauguggaggauaccaagauagaccugugguccuacaaugcagaacuccuugucgcucuggagaaccagcacacaaucgauuugacugacagcgaaaugaacaaacuauucgagcggacccgaaagcaacugcgcgaaaaugccgaggauaugggcaacggaugcuuuaaaauuuaucauaagugugacaaugcuugcaucggcucuaucagaaacgggacauacgaucacgacguguacagggacgaggcccucaauaaccgguuccagauuaagggaguugaacugaaaucagguuauaaggauuggauacuuuggaucaguuuugcaauuagcugcuuccuguugugugugguccuccugggcuuuaucaugugggccugccagaaagggaauauucgcuguaacaucugcauauga

SEQ ID NO: 136568 - RNA, 1701 nt, Artificial Sequence
  derived and/or modified CDS sequence (opt3) from hemagglutinin__InfluenzaA__AFG72801
augaagaccaucauugcccugagcuacauacucugccuuguguucgcucagaaacugcccggcaacgacaauuccacagcaacuuuguguuuagggcaccaugccgucucuaacggaacgcugguuaagaccaucacaaaugaucaaauugaggugacuaacgcgaccgaacugguacagucaaguagcacagguagaaucugcgacuccccucaccagauucucgauggcgagaauuguacccugaucgacgcccuucugggggauccacauugcgacggauuucagaacaaagaaugggauuuguucguggagaggucuaaggcuuauucgaauuguuacccguaugacguccccgauuacgcaucacuccggagccugguggccaguuccggcacucuggaauuuaacaaugagucuuucaacuggacagguguugcucaaaaugggaccagcuccgcaugcaaacgccgaucaaacaaguccuuuuucagccgucucaauugguuacaccagcugaaguauaaauacccugcccuuaacgugacgaugccaaauaacgagaaguuugacaaauuguauauauggggaguccaucaccccucuacugauuccgaccagaucucaauuuacgcucagagcaguggcagagugaccguaucuacaaagaggucccaacagacuguuaucccuaacauuggcagcucgccaugggugcgcggggucucuucccggaucucaauauacuggaccauugugaaacccggagauauccugcuaauuaauaguacagguaaccucaucgccccuagaggcuauuucaagaucaggagcgggaaguccucuauuaugcggagcgacgcgccaauaggaaaauguaauucagaaugcaucaccccgaacggcaguauucccaaugacaagccuuuucagaacgugaaucgcaucacguacggugcauguccacgauaugucaaacagaacacucugaaacuugccacagggaugagaaauguucccgagaagcaaaccaggggaauauucggcgcuauugccggcuuuaucgaaaacgggugggagggaaugguggaugguugguacggcuuccggcaccagaauagugaggggacuggacaggcagcugaccuaaagagcacacaagccgcgaucaaccagauuaauggcaaauugaaccgucucaucgaaaagaccaaugagaaguuucaucagauugaaaaagaguucucugaaguagagggucgcauacaggaucuggagaaguauguggaagacacgaaaaucgauuuauggucauacaacgccgagcugcucgucgcacuugaaaaccaacacaccauugaccugacagauagugagaugaauaaguuguucgaaagaacuaaaaagcagcuaagggagaacgcugaggacauggggaauggcugcuuuaagaucuaucauaaaugugauaacgccugcaucggaagcauucggaauggcaccuacgaccacgauguguaccgagacgaagcucugaacaaucgcuuccagauaaaggggguugagcucaaauccggauauaaggacuggauccuguggauuucuuuugccaucucgugcuuccuucuguguguggucuugcucgguuuuauuaugugggcaugccagaaaggcaacaucagauguaauauaugcaucuga

SEQ ID NO: 136569 - RNA, 1701 nt, Artificial Sequence
  derived and/or modified CDS sequence (opt3) from hemagglutinin__InfluenzaA__AFG72812
augaagaccaucauugcccugagcuacauacucugccuuguguucgcucagaaacugcccggcaacgacaauuccacagcaacuuuguguuuagggcaccaugccgucccuaacggaacgcugguuaagaccaucacaaaugaucaaauugaggugacuaacgcgaccgaauugguacagucuucaaguacagguagaaucugcgacagcccacaccagauucucgauggcgagaauuguacccugaucgacgcccuucugggggauccgcauugcgacggauuucagaacaaagaaugggauuuguucguggagagguccaaggcuuauucuaauuguuaccccuaugacgucccugauuacgugucgcuccggucacugguugcaagcaguggcacucuggaauuuaacaaugaguccuucaacuggacagguguggcccaaaaugggaccucuagcgcuugcaaacgccgauccaacaagucauuuuucagucgucucaauugguuacaccagcugaaguauaaauacccagcacuuaacgucacgaugcccaauaacgagaaguuugacaaauuguauauauggggagugcaucacccuggcacugauagcgaccagaucucucuguacgcccaggcuuccggcagaguaaccguuucaacaaagaggagccaacagacugugauuccaaacaucgggagucggcccuggguccgcggagugucuuccagaauuagcaucuacuggaccauagugaaaccuggugauauucuacucaucaauucgacaggcaaccugauugccccaaggggguauuucaagauccggucuggaaaguccucaaucaugcgcagugacgcgccgauuggcaaauguaauagcgaaugcauaacccccaacgguuccaucccuaaugacaagccauuucagaacgucaaucgaauuacguacggggcaugucccagauauguuaaacagaacacucuuaagcuggccacaggaaugaggaaugugccugagaaacaaacccggggcaucuucggcgcuauagccggguuuauugaaaacggaugggaggguaugauggauggcugguacggguuccgucaccuaaauucugagggaacuggccaggcagcugaccucaagagcacacaggccgcgaucaaccaaaucaaugguaaacugaaccgcuuaauugaaaagaccaaugagaaguuucaucagaucgaaaaagaguucucagaaguagaggggaggauucaggaucuggagaaguauguggaagacacgaaaauagaucucuggaguuacaacgccgagcuucuggucgcauuggaaaaccagcacaccaucgaccuaacagauuccgagaugaauaagcuguucgaaagaacuaaaaagcaacuccgggagaacgcugaggacaugggcaauggaugcuuuaagauuuaucauaaaugugauaacgccugcaucggcagcauccgaaaugggaccuacgaccacgauguguaccgcgacgaagcucugaacaauagauuccagauuaagggaguugagcuuaaaucugguuauaaggacuggauacuguggaucucauuugccauuaguugcuucuugcucuguaucgugcuguuaggcuuuauuaugugggcaugccagaaagggaacaucagguguaauauaugcaucuga

SEQ ID NO: 136570 - RNA, 1701 nt, Artificial Sequence
  derived and/or modified CDS sequence (opt3) from hemagglutinin__InfluenzaA__AFG72823
augaagaccaucauugcccugagcuacauacucugccuuguguucgcucagaaacugcccggcaacgacaauuccacagcaacuuuguguuuagggcaccaugccgucccuaacggaacgaucguuaagaccauuacaaaugaucaaaucgaggugacuaacgcgaccgaacugguacagucuucaaguacagguggcauuugcgacagcccacaccagauccuagauggggagaauuguacccucauagacgcucugcuuggagauccgcagugcgacggcuuucaaaacaaaaagugggaucuguucguggaaagauccaaagccuauucuaauuguuaccccuaugacgucccugauuacgcaucguugaggucacucguggccagcagugguacucuggaguuuaacaaugaauccuucaacuggacagggguuacccagaauggaacgucuagcgcuugcaagcggcgcuccaacaagucauuuuucagucgacugaauuggcucacucauuuaaaauauaaguacccagcacugaacgugaccaugcccaauaacgagaaauuugacaaacuuuauaucuggggcgucuugcacccuggcacagauagcgaccagauuucucuguacgcccaggcuuccgggcguaucacugugucaaccaagagaagccaacagacaguaauuccaaacaucggaaguaggccccggguucgcggugugucuuccagaauaagcauuuacuggaccaucgucaagccuggcgauauucuacucaucaauucgacggggaaccugaucgccccaaggggauauuucaagauucggucuggcaaauccucaauaaugcgcagugacgcgccgaucgguaaguguaauagcgagugcauuacucccaacggguccaucccuaaugacaaaccauuucagaacgugaaucgaauaacauacggagcaugucccagauauauuaagcagaacacccuuaaacuggccacuggcaugaggaaugugccugaaaagcaaacacggggcaucuucggggcuaucgccggauuuauugagaacgguugggaaggcauggucgaugggugguacggauuccgucaucaaaauucugagggcaccggucaggcagcugacuugaaaagcacgcaggccgcgaucaaccagauuaaugggaagcucaaccgccugauaggcaagaccaaugagaaauuucaccagaucgaaaaggaguucucagaaguugagggaaggauucaggauuuagaaaaauauguggaggacacaaagaucgaucuguggaguuacaacgccgagcuccuuguagcacuggaaaaccaacacacuaucgacuugaccgauuccgagaugaauaaacuauucgaaagaacaaagaagcagcugcgggagaacgcugaagacaugggcaaugggugcuuuaaaauuuaucauaagugugauaacgccugcauaggaagcauccgaaaugguacuuacgaccacgauguguaccgcgacgaggcucucaacaauagauuccagauuaaaggcgucgagcugaagucuggguauaaagacuggauccuuuggauuucauuugccaucaguugcuuccuguuguguguggcacuccugggauuuauaaugugggccugccagaagggcaacaucagguguaauauuugcaucuga

SEQ ID NO: 136571 - RNA, 1701 nt, Artificial Sequence
  derived and/or modified CDS sequence (opt3) from hemagglutinin__InfluenzaA__AFG72834
augaagaccaucauugcccugagcuacauacucugccuuguguucgcucagaaacugcccggcaacgacaauuccacagcaacuuuguguuuagggcaccaugccgucccuaacggaacgcugguuaagaccaucacaaaugaucaaauugaggugacuaacgcgaccgaacuuguacagucuucaaguacagguagaaucugcgacagcccacaccagauucucgauggcgagaauuguacccugaucgacgcucuacugggggauccgcauugcgacggauuucagaacaaagaaugggauuuguucguggagagguccaaggccuauucuaauuguuaccccuaugacgucccugauuacgugucgcuccggucacugguugcaagcaguggcacucuggaauuuaacaaugaguccuucaacuggacagguguggcccaaaaugggaccucuagcgcuugcaaacgccgauccaacaagucauuuuucagucgucucaauugguuacaccagcugaaguauaaauacccagcacuuaacgucacgaugcccaauaacgagaaguuugacaaauuguauauauggggagugcaucacccuggcacugauagcgaccagaucucucuguacgcccaggcuuccggcagaguaaccguuucaacaaagaggagccaacagacugugauuccaaacaucgggagucggcccuggguccgcggagugucuuccagaauuagcaucuacuggaccauagugaaaccuggugauauucuacucaucaauucgacaggcaaccugauugccccaaggggguauuucaagauccagucuggaaaguccucaaucaugcggagugacgcgccgauuggcaaauguaauagcgaaugcauaacccccaacgguuccaucccuaaugacaagccauuucagaacgucaaucgcauuacguacggggcauguccccgauauguuaaacaaaacacucuuaagcuggccacaggaaugagaaaugugccugagaaacagaccaggggcaucuucggcgcuauagccggguuuauugaaaacggaugggaggguaugauggauggcugguacggguuccggcaccagaauagcgagggaacuggccaagcagcugacuugaagucuacacaggccgcgaucaaccagaucaaugguaaacucaaccgucugauugaaaagaccaaugagaaguuucaucagaucgaaaaagaguucucagaaguagaggggcgcauucaagauuuagagaaguauguggaagacacgaaaauagaucuguggaguuacaacgccgagcuccuugucgcacuggaaaaccagcacaccaucgacuugacagauuccgagaugaauaagcuauucgaaagaacuaaaaagcagcugagggagaacgcugaggacaugggcaauggaugcuuuaagauuuaucauaaaugugauaacgccugcaucggcagcauccggaaugggaccuacgaccacgauguguaccgagacgaagcucucaacaaucgcuuccagauuaagggaguugagcugaaaucugguuauaaggacuggauacuuuggaucucauuugccauuaguugcuuccuguuguguaucgugcuccugggcuuuauuaugugggcaugccaaaaagggaacaucagauguaauauaugcaucuga

SEQ ID NO: 136572 - RNA, 1701 nt, Artificial Sequence
  derived and/or modified CDS sequence (opt3) from hemagglutinin__InfluenzaA__AFG72845
augaagaccaucauugcccugagcuacauacucugccuuguguucgcucagaaacugcccggcaacgacaauuccacagcaacuuuguguuuagggcaccaugccgucccuaacggaacgcugguuaagaccaucacaaaugaucaaauugaggugacuaacgcgaccgaacuuguacagucuucaaguacaagcagaaucugcgacuccccacaccagauucucgauggugagaauuguacccugaucgacgcucuacugggcgauccgcauugcgacggguuucagaacaaagaaugggauuuguucguggagaggucuaaggccuauucgaauuguuaccccuaugacgucccugauuacgugucacuccggagccugguugcaaguuccggaacucuggaauuuaacaaugagucuuucaacuggacaggcguggcccaaaaugguaccagcuccgcuugcaaacgccgaucagacaagagcuuuuucagucgucucaacugguuacaccagcugagauauaaguacccagcacuuaaugucacgaugcccaacaaugagaaauuugauaaguuguauauauggggagugcaucacccugggacugacucugaucagaucucccuguacgcccaggcuucaggcaggguaaccauuagcacaaaacggagucaacagacuguuaucccaaacauuggcucucgccccugggugagaggggucuccagcaggaucucgauacacuggaccauugugaagccuggagacauccuacucauuaacucuacagguaaucugaucgccccacggggcuacuucaaaauccgcuccgggaagucaaguauuaugcgaagcgacgcgccgauaggaaaguguaacuccgaaugcaucacccccaauggcucuauuccuaacgauaaaccauuucagaaugugaacagaaucacguauggugcaugucccagguacgucaagcagaaaacucuuaagcuggccacagggaugcggaauguuccugagaaacaaacccguggaauauucggcgcuauugccggcuuuaucgaaaacgggugggagggaaugauggacgguugguauggcuuccgccaucagaauagcgaggggacuggacaggcagcugauuugaagucaacacaagccgcgaucaaccagauuaauggcaaacucaacagacugaucgaaaagaccaaugagaaguuucaccagauugaaaaagaguucagugaaguggaggguaggauacaggacuuagagaaguacguagaagauacgaaaaucgaccugugguccuauaacgccgagcuccuuguggcacuggaaaaucaacauaccauugauuugacagacagcgagaugaacaagcuauucgaacggacuaaaaagcagcugcgagagaacgcugaggauauggggaauggcugcuuuaagaucuaccacaaaugugacaacgccugcaucggaucuauucgcaauggcaccuaugaucacgacgucuacagagacgaagcucucaacaauagguuccagauaaaggggguggagcugaaaucaggauacaaggauuggauccuuuggauuaguuuugccaucagcugcuuccuguuguguauuguucuccuggguuuuaucaugugggcaugccagaaaggcaacauacgguguaauaucugcauuuga

SEQ ID NO: 136573 - RNA, 1701 nt, Artificial Sequence
  derived and/or modified CDS sequence (opt3) from hemagglutinin__InfluenzaA__AFG72856
augaagaccaucauugcccugagcuacauacucugccuuguguucgcucagaaacugcccggcaacgacaauuccacagcaacuuuguguuuagggcaccaugccgucccuaacggaacgaucguuaagaccauuacaaaugaucaaaucgaggugacuaacgcgaccgaacugguacagucuucaaguacagguggcauuugcgacagcccacaccagauccuagauggggagaauuguacccucauagacgcucugcuuggagauccgcagugcgacggcuuucaaaacaaaaagugggaucuguucguggaaagauccaaagccuauucuaauuguuaccccuaugacgucccugauuacgcaucguugaggucacucaucgccagcagugguacucuggaguuuacaaacgaauccuucaauuggaccggggugacgcagaacggaacuucuagcgcuugcaagcggcgcuccaauaagucauuuuucagucgacugaacuggcucacccauuuaaaauauaaguacccagcacugaauguuacaaugcccaacaaugagaaauuugacaaacuuuauauuuggggcgugcaccauccuggcacugauagcgaccagaucucuuuguacgcccaggcuuccgggcguauuaccgucucaacaaagagaagccaacagaccgugaucccaaacauaggaaguaggccccggguacgcgauauuucuuccagaaucagcauuuacuggacgaucguuaagccuggugacauccugcuaauuaacucgacuggcaaucucauagccccaaggggguauuucaagauccggucuggaaaauccucaauuaugcgcagugacgcgccgaucggcaaguguaacagcgagugcauaacacccaaugguuccauuccuaacgauaaaccauuucagaaugugaaccgaaucaccuacggggcaugucccagauaugucaagcagaauacucugaaacuugccacaggaaugaggaacgugccugaaaagcaaacccggggcaucuucggcgcuauugccggguuuaucgagaauggaugggaagguaugguggacggcugguacggguuccgucaccagaacucugagggaacgggccaggcagcugaucugaaaagcacccaagccgcgauuaaucagauaaacgguaaguugaauaagcucaucgggaaaacaaacgagaaguuucaccagauugaaaaagaguucucagaagucgagggccgcauccaggaccuggaaaaguauguugaggauacuaaaaucgacuuauggaguuacaaugccgagcugcucguggcacuugaaaaccaacauaccauugaucugacagacuccgagaugaacaaguuguucgaaagaacuaagaaacagcuaagggagaaugcugaagauaugggaaacggcugcuuuaagauauaucacaaaugugacaaugccugcaucgggagcauucggaacggaaccuacgaucaugacguauaccgagacgaggcucugaauaaccgcuuccagaucaaggguguggagcucaaaucuggcuauaaggauuggauucuguggaucucauuugccauaaguugcuuccuucugugugucguguugcucggguuuaucaugugggcaugccagaagggaaauauuagauguaacaucugcauuuga

SEQ ID NO: 136574 - RNA, 1701 nt, Artificial Sequence
  derived and/or modified CDS sequence (opt3) from hemagglutinin__InfluenzaA__AFG72867
augaagaccaucauugcccugagcuacauacucugccuuguguucgcucagaaacugcccggcaacgacaauuccacagcaacuuuguguuuagggcaccaugccgucccuaacggaacgcugguuaagaccaucacaaaugaucaaauugaggugacuaacgcgaccgaauugguacagucuucaaguacagguagaaucugcgacagcccacaccagauucucgauggcgagaauuguacccugaucgacgcccuucugggggauccgcauugcgacggauuucagaacaaagaaugggauuuguucguggagagguccaaggcuuauucuaauuguuaccccuaugacgucccugauuacgugucgcuccggucacugguugcaagcaguggcacucuggaauuuaacaaugaguccuucaacuggacagguguggcccaaaaugggaccucuagcgcuugcaaacgccgauccaacaagucauuuuucagucgucucaauugguuacaccagcugaagaacaaauauccagcacuuaaugucacgaugcccaacaacgagaaguuugacaaauuguacauauggggagugcaucacccuggcacugauagcgaccagaucucucuguaugcccaggcuuccggcagaguaaccguuucaacaaagaggagccaacagacugugauuccaaauaucgggagucggccccgcgucagagauauuucuuccaggaucagcauauacuggaccauugugaaaccuggagacauccuacucauuaacucgacagguaaucugaucgccccacggggcuacuucaagauccgcucugggaaguccucaauuaugcgaagugacgcgccgauaggaaaauguaacagcgaaugcaucacccccaauggcuccauuccuaacgauaagccauuucagaaugugaacagaaucacguauggugcaugucccagguacgucaaacagaauacucuuaagcuggccacagggaugcggaacguuccugagaaacaaacccguggaauauucggcgcuauugccggcuuuaucgaaaaugggugggagggaaugauggacgguugguauggcuuccgccaccagaacucugaggggacuggacaggcagcugaucuaaagagcacacaagccgcgaucaaucagauuaacggcaaacucaauagacugaucgaaaagaccaacgagaaguuucaucagauugaaaaagaguucucagaaguggaggguaggauacaggacuuagagaaguacguagaagauacgaaaaucgaccuguggaguuauaacgccgagcuccuuguggcacuggaaaaucaacacaccauugauuugacagacuccgagaugaacaagcuauucgaacggacuaaaaagcagcugcgagagaaugcugaggauauggggaacggcugcuuuaagaucuaccauaaaugugacaaugccugcaucggaagcauucgcaacggcaccuaugaucacgacgucuacagagacgaagcucucaauaacagguuccagauaaaggggguggagcugaaaucuggauacaaggauuggauccuuuggauuucauuugccaucaguugcuuccuguuguguauuguucuccuggguuuuaucaugugggcaugccagaaaggcaauauacgguguaacaucugcauuuga

SEQ ID NO: 136575 - RNA, 1701 nt, Artificial Sequence
  derived and/or modified CDS sequence (opt3) from hemagglutinin__InfluenzaA__AFG72922
augaagaccaucauugcccugagcuacauacucugccuuguguucgcucagaaacugcccggcgacgauaacuccacagcaacuuuguguuuagggcaccaugccgucccuaauggaacgaucguuaagaccauuacaaacgaccaaaucgaggugacuaaugcgaccgaacugguacagucuucaaguacaggugagauuugcgauagcccacaccagauccuagacggcgaaaacuguacccucauagaugcucugcuuggggacccgcagugcgauggauuucaaaauaaaaagugggaccuguucguggagagauccaaagccuauucuaacuguuaccccuaugaugucccugacuacgcaucguugaggucacucguggccagcaguggcacucuggaauuuaauaacgaguccuucaauuggacagguguuacccagaacgggacgucuagcuccugcauccggaagucaaauaacagcuuuuucagucgccugaauuggcucacucauuuaaaguuuaaauauccagcucugaacgugaccaugcccaauaacgagcaguucgauaaacuuuacauuuggggaguccaccauccuggcacagacaacgaucagaucuuuuuguaugcacaagccucuggccgaauuacuguguccaccaagcguucacagcagacaguaaucccaaauauagggagcagacccaggguucggaacauuccuagucgcaucucuauuuacuggaccaucgugaagccaggagacauccugcuaauuaauuccacggguaaccucauagcuccgagaggcuacuucaaaaucaggagcgggaagucgucuauuaugcgguccgacgcccccaucggaaaguguaauucagaaugcauaacuccuaacggcaguauuccaaaugauaaacccuuucagaacgucaaucgcaucacauauggugcguguccucgauacgugaagcaaaacacccugaaacuugcaacugggaugagaaaugugccagagaagcagacaaggggaaucuucggcgccauugcuggcuuuaucgaaaacgggugggagggaauggucgacgguugguauggcuuccggcaccagaauagcgaggggcguggacaagccgcagaucugaaauccacccaggcugccauugaccagauaaacggcaaguugaaucgccucaucgguaaaacgaacgaaaaguuccaccagauugagaaggaauuuucugagguugaagggagaauccaagaucuggagaaauacguggaggacaccaagaucgauuuauggagcuauaacgcggaacugcucguagcccuugagaaucagcauacaauugaccugacugauucagaaaugaacaaauuguucgagaagaccaaaaagcagcuaagggaaaaugcagaggacaugggcaacggaugcuuuaagauauaccacaaaugugauaaugcuugcaucggcaguauucggaacgggacauaugaccaugacguguaccgagaugaggcccugaauaaccgcuuccagaucaagggagucgaacucaaauccgguuacaaggacuggauucuguggaucagcuuugcuauaucuugcuuccuucuguguguggccuugcucggcuuuaucaugugggcaugccaaaaagggaauauuagauguaacaucugcauuuga

SEQ ID NO: 136576 - RNA, 1701 nt, Artificial Sequence
  derived and/or modified CDS sequence (opt3) from hemagglutinin__InfluenzaA__AFG72933
augaagaccaucauugcccugagcuacauacucugccuuguguucgcucagaaacugcccggcaacgacaauuccacagcaacuuuguguuuagggcaccaugccgucccuaacggaacgaucguuaagaccauuacaaaugaucaaaucgaggugacuaacgcgaccgaacugguacagucuucaaguacaggugagauuugcgacagcccacaccagauccuagauggcgaaaauuguacccucauagacgcucugcuuggggauccgcagugcgacggauuucaaaacaaaaagugggaucuguucguggagagauccaaagccuauucuaauuguuaccccuaugacgucccugauuacgcaucguugaggucacucguggccagcaguggcacucuggaauuuaacaaugaguccuucaacuggacagguguuacccagaaugggacgucuagcgcuugcgugcggcgcuccaacaauucauuuuucagucgacugaacuggcucacucauuuaaaguuuaaguauccagcacugaaugucaccaugcccaacaacgagcaguucgacaaacuuuacaucuggggagugcaccauccuggcacagauaaugaccagaucuuuuuguaugcccaagcuagcggccguauuacuguaucuaccaagagaucccagcagacaguuauuccaaacaucgggucaaggccccgggugcgcaauauaccuagcagaauuaguaucuacuggaccauugucaaaccaggagauauccugcuaaucaacucuacggguaaucucauugccccgaggggcuacuucaagauacgguccgggaaaagcucgaucaugcgcucugacgcgcccauuggaaaguguaacuccgaaugcaucacuccuaauggcucaauaccaaacgacaagcccuuucagaaugugaaccgaauuacauauggugcauguccuagauacgugaaacaaaauacccugaagcuggccacugggaugaggaacgucccagagaaacagacacggggaaucuucggcgcuaucgccggcuuuauugaaaaugggugggagggaaugguugaugguugguauggcuuccgucaccagaacagugaggggcgcggacaagcagcugaccuuaagagcacccaggccgcgaucgaucagauuaauggcaaauugaacagacucauagguaagacgaacgaaaaauuccaccagaucgagaaggaauuuuccgagguggaagggaggauucaagaccuggagaaguacguagaggauaccaaaaucgacuuauggucuuauaaugccgaacugcucguggcacuugagaaccagcauacaaucgaucugacugacagcgaaaugaauaaguuguucgagaaaaccaagaaacagcuacgggaaaacgcugaggauaugggcaauggaugcuuuaagauuuaccacaagugugacaacgccugcauaggcucaauccgaaaugggacauaugaucaugacgucuaccgcgacgaggcucugaacaauagauuccagauuaaaggaguggaacucaagagugguuacaaagauuggauccuguggauuuccuuugccaucagcugcuuccuucuguguguugcauugcucggcuuuauaaugugggccugccaaaaggggaacaucagguguaauauuugcaucuga

SEQ ID NO: 136577 - RNA, 1701 nt, Artificial Sequence
  derived and/or modified CDS sequence (opt3) from hemagglutinin__InfluenzaA__AFG72955
augaagaccaucauugcccugagcuacauacucugccuuguguucgcucagaaacugcccggcaacgacaauuccacagcaacuuuguguuuagggcaccaugccgucccuaacggaacgaucguuaagaccauuacaaaugaucaaaucgaggugacuaacgcgaccgaacugguacagucuucaaguacaggugagauuugcgacagcccacaccagauccuagauggcgaaaauuguacccucauagacgcucugcuuggggauccgcagugcgacggauuucaaaacaaaaagugggaucuguucguggagagauccaaagccuauucuaauuguuaccccuaugacgucccugauuacgcaucguugaggucacucaucgccagcaguggcacucuggaauuuaacaaugaguccuucaacuggacaggugugacccagaaugggacgucuagcgcuugcauucggcgcuccaacaauucauuuuucagucgacugaacuggcucacucauuuacguuuuaaguauccagcacugaauguuaccaugcccaacaacgagcaguucgacaaguuguacaucuggggagugcaccauccuggcacagauaaugaccagauuuuucuuuaugcccaagcuagcggcagaaucacugucucuaccaaaaggucccagcagacagugauaccaaacauugggucacggccccgcguaagaaauaucccuagcaggauuaguaucuacuggaccaucguuaagccaggagauauucugcuaauaaacucuacggguaaucucaucgccccgcggggcuacuucaaaauucgcuccggaaagagcucgaucaugcgaucugacgcgcccauagggaaauguaacuccgaaugcauuacuccuaauggcucaaucccaaacgacaagcccuuucagaaugugaacagaaucacauauggugcauguccuagguacgucaagcaaaauacccugaaacuugccacugggaugcggaacgugccagagaagcagacacguggaauuuucggcgcuaucgccggcuuuauugaaaaugggugggagggaaugguggaugguugguauggcuuccgccaccagaacagugaggggagaggacaagcagcugaccugaaaagcacccaggccgcgauagaucagaucaauggcaaguugaacaggcucauugguaaaacgaacgaaaaguuccaccagaucgagaaagaauuuuccgaggucgaagggcggauccaagaccuggagaaguacguugaggauaccaagauugacuuauggucuuauaaugccgaacugcucguggcacuugagaaccagcauacaauagaucugacugacagcgaaaugaauaaauuguucgagaagaccaaaaagcagcuacgagaaaacgcugaggauaugggcaauggaugcuuuaaaaucuaccacaagugugacaacgccugcauuggcucaauccgcaaugggacauaugaucaugacguauacagagacgaggcucugaacaauagguuccagauuaagggaguggaacucaaaagugguuacaaggauuggauccuguggauauccuuugccaucagcugcuuccuucugugugucgcauugcucggcuuuauuaugugggccugccaaaaagggaacauccgguguaauauuugcaucuga

SEQ ID NO: 136578 - RNA, 1701 nt, Artificial Sequence; identical to SEQ ID NO: 129688
  derived and/or modified CDS sequence (opt3) from hemagglutinin__InfluenzaA__AFG98808

SEQ ID NO: 136579 - RNA, 1701 nt, Artificial Sequence; identical to SEQ ID NO: 129688
  derived and/or modified CDS sequence (opt3) from hemagglutinin__InfluenzaA__AFG98819

SEQ ID NO: 136580 - RNA, 1701 nt, Artificial Sequence
  derived and/or modified CDS sequence (opt3) from hemagglutinin__InfluenzaA__AFG98830
augaagaccaucauugcccugagcuacauauucugccucgugcuuggccaggaccugcccgggaacgauaaauccacagcuacuuuguguuuaggacaccaugcagucccuaaugguacgcugguuaagaccaucacaaacgaccaaauugaggugacuaaugccaccgaacuuguacagucuucaaguacaggcaaaaucugcaacaauccacacaggauucucgaugggaucgacuguacccugauagaugcgcuucugggagacccgcauugcgauggcuuucagaacgagacuugggacuuguucguggaaagaagcaaggcuuuuuccaauuguuaucccuacgaugucccugacuaugccucucuccggucgcugguggcaucaagcgguacacuggaguucaucaccgaaggguuuacguggacuggaguuacccagaacggcggcaguuccgccugcaaacgcgggccaggaucugguuucuuuagccgacucaauugguuaacaaaguccggcucaacuuaccccgugcugaacgucaccaugccuaauaacgauaauuucgacaagcuauauauuuggggagugcaccauccaaguacaaaccaagagcagaccagcuuguacguacaggcuucugggcguguuacgguguccacuagaaggucacagcaaacaaucauucccaauaucggcagccggccuuggguccgcggucugaguucuagaauauccauuuauuggaccaucgugaaaccaggggauauucuaaucaucaacagcaacggaaaucucauugcaccgaggggcuacuuuaagaugcggacuggcaaaucgucuauaaugcgcuccgacgcccccaucgacacauguauuucagagugcaucaccccuaacgggaguauaccaaaugauaagcccuuccagaacgugaauaaaauuacguacggagcuuguccuaaguaugucaagcagaacacccugaaacuugccacagguaugcgaaauguuccagaaaagcagacuagaggccuguuuggggcgaucgcaggauucaucgagaacggcugggaagguaugauugacgggugguacggcuuuaggcaccaaaauagcgagggaaccggccaggccgcugauuugaaauccacacaggccgcaaucgaccaaauuaacgggaagcucaaucgggugauagagaaaacuaacgaaaaguuccaccagaucgagaaagaguucucugaaguagaaggacguauucaggaucuggagaaguauguggaggacaccaagaucgauuuauggagcuacaaugcugaacugcucgucgcccuugagaaccagcauacaaucgaccugaccgauucagaaaugaauaaauuguuugagaagacucgcagacaacuaagggaaaacgcggaggacauggguaacggcugcuucaaaauuuaucacaagugugauaaugccugcauagggaguauccggaacggaacguacgaccaugacguguaucgagaugaggcacugaauaaccgcuuucagauuaaaggcguugaacucaaguccgguuacaaggacuggauccuguggauuagcuucgcuaucucuugcuuucuucuguguguggucuugcucggguucauaaugugggccugccagaaaggcaauaucagauguaacauuugcaucuga

SEQ ID NO: 136581 - RNA, 1701 nt, Artificial Sequence
  derived and/or modified CDS sequence (opt3) from hemagglutinin__InfluenzaA__AFG98841
augaagaccaucauugcccugagcuacauauucugccucgugcuuggccaggaccugcccgggaacgauaaauccacagcuacuuuguguuuaggacaccaugcagucccuaaugguacgcugguuaagaccaucacaaacgaccaaauugaggugacuaaugccaccgaacuuguacagucuucaaguacaggcaaaaucugcaacaauccacacaggauucucgaugggaucgacuguacccugauagaugcgcuucugggagacccgcauugcgauggcuuucagaacgagacuugggacuuguucguggaaagaagcaaggcuuuuuccaauuguuaucccuacgaugucccugacuaugccucucuccggucgcugguggcaucaagcgguacacuggaguucaucaccgaaggguuuacguggacuggaguuacccagaacggcggcaguaaugccugcaaacgcgggccaggauccgguuucuuuucucgacucaacugguuaacaaagagcggcuccacuuaccccgugcugaaugucaccaugccuaacaaugauaacuucgacaagcuauauauuuggggagugcaccauccaucaacaaaucaagagcagaccaguuuguacguacaggcuagcgggcguguuacggugucuacuagaaggucccagcaaacaaucauucccaacaucggcucacggccuuggguccgcggucugagcaguagaauaucuauuuauuggaccaucgugaaaccaggggauauucuaaucaucaacuccaauggaaaccucauugcaccgaggggcuacuuuaagaugcggacuggcaaaagcucgauaaugcgcucugacgcccccaucgggacauguauuuccgagugcaucaccccuaauggaucaauaccaaacgacaagcccuuccagaaugugaacaaaauuacguacggugcuuguccuaaguaugucaagcagaauacccugaaacuugccacaggcaugcgaaacguuccagaaaagcagacuagagggcuguuuggagcgaucgcaggcuucaucgagaaugguugggaagggaugauugauggcugguacggauuuaggcaccaaaacagugagggcaccgggcaggccgcugacuugaaaagcacacaggccgcaaucgaucaaauuaauggaaagcucaaccgggugauagagaaaacuaaugaaaaguuccaccagaucgagaaagaguucuccgaaguagaaggucguauucaggaccuggagaaguauguggaggauaccaagaucgacuuauggucuuacaacgcugaacugcucgucgcccuugagaaucagcauacaaucgaucugaccgacagcgaaaugaacaaauuguuugagaagacucgcagacaacuaagggaaaacgcggaggauaugggcaaugggugcuucaaaauuuaucacaagugugacaacgccugcauaggaucaauccggaauggcacguacgaucaugacguguaucgagacgaggcacugaacaaucgcuuucagauuaaagguguugaacucaagaguggguacaaggauuggauccuguggauuuccuucgcuaucagcugcuuucuucuguguguggucuugcucggcuucauaaugugggccugccagaaaggaaacaucagauguaauauuugcaucuga

SEQ ID NO: 136582 - RNA, 1701 nt, Artificial Sequence; identical to SEQ ID NO: 128353
  derived and/or modified CDS sequence (opt3) from hemagglutinin__InfluenzaA__AFG98852

SEQ ID NO: 136583 - RNA, 1701 nt, Artificial Sequence
  derived and/or modified CDS sequence (opt3) from hemagglutinin__InfluenzaA__AFG98863
augaagaccaucauugcccugagcuacauauucugccucgugcuuggccaggaccugcccgggaacgauaauuccacagcuacuuuguguuuaggacaccaugcagucccuaacgguacgcugguuaaaaccaucacaaaugaccaaauugaggugacuaacgccaccgagcuaguacagucuucaaguacaggcaagaucugcaauaacccacacaggauucucgaugggaucgacuguacccugauagaugcgcuucugggagacccgcauugcgauggcuuucagaaugaaacuugggacuuguucguggaaagaagcaaggcuuuuuccaacuguuaucccuacgaugucccugacuaugccucucuccggucgcugguggcaucaagcgguacacuggaguucaucaaugaaggguuuaccuggacgggaguuacucagaacggcggcaguuccgccugcaagcgcgggccagauucuggauucuuuagccgacucaauugguuauacaaauccgguucaaccuaucccgugcugaacgucacaaugccuaauaacgacaauuucgauaaacuuuacauuuggggcgugcaccauccaaguacuaaccaagagcagaccagcuuguauguacaggcuucugggcguguuacaguguccaccaagagaucacagcaaacgaucauucccaacaucggaagcaggccuuggguccggggccugaguucucgcauauccauuuacuggacuaucgugaaaccaggugacauucuagugaucaauagcaacgggaaucucaucgcaccgagaggauacuuuaagaugaggacaggcaaaucgucuauuaugcgguccgacgcccccauaggcaccuguaucucagagugcauuacuccuaacgggaguaucccaaaugauaagcccuuccagaacgucaauaaaauaacauauggagcuuguccuaaguacguuaagcagaacacccugaaacuugccacggguaugcgcaaugugccagaaaagcagacccgaggccuguuuggggcgauugcaggauucaucgagaacggcugggaagguaugaucgacgggugguauggcuuuagacaccaaaauagcgagggaacaggccaggccgcugauuugaaauccacucaggccgcaauugaccaaaucaacgggaagcucaauaggguaauugagaaaaccaacgaaaaguuccaccagauagagaaagaguucucugaaguggaaggacggauccaggaucuggagaaguacgucgaggacacaaagauugauuuauggagcuauaaugcugaacugcucguggcccuugagaaccagcauacuaucgaccugaccgauucagaaaugaacaaauuguuugagaagacacgucgccaacuaagagaaaaugcggaggacauggguaacggcugcuucaggaucuaccacaaaugugauaaugccugcauugggaguauacggaacggaaccuaugaccaugacguuuaccgagaugaggcacugaauaaccgcuuucagaucaagggcguggaacucaaauccgguuacaaggacuggauucuguggaucagcuucgcuauuucuugcuuucuucugugugucguguugcucggguucaucaugugggccugccagaagggcaauauaagauguaacaucugcauuuga

SEQ ID NO: 136584 - RNA, 1701 nt, Artificial Sequence
  derived and/or modified CDS sequence (opt3) from hemagglutinin__InfluenzaA__AFG98874
augaagaccaucauugcccugagcuacauauucugccucgugcuuggccaggacuuucccgggaacgauaauuccacagcuacucuguguuugggacaccaugcagucccuaacgguacguuaguuaaaaccaucacaaaugaccaaauugaggugacuaacgccaccgaacugguacagucuucaaguacaggcaagaucugcaauaacccacacaggauucuagaugggaucgacuguacccucauagaugcgcugcuuggagacccgcauugcgauggcuuccagaaugagacuugggaccuguuuguggaaagaagcaaggcuuucuccaacuguuaucccuacgaugucccugacuaugccucuuugcggucgcucguggcaucaagcgguacacuggaguuuaucaaugaaggguucaccuggacgggaguuacucagaacggcggcaguaaugccugcaaacgcgggccagauaacggauuuuucucccgacugaauuggcucuacaaaucugguagcaccuaucccguguuaaacgucacaaugccuaauaacgacaacuuugauaagcuguacauuuggggcgugcaccauccauccacugaccaagagcagaccucacuuuauguacaggcuagugggcguguuacagugagcaccaagagaucucagcaaacgaucauucccaauaucggauccaggccuuggguccggggcuugucaagccgcauaaguauuuacuggacuaucgugaaaccaggugacauucuggugaucaacucuaaugggaaccuaaucgcaccgagaggauacuucaagaugaggacaggcaaauccagcauuaugcggucggaugcccccauaggcaccuguaucucugagugcauuacuccuaauggguccaucccaaacgacaagcccuuucagaaugucaacaaaauaacauauggagcuuguccuaaguacguuaagcagaauacccucaaacuggccacggguaugcgcaacgugccagaaaagcagacccgaggccuuuucggggcgauugcaggauuuaucgagaauggcugggaagguaugaucgaugggugguauggcuucagacaccaaaacucagagggaacaggccaggccgcugaccugaaaaguacucaggccgcaauugaucaaaucaaugggaaguugaacaggguaauugagaaaaccaaugaaaaguuccaccagauagagaaagaauuuagcgagguggaaggacggauccaggaccucgagaaguacgucgaggauacaaagauugaccugugguccuauaacgcugaauuacugguggcccucgagaaccagcauacuaucgaucuuaccgacucugaaaugaauaaacuguucgagaagacacgucgccaauugagagaaaacgcggaggauauggguaauggcugcuuuaaaaucuaccacaagugugacaacgccugcauugggagcauaaggaauggaaccuaugaccaugauguuuaccgggacgaggcacuaaacaaucgauuccagaucaaaggcguggaacugaagucagguuacaaggauuggauucucuggaucaguuuugcuauuuccugcuuccugcuuugugucgugcuguugggguuuaucaugugggccugccagaaaggcaacauacgcuguaauaucugcauuuga

SEQ ID NO: 136585 - RNA, 1701 nt, Artificial Sequence
  derived and/or modified CDS sequence (opt3) from hemagglutinin__InfluenzaA__AFG98885
augaagaccaucauugcccugagcuacauauucugccucgugcuuggccaggacuuucccgggaacgauaauuccacagcuacucuguguuugggacaccaugcagucccuaacgguacguuaguuaaaaccaucacaaaugaccaaauugaggugacuaacgccaccgaacugguacagucuucaaguacaggcaagaucugcaauaacccacacaggauucuagaugggaucgacuguacccucauagaugcgcugcuuggagacccgcauugcgauggcuuccagaaugagacuugggaccuguuuguggaaagaagcaaggcuuucuccaacuguuaucccuacgaugucccugacuaugccucuuugcggucgcucguggcaucaagcgguacacuggaguuuaucaaugaaggguucaccuggacgggaguuacucagaacggcggcaguaaugccugcaaacgcgggaccgauuccggauuuuucucucgacugaacuggcucuacaaaagcgguuccacauauccaguguuaaaugucacuaugcccaacaaugacaacuuugauaagcuguacauuuggggcgugcaccauccuucaaccgaccaagagcagacaagucuuuauguacaggcuagcgggcguguuaccgugucuacgaagagaucccagcaaacuaucauuccaaacaucggaucaaggcccuggguccggggcuugagcagucgcauaucuauuuacuggacaaucgugaaaccuggugacauucuggugaucaauuccaacgggaaucuaaucgcaccaagaggauacuucaagaugaggaccggcaaaagcucgauuaugcggucugaugccccgauaggcacuuguaucuccgagugcauuacacccaacgggucaaucccuaaugacaagccauuucagaacgucaauaaaauaaccuauggagcuugucccaaguacguuaagcagaacacgcucaaacuggccaccgguaugcgcaaugugccugaaaagcagacacgaggccuuuucggggcgauugcaggauuuaucgagaacggcugggaagguaugaucgaugggugguauggcuucagacaccaaaauagugagggaacuggccaggccgcugaccugaaaagcacccaggccgcaauugaucaaaucaacgggaaguugaauaggguaauugagaaaacaaacgaaaaguuccaccagauagagaaagaauuuuccgagguggaaggacggauccaggaccucgagaaguacgucgaggauacuaagauugaccuguggucuuauaaugcugaauuacugguggcccucgagaaccagcauaccaucgaucuuacagacagcgaaaugaacaaacuguucgagaagacccgucgccaauugagagaaaaugcggaggauauggguaacggcugcuuuaaaaucuaccacaagugugacaaugccugcauugggucaauaaggaacggaacuuaugaccaugauguuuaccgggacgaggcacuaaauaaccgauuccagaucaaaggcguggaacugaagagugguuacaaggauuggauucucuggaucuccuuugcuauuagcugcuuccugcuuugugucgugcuguugggguuuaucaugugggccugccagaaaggcaauauacgcuguaacaucugcauuuga

SEQ ID NO: 136586 - RNA, 1701 nt, Artificial Sequence
  derived and/or modified CDS sequence (opt3) from hemagglutinin__InfluenzaA__AFG98896
augaagaccaucauugcccugagcuacauauucugccucgugcuuggccaggacuuucccgggaacgauaauuccacagcuacucuguguuugggacaccaugcagucccuaacgguacguuaguuaaaaccaucacaaaugaccaaauugaggugacuaacgccaccgaacugguacagucuucaaguacaggcaagaucugcaauaacccacacaggauucuagaugggaucaauuguacccucauagacgcgcugcuuggagauccgcauugcgacggcuuccagaacgagacuugggaucuguuuguggaaagaagcaaggcuuucuccaauuguuaucccuacgacgucccugauuaugccucuuugcggucgcucguggcaucaagcgguacacuggaguuuaucaacgaaggguucaccuggacgggaguuacucagaauggcggcaguaacgccugcaaacgcgggccagacuccggauuuuucucucgacugaauuggcucuacaaaagcgguuccgcuuaucccguguuaaacgucaccaugccuaauaacgauaacuuugacaagcuguacauuuggggcgugcaccauccaucaacagaucaagagcagacuaaucuuuauguacagaccagugggcguguuacagugagcaccaagagaucucagcaaacgaucauucccaacaucggauccaggccuuggguccggggcuugucaagccgcauaaguauuuacuggacuaucgugaaaccaggugacauucuggugaucaauucuaacgggaaucuaaucgcaccgagaggauacuucaagaugaggacaggcaaauccagcauuaugcggucggacgcccccauaggcaccuguaucucugagugcauuacuccuaacggguccaucccaaaugauaagcccuuucagaacgucaauaaaauaacauauggagcuuguccuaaguacguuaagcagaacacccucaaacuggccacggguaugcgcaaugugccagaaaagcagacccgaggcauuuucggggcgaucgcaggauuuaucgagaacggcugggaagguaugauugacgggugguauggcuucagacaccaaaauucagagggaacaggccaggccgcugaucuuaaaaguacucaggccgcaaucgaccaaauuaacgggaagcugaauaggguaauagagaaaaccaacgaaaaguuccaccagaucgagaaagaauuuagcgagguggaaggacggauucaggauuuggagaaguacgucgaggacacaaagaucgaucucugguccuauaacgcugaacuguuaguggcccuggagaaucagcauacuaucgaccucaccgauucugaaaugaacaaacuuuucgagaagacacgucgccaacugagagaaaaugcggaggacauggguaacggcugcuuuaaaauuuaccacaagugugauaaugccugcauagggagcaucaggaacggaaccuaugaccaugacguuuaccgggaugaggcauugaauaaccgauuccagauuaaaggcguggaacuaaagucagguuacaaggacuggauccuguggauuaguuuugcuaucuccugcuuccuccugugugucgugcuucugggguuuauaaugugggccugccagaaaggcaauauccgcuguaacauuugcaucuga

SEQ ID NO: 136587 - RNA, 1701 nt, Artificial Sequence
  derived and/or modified CDS sequence (opt3) from hemagglutinin__InfluenzaA__AFG98907
augaagaccaucauugcccugagcuacauauucugccucgugcuuggccaggaccugcccgggaacgauaauuccacagcuacuuuguguuuaggacaccaugcagucccuaacgguacgcugguuaaaaccaucacaaaugaccaaauugaggugacuaacgccaccgaacugguacagucuucaaguacaggcaagaucugcaauaacccacacaggauucucgaugggaucaauuguacccugauagacgcgcuucugggagauccgcauugcgacggcuuucagaacgagaaaugggauuuguucguggaaagaagcaaggcuuuuuccaauuguuaucccuacgacgucccugauuaugccucucuccggucgcugguggcaucaagcgguacucuggaguucaucaacgaaggguuuaauuggacaggaguuacccagaacggcggcaguaaugccugcaaacgcgggccagacuguggauucuuuucccgacucaacugguuauacaagucugguagcacguaucccgugcugaaugucacuaugccuaacaacgauaauuucgacaaacuuuacauuuggggcgugcaccauccauccaccgaucaagagcagacaaacuuguauguacaggcuucagggcguguuacugugaguaccaagagaagccagcaaacaaucauucccaauaucggaucuaggccuuggguccggggccuguccucacgcauaagcauuuacuggaccaucgugaagccaggugacauucuagugaucaacaguaaugggaaccucaucgcaccgagaggauacuuuaaaaugaggacgggcaagucuuccauuaugcggagcgacgcccccauaggcacuugcaucucggaguguauuacaccuaaugggucuaucccaaacgauaaacccuuccagaaugucaacaagauaaccuauggagcuugcccuaaguacguuaaacagaauacucugaaacuugccacagguaugcgcaacgugccagaaaagcagacccgaggcauuuuuggggcgaucgcaggauucaucgagaauggcugggaagguaugauugacgggugguauggcuuuagacaccaaaacuccgagggaacgggccaggccgcugaucugaagucaacccaggccgcaaucgaccaaauuaaugggaaauugaacaggguaauagagaagacaaacgaaaaauuccaccagaucgagaaggaguucagugaaguggaaggacggauucaggaucucgagaaguacgucgaggacacuaaaaucgaucuguggagcuauaaugcugaauuacugguggcccucgagaaccagcauaccaucgaccuuacagauuccgaaaugaauaagcuguuugagaaaacucgucgccaauugagagaaaacgcggaggacauggguaauggcuguuucaagauuuaccacaaaugcgauaacgccugcauagggucuaucaggaauggaaccuauaaccaugacguuuaccgggacgaggcacuaaauaaccgauuucagauuaagggcguggaacuaaagagcgguuacaaagauuggauccucuggauuucauucgcuaucaguuguuuucugcuuugcgucgugcuguugggguucauaaugugggccugucagaagggcaauauccgcugcaacauuuguaucuga

SEQ ID NO: 136588 - RNA, 1701 nt, Artificial Sequence
  derived and/or modified CDS sequence (opt3) from hemagglutinin__InfluenzaA__AFG98918
augaagaccaucauugcccugagcuacauauucugccucgugcuuggccaggaccugcccgggaacgauaauuccacagcuacuuuguguuuaggacaccaugcagucccuaacgguacgcugguuaaaaccaucacaaaugaccaaauugaggugacuaacgccaccgaacugguacagucuucaaguacaggcaagaucugcaauaacccacacaggauucucgaugggaucaauuguacccugauagacgcgcuucugggagauccgcauugcgacggcuuucagaacgagaaaugggauuuguucguggaaagaagcaaggcuuuuuccaauuguuaucccuacgacgucccugauuaugccucucuccggucgcugguggcaucaagcgguacucuggaguucaucaacgaaggguuuaauuggacaggaguuacccagaacggcggcaguaaugccugcaaacgcgggccagaccgaggauucuuuucccgucucaacugguuauacaagucugguagcacguaucccgugcugaaugucacuaugccuaacaacgauaauuucgacaaacuuuacauuuggggcgugcaccauccauccaccgaucaagagcagacaaacuuguauguacaggcuucagggagaguuacugugaguaccaagaggagccagcaaacaaucauucccaauaucggaucucggccuuggguccgcggccuguccucaagaauaagcauuuacuggaccaucgugaagccaggugacauucuagugaucaacaguaaugggaaccucaucgcaccgaggggauacuuuaaaaugcggacgggcaagucuuccauuaugcgcagcgacgcccccauaggcacuuguaucucggagugcauuacaccuaaugggucuaucccaaacgauaaacccuuccagaaugucaacaagauaaccuauggagcuuguccuaaguacguuaaacagaauacucugaaacuugccacagguaugcgaaacgugccagaaaagcagaccagaggcauuuuuggggcgaucgcaggauucaucgagaauggcugggaagguaugauugacgggugguauggcuuuaggcaccaaaacuccgagggaacgggccaggccgcugaucugaagucaacccaggccgcaaucgaccaaauuaaugggaaauugaaccggguaauagagaagacaaacgaaaaauuccaccagaucgagaaggaguucagugaaguggaaggacguauucaggaucucgagaaguacgucgaggacacuaaaaucgaucuguggagcuauaaugcugaauuacugguggcccucgagaaccagcauaccaucgaccuuacagauuccgaaaugaauaagcuguuugagaaaacucgcagacaauugagggaaaacgcggaggacauggguaauggcugcuucaagauuuaccacaaaugugauaacgccugcauagggucuauccggaauggaaccuauaaccaugacguuuaccgagacgaggcacuaaauaaccgcuuucagauuaagggcguggaacuaaagagcgguuacaaagauuggauccucuggauuucauucgcuaucaguugcuuucugcuuugugucgugcuguugggguucauaaugugggccugccagaagggcaauaucagauguaacauuugcaucuga

SEQ ID NO: 136589 - RNA, 1701 nt, Artificial Sequence
  derived and/or modified CDS sequence (opt3) from hemagglutinin__InfluenzaA__AFG98929
augaagaccgugaucgcccugagcuacauuuucugccucguccuuggccaggaccugcccgggaacgauaauuccacagcuacuuuguguuuaggacaccaugcaguuccuaacgguacgcuggugaaaaccauaacaaaugaccaaaucgagguaacuaacgccaccgaacuggugcagucuucaaguacaggcaagauuugcaauaacccacacagaauccucgaugggauuaauuguacccugaucgacgcgcuucugggagauccgcauugcgacggcuuucagaacgagaaaugggauuuguucgucgaaaggagcaaggcuuuuuccaauuguuaucccuacgacgugccugauuaugccucucuccggucgcugguugcaucaagcgguacucuggaguucauaaacgaaggguuuaauuggacaggagugacccagaacggcggcaguaaugccugcaaacgcgggccagacaucggauucuuuucccgacucaacugguuauacaagucugguagcacguaucccguccugaaugugacuaugccuaacaacgauaauuucgacaaacuuuacauuuggggcguacaccauccauccaccgaucaagagcagacaaacuuguauguucaggcuucagggcgugugacugucaguaccaagagaagccagcaaacaaucauucccaauaucggaucuaggccuugggugcggggccuguccucacgcauaagcauuuacuggaccaucgugaagccaggugacauucuagucaucaacaguaaugggaaccucaucgcaccgagaggauacuuuaaaaugaggacgggcaagucuuccauuaugcggagcgacgcccccauaggcacuuguaucucggagugcauuacaccuaaugggucuaucccaaacgauaaacccuuccagaauguuaacaagauaaccuauggagcuuguccuaaguacgugaaacagaauacucugaaacuugccacagguaugcgcaacguaccagaaaagcagacccgaggcauuuuuggggcgaucgcaggauucaucgagaauggcugggaagguaugauugacgggugguauggcuuuagacaccaaaacuccgagggaacgggccaggccgcugaucugaagucaacccaggccgcaaucgaccaaauuaaugggaaauugaacagggugauagagaagacaaacgaaaaauuccaccagaucgagaaggaguucagugaagucgaaggacggauucaggaucucgagaaguacguggaggacacuaaaaucgaucuguggagcuauaaugcugaauuacugguugcccucgagaaccagcauaccaucgaccuuacagauuccgaaaugaauaagcuguuugagaaaacucgucgccaauugagagaaaacgcggaggacauggguaauggcugcuucaagauuuaccacaaaugugauaacgccugcauagggucuaucaggaauggaaccuauaaccaugacguguaccgggacgaggcacuaaauaaccgauuucagauuaagggcgucgaacuaaagagcgguuacaaagauuggauccucuggauuucauucgcuaucaguugcuuucugcuuugugugguacuguugggguucauaaugugggccugccagaagggcaauauccgcuguaacauuugcaucuga

SEQ ID NO: 136590 - RNA, 1701 nt, Artificial Sequence
  derived and/or modified CDS sequence (opt3) from hemagglutinin__InfluenzaA__AFG98940
augaagaccaucauugcccugagcuacauauucugccucgugcuuggccaggaccugcccgggaacgauaauuccacagcuacuuuguguuuaggacaccaugcagucccuaacgguacgcugguuaaaaccaucacaaaugaccaaauugaggugacuaacgccaccgagcuaguacagucuucaaguacaggcaagaucugcaauaacccacacaggauucucgaugggaucaauuguacccugauagacgcgcuucugggagauccgcauugcgacggcuuucagaacgaaaaaugggauuuguucguggaaagaagcaaggcuuuuuccaauuguuaucccuacgacgucccugauuaugccucucuccggucgcugguggcaucaagcgguacucuggaguucaucaacgaaggguuuaauuggacaggaguuacccagaacggcggcaguaaugccugcaaacgcgggccagacuccggauucuuuucucgacucaacugguuauacaagagcgguuccacguaucccgugcugaaugucacuaugccuaacaaggauaacuucgacaaacuuuacauuuggggcgugcaccauccaucaaccgaucaagagcagacaaauuuguauguacaggcuagugggcguguuacugugagcaccaagagaucucagcaaacaaucauucccaacaucggauccaggccuuggguccggggcaugucaagccgcauaaguauuuacuggaccaucgugaaaccaggugacauucuggugaucaauucuaacgggaaucuaaucgcaccgagaggauacuuuaagaugaggacgggccgguccagcauuaugcgcucggacgcccccauaggcacuuguaucucugagugcauuacaccuaacggguccaucccaaaugaucgacccuuccagaacgucaauaaaauaaccuauggagcuuguccuaaguacguuaagcagaacacucucaaacuggccacagguaugagaaaugugccagaaaagcagaccaggggcauuuuuggggcgaucgcaggauucaucgagaacggcugggaagguaugauugacgggugguauggcuuucggcaccaaaauucagagggaacgggccaggccgcugaucuuaaaaguacccaggccgcaaucgaccaaauuaacgggaagcugaaucguguaauagagaaaacaaacgaaaaguuccaccagaucgagaaagaguucagcgaaguggaaggacgcauucaggauuuggagaaguacgucgaggacacuaagaucgaucucugguccuauaacgcugaacuguuaguggcccuggagaaucagcauaccaucgaccucacagauucugaaaugaacaaacuuuuugagaagacuagaaggcaacugcgggaaaaugcggaggacauggguaacggcugcuucaaaauuuaccacaagugugauaaugccugcauagagagcauccgaaacgggaccuauaaucaugacguuuaccgcgacgaagcauugaacaauagauuucagauuaaaggaguggagcuaaagucaggcuacaaggauuggauccuguggauuaguuucgcuaucuccugcuuucuccugugugucgugcuucuggguuucauaaugugggccugccagaaagggaacaucagguguaauauuugcaucuga

SEQ ID NO: 136591 - RNA, 1701 nt, Artificial Sequence
  derived and/or modified CDS sequence (opt3) from hemagglutinin__InfluenzaA__AFG98962
augaagaccaucauugcccugagcuacauauucugccucgugcuugcucaggaccugcccggcaacgauaauuccacagcaacuuuguguuuagggcaccaugccgucccuaacggaacgcugguuaaaaccaucacaaaugaccaaauugaggugacuaacgcgaccgaacugguacagucuucaaguacagguaagaucugcaauaacccacacaggauucucgauggcaucaauuguacccugauagacgcccuucugggggauccgcauugcgacggauuucagaacgagaaaugggauuuguucguggaaagaagcaaggcuuuuuccaauuguuaucccuacgacgucccugauuaugcaucucuccggucgcugguggccucaagcggcacucuggaguucaucaacgaagguuuuaauuggacagggguuacccagaacggaggcaguaaugcuugcaaacgcggcccagacuccggguucuuuucucgacucaacugguuauacaagagcggauccacguaucccgugcugaaugucacuaugccuaacaacgauaauuucgacaaacuuuacauuuggggugugcaccauccaucaaccgaucaagagcagacaaacuuguauguacaggcaaguggccguguuacugugagcaccaagagaucucagcaaacaaucauucccaaugucggguccaggccuugggugcggggacugucaagccgcaucaguauauacuggaccauugugaagccaggcgacauccuagucauuaacucuaaugguaaccucaucgccccgagaggguacuuuaaaaugaggacgggaaaguccagcaucaugcggucggacgcucccauuggcacuuguucuuccgagugcauaacaccuaauggcucaaucccaaacgauaaacccuuccagaauguuaacaagauuaccuauggggccuguccuaaguacgugaaacagaauacucugaaacuugcgacaggaaugcgcaacguaccagaaaagcagacccgagguaucuuuggcgcaauagccggguucauugagaauggaugggaaggcaugaucgacgguugguauggguuuagacaccaaaacagugagggcacgggacaggcugccgaucuaaagagcacccaggcagcuaucgaccaaauuaauggcaaauugaacagggugaucgagaagacaaacgaaaaauuccaccagauugagaaggaguucuccgaagucgaagggcggauacaggaucucgagaaguacguggaggacacuaaaaucgaucuguggucuuauaaugccgaauuacugguugcgcucgagaaccagcauaccauugaccuuacagauagcgaaaugaauaagcuguuugagaaaacucgucgccaauugagagaaaacgccgaggacaugggaaaugguugcuucaagaucuaccacaaaugugauaacgcaugcaucggcucaauuaggaaugggaccuaugaccaugacguguaccgggaugaggcucuaaacaaucgauuucagauaaagggagucgaacugaagaguggcuacaaagacuggauccucuggauuuccuucgccaucagcugcuuucugcuuugugugguacuguuggguuucauuaugugggcuugccagaaggggaacauccgcuguaauauaugcaucuga

SEQ ID NO: 136592 - RNA, 1701 nt, Artificial Sequence
  derived and/or modified CDS sequence (opt3) from hemagglutinin__InfluenzaA__AFG98973
augaagaccaucauugcccugagcuacauauucugccucgugcuuggccaggacuuucccagaaacgauaauuccacagcuacucuguguuuggggcaccaugcagucccuaacggaacguuaguuaaaaccaucacaaaugaccaaauugaggugacuaacgccaaugaacugguacagucuucaaguaccgguaagaucugcaacaauccacacaggauucuagauggcauggacuguacacucaucgaugcgcugcuuggggacccgcauugcgauggacugcagaacgagaccugggacuuguucguggaacggagcaaggcuuuuuccaauuguuaucccuacgaugucccugacuaugccucucuccgcucgcugguggcaucaagcggcacucuggaguucauaaacgaagguuuuacauggaccgggguuacgcagaauggaggcaguaacgccugcaagcgaggcccagaucguggguucuuuuccagacucaauugguuauacaaaucuggaaacacuuaucccgugcugaaugucaccaugccuaacaacgacaauuucgauaaacuuuacaucuggggugugcaccauccaagcacagaccaagaccagacuuccuuguauguacaggcuucaggcaggguuaccgugaguacaaagcggagccagcaaaccgucauucccaacaucgggccucgcccaugggugagaggacugucuuccggcauuucaaucuacuggacgauagugaaaccgggugauauucuacucaucaauagcaacgggaaucugauugcacccaggggauacuuuaagaugcggacuggcaaaaguucuaucaugcgcuccgacgccccuaucggcacauguauuagcgagugcauaaccccaaacgggucgauccccaaugauaagccuuuccagaacgucaauaaaauuacuuauggagcuuguccaaaguacguuaagcagaacacacuuaaacuggccaccgguaugcgaaaugugcccgagaagcagacgagaggcaucuuuggggcgauagcaggauucauugaaaacggcugggaggguaugaucgacgggugguauggcuuuaggcaccaaaauucugaaggaaccggccaggccgcugauuugaaauccacacaggccgcaaucgaccaaauuaacgggaagcucaaucggguaaucgagaaaacuaacgagaaguuccaccagauugaaaaagaguucucagaaguggagggacguauacaggaucuggaaaaguacgucgaggacaccaagaucgauuuauggaguuauaacgcugagcugcucguggcccuugaaaaucagcauacaauugaccugacugauagcgagaugaacaaauuguuugaaaagacccgcagacaacuaagggagaaugcggaagacauggguaacggcugcuucaaaaucuaccaccggugugacaaugccugcaucggguccauucgaaacggaacauaugaucaugacguuuaccgcgaugaggcacugaauaacagauuucagauaaagggcguggagcucaaaucugguuacaaggacuggauccuguggauuagcuucgcuaucucaugcuuucuucugugugucguguugcucggguucauuaugugggccugccagaagggcaauaucagguguaacauaugcaucuga

SEQ ID NO: 136593 - RNA, 1701 nt, Artificial Sequence
  derived and/or modified CDS sequence (opt3) from hemagglutinin__InfluenzaA__AFG98984
augaagaccaucauugcccugagcuacauauucugccucgugcuuggccaggacuuucccagaaacgauaauuccacagcuacucuguguuuggggcaccaugcagucccuaacggaacguuaguuaaaaccaucacaaaugaccaaauugaggugacuaacgccaccgaacugguacagucuucaaguacagguaagaucugcaauaacccacacaggauucuagauggcauggacuguacccucaucgaugcgcugcuuggggacccgcauugcgauggacugcagaaugagacuugggacuuguucguggaacggagcaaggcuuuuuccaacuguuaucccuacgaugucccugacuaugccucucuccgcucgcugguggcaucaagcggcacacuggaguucauaaaugaagguuuuaccuggacggggguuacucagaacggaggcaguaaugccugcaagcgaggcccagaucguggguucuuuuccagacucaacugguuauacaaaucuggaaauaccuaucccgugcugaacgucacaaugccuaauaacgacaacuucgauaaacuuuacaucuggggugugcaccauccaagcacugaccaagaccagaccuccuuguauguacaggcuucaggcaggguuacagugaguaccaagcggagccagcaaacggucauucccaauaucgggccucgcccaugggugagaggacugucuuccggcauuucaaucuacuggacuauagugaaaccgggugauauucuacucaucaacagcaaugggaaccugauugcacccaggggauacuuuaagaugcggacaggcaaaaguucuaucaugcgcuccgacgccccuaucggcaccuguauuagcgagugcauaacuccaaaugggucgauccccaacgauaagccuuuccagaaugucaacaaaauuacauauggagcuuguccaaaguacguuaagcagaauacccuuaaacuggccacggguaugcgaaacgugcccgagaagcagaccagaggcaucuuuggggcgauagcaggauucauugaaaauggcugggaggguaugaucgacgggugguauggcuuuaggcaccaaaacucugaaggaacaggccaggccgcugauuugaaauccacucaggccgcaaucgaccaaauuaaugggaagcucaaccggguaaucgagaaaaccaaugagaaguuccaccagauugaaaaagaguucucagaaguggagggacguauacaggaucuggaaaaguacgucgaggacacaaagaucgauuuauggaguuauaacgcugagcugcucguggcccuugaaaaccagcauacuauugaccugaccgauagcgagaugaauaaauuguuugaaaagacacgcagacaacuaagggagaacgcggaagacauggguaauggcugcuucaaaaucuaccaccggugugacaacgccugcaucggguccauucgaaauggaaccuaugaucaugacguuuaccgcgaugaggcacugaacaauagauuucagauaaagggcguggagcucaaaucugguuacaaggacuggauccuguggauuagcuucgcuaucucaugcuuucuucugugugucguguugcucggguucauuaugugggccugccagaagggcaacaucagguguaauauaugcaucuga

SEQ ID NO: 136594 - RNA, 1704 nt, Artificial Sequence
  derived and/or modified CDS sequence (opt3) from hemagglutinin__InfluenzaA__AFG98995
augaagaccaucauugcccugagcuacauauucugccucguguuugcucaggaccuucccggcaacgauaauaacuccacagcaacucuguguuuggggcaccaugccgucccuaauggaacguuaguuaaaaccaucacaaacgaccaaauugaggugacuaaugcgaccgaacugguacagucuucaaguacagguaagaucugcaacaauccacacaggauucuagauggcaucaacuguacccucauagacgcucugcuuggggauccgcauugcgacggauuccagaaugagaaaugggaucuguuuguggaaagaagcaaggccuucuccaacuguuaucccuacgacgucccugauuaugcaucuuugcggucgcucguggccucaagcggcacucuggaguuuaucaaugaagguuucaacuggacagggguuacccagaauggaggcaguaacgcuugcaaacgcggcccagacauuggguuuuucucccgacugaauuggcucuacaagucuggaagcacguaucccgugcaaaacgucacuaugccuaacaaugauaacuccgacaaguuauacaucuggggugugcaccauccaucaaccgauaaagagcagacagaccuguauguacaggcaaguggcaagguuacugugagcaccaaacguucucagcaaacaauuauccccaaugucggguccagaccuugggugaggggacuuucaagccggauaaguauuuacuggaccaucgugaagccaggcgacauuuuggucaucaacucuaaugguaaccugaucgccccgcgcggguacuuuaaaaugagaacgggaaaguccagcauuaugaggucggaugcucccauaggcacuuguucuuccgagugcaucacaccuaauggcucaauuccaaacgacaagcccuuccagaauguuaacaaaaucaccuauggggccuguccuaaguacgugaaacagaauacucuaaagcucgcgacaggaaugcggaacguaccagaaaaacagacccgcgguauauuuggcgcaauugccggguucaucgagaauggaugggaaggcaugaucgaugguugguauggguuucgacaccaaaacagugagggcacgggacaggcugccgaccuuaagagcacccaggcagcuauugaucaaaucaauggcaaacugaacagagugauugagaagacaaacgaaaaguuccaccagauagagaaagaguucuccgaagucgaagggaggauccaggaccuggagaaguacguggaggauacuaaaauugacuuguggucuuauaaugccgaacuccugguugcguuagagaaccagcauaccaucgaucugacagacagcgaaaugaauaagcucuuugagaaaacucggcgucaacuucgcgaaaacgccgaggauaugggaaaugguugcuucaagaucuaccacaagugugacaacgcaugcauuggcucaauaagaaaugggaccuaugaccaugauguguacagggacgaggcucugaacaaucgguuucagaucaaaggagucgaauugaagaguggcuacaaagauuggauucuauggaucuccuucgccauuagcugcuuucugcucugugugguacugcuugguuucaucaugugggcuugccagaaggggaacauacgauguaauaucugcauuuga

SEQ ID NO: 136595 - RNA, 1701 nt, Artificial Sequence
  derived and/or modified CDS sequence (opt3) from hemagglutinin__InfluenzaA__AFG99006
augaagaccaucauugcccugagcuacauauucugccucgugcuuggccaggacuuucccagaaacgauaauuccacagcuacucuguguuuggggcaccaugcagucccuaacggaacguuaguuaaaaccaucacaaaugaccaaauugaggugacuaacgccaccgaacugguacagucuucaaguacagguaagaucugcaauaacccacacaggauucuagauggcauggacuguacccucaucgaugcgcugcuuggggacccgcauugcgauggacugcagaaugagacuugggacuuguucguggaacggagcaaggcuuuuuccaacuguuaucccuacgaugucccugacuaugccucucuccgcucgcugguggcaucaagcggcacacuggaguucauaaaugaagguuuuaccuggacggggguuacucagaacggaggcaguaaugccugcaagcgaggcccagaucguggguucuuuuccagacucaacugguuauacaaaucuggaaauaccuaucccgugcugaacgucacaaugccuaauaacgacaacuucgauaaacuuuacaucuggggugugcaccauccaagcacugaccaagaccagaccuccuuguauguacaggcuucaggcaggguuacagugaguaccaagcggagccagcaaacggucauucccaauaucgggccucgcccaugggugagaggacugucuuccaggauuucaaucuacuggacuauagugaaaccgggcgauauucuacucaucaacagcaaugguaaccugauugcaccccggggguacuuuaagaugcgcacaggaaaaaguucuaucaugcgauccgacgccccuaucggcaccuguauuagcgagugcauaacuccaaauggcucgauccccaacgauaagccuuuccagaaugucaacaaaauuacauauggggcuuguccaaaguacguuaagcagaauacccuuaaacuggccacgggaaugagaaacgugcccgagaagcagaccagggguaucuuuggcgcgauagcaggguucauugaaaauggaugggagggcaugaucgacgguugguauggguuucggcaccaaaacucugaaggcacaggacaggccgcugauuugaaauccacucaggccgcaaucgaccaaauuaauggcaagcucaaccguguaaucgagaaaaccaaugagaaguuccaccagauugaaaaagaguucucagaaguggaggggcgcauacaggaucuggaaaaguacgucgaggacacaaagaucgauuuauggaguuauaacgcugagcugcucguggcccuugaaaaccagcauacuauugaccugaccgauagcgagaugaauaaauuguuugaaaagacaagaaggcaacuacgggagaacgcggaagacaugggaaaugguugcuucaaaaucuaccaccgaugugacaacgccugcaucggcuccauucgcaaugggaccuaugaucaugacguuuacagagaugaggcacugaacaauagguuucagauaaagggaguggagcucaaaucuggcuacaaggacuggauccuguggauuagcuucgcuaucucaugcuuucuucugugugucguguugcucgguuucauuaugugggccugccagaaggggaacauccgguguaauauaugcaucuga

SEQ ID NO: 136596 - RNA, 1701 nt, Artificial Sequence; identical to SEQ ID NO: 128812
  derived and/or modified CDS sequence (opt3) from hemagglutinin__InfluenzaA__AFG99017

SEQ ID NO: 136597 - RNA, 1701 nt, Artificial Sequence
  derived and/or modified CDS sequence (opt3) from hemagglutinin__InfluenzaA__AFG99028
augaagaccaucauugcccugagcuacauauucugccucguguuugcucaggaccuucccggcaacgauaauuccacagcaacucuguguuuggggcaccaugccgucccuaacggaacguuaguuaaaaccaucacaaaugaccaaauugaggugacuaacgcgaccgaacugguacagucuucaaguacagguaagaucugcggcaauccacacagaauacuagaugggaucaacuguacccucauagacgcucugcuuggagauccgcauugcgacggcuuccagaaugagaaaugggaucuguuuguggaaaggagcaaggccuucuccaacuguuaucccuacgacgucccugauuaugcaucuuugcggucgcucguggccucaagcgguacucuggaguuuaucaaugaaggguucaacuggacaggaguuacccagaauggcggcaguuccgcuugcaaacgcgggccagacaacggauuuuucucucgacugaauuggcucuacaagagcgguuccacguaucccgugcaaaacgucacuaugccuaauaacgauaacucagacaaguuauacauuuggggcgugcaccauccaaguaccgauaaagagcagacagaccuguauguacaggcaagcgggaagguuacugugucuaccaaacguucccagcaaacagucauccccaaugugggaucaagaccuugggugaggggccuuagcagucgggucucuauuuacuggaccaucguuaagccaggugacauauuggugauuaacuccaaugggaaccugaucgccccgcgcggauacuuuaaaaugagaacgggcaagagcucgauuaugaggucugaugcucccaucggcacuuguuccucagagugcaucacaccuaaugggaguauuccaaacgacaagcccuuccagaauguaaacaaaauaaccuauggagccuguccuaaguacgugaaacagaauacucuaaagcucgcgacagguaugcggaacgucccagaaaaacagacccgcggcaucuuuggggcaauugccggauucaucgagaauggcugggaagguaugauagaugggugguauggcuuucgacaccaaaacagcgagggaacgggccaggcugccgaccugaaguccacccaggcagcuauugaucaaaucaaugggaaacuuaacagagugaucgagaagacaaaugaaaaguuccaccagauugagaaagaguucucugaaguugaaggaaggauccaggaccuggagaaguacguggaggauacuaaaauugacuuguggagcuauaacgccgaacuccuggucgcguuagagaaccagcauaccauagaucugacagacucagaaaugaauaagcucuuugagaaaacucggcgucaacuucgcgaaaacgccgaggauauggguaauggcugcuucaagaucuaccacaagugugacaacgcaugcauugggaguaucagaaauggaaccuaugaccaugauguguacagggacgaggcucugaacaaucgguuucagaucaaaggcguagaauugaaguccgguuacaaagauuggauucuauggauuagcuucgccaucucuugcuuucugcucuguguugugcugcuuggguucauuaugugggcuugccagaagggcaacauccgauguaauauuugcaucuga

SEQ ID NO: 136598 - RNA, 1701 nt, Artificial Sequence
  derived and/or modified CDS sequence (opt3) from hemagglutinin__InfluenzaA__AFG99039
augaagaccaucauugcccugagcuacauauucugccucguguuugcucaggaccuucccggcaacgauaauuccacagcaacucuguguuuggggcaccaugccgucccuaacggaacguuaguuaaaaccaucacaaaugaccaaauugaggugacuaacgcgaccgaacugguacagucuucaaguacagguaagaucugcgauaauccacacagaauacuagacggcaucaacuguacccucauagaugcucugcuuggggacccgcauugcgauggauuccagaaugagaaaugggaccuguuuguggaaaggagcaaggccuucuccaacuguuaucccuacgaugucccugacuaugcaucuuugcggucgcucguggccucaagcggcacucuggaguuuaucaaugaagguuucaacuggacagggguuacccagaauggaggcaguuccgcuugcaaacgcggcccagauaacggguuuuucucucgacugaauuggcucuacaagagcggauccacguaucccgugcaaaacgucgcaaugccuaauaacgacaacucagauaaguuauacauuuggggugugcaccauccaaguacugacaaagagcagaccgaccuguauguacaggccagcggcaagguuacagugucuacuaaacguucccagcaaaccgucauccccaauguggggucaagaccuugggugaggggacuuagcagucgggucucuauuuacuggacaaucguuaagccaggcgauauauuggugauuaacuccaaugguaaccugaucgcuccgcgcggguacuuuaaaaugagaaccggaaagagcucgauuaugaggucugacgcccccaucggcacguguuccucagagugcaucacuccuaauggcaguauuccaaacgauaagcccuuccagaauguaaacaaaauaacauauggggcguguccuaaguacgugaaacagaauacccuaaagcucgcaacuggaaugcggaacgucccagaaaaacagacacgcgguaucuuuggcgccauugcuggguucaucgagaauggaugggaaggcaugauagacgguugguauggguuucgacaccaaaacagcgagggcaccggacaggccgcagaucugaaguccacgcaggcugccauugaccaaaucaauggcaaacuuaacagagugaucgagaagaccaaugaaaaguuccaccagauugagaaagaguucucugaaguugaagggaggauccaggaucuggagaaguacguggaggacacaaaaauugauuuguggagcuauaacgcggaacuccuggucgccuuagagaaccagcauacuauagaccugaccgauucagaaaugaauaagcucuuugagaaaacacggcgucaacuucgcgaaaacgcagaggacaugggaaaugguugcuucaagaucuaccacaagugugacaacgcuugcauuggcaguaucagaaaugggacuuaugaucaugacguguacagggaugaggcccugaacaaucgguuucagaucaaaggaguagaauugaaguccggcuacaaagacuggauucuauggauuagcuucgcuaucucuugcuuucugcucuguguugugcugcuugguuucauuaugugggccugccagaaggggaacauccgauguaauauuugcaucuga

SEQ ID NO: 136599 - RNA, 1701 nt, Artificial Sequence; identical to SEQ ID NO: 128812
  derived and/or modified CDS sequence (opt3) from hemagglutinin__InfluenzaA__AFG99050

SEQ ID NO: 136600 - RNA, 1701 nt, Artificial Sequence
  derived and/or modified CDS sequence (opt3) from hemagglutinin__InfluenzaA__AFG99061
augaagaccaucauugcccugagcuacauauucugccucguguuugcucaggaccuucccggcaacgauaauuccacagcaacucuguguuuggggcaccaugccgucccuaacggaacguuaguuaaaaccaucacaaaugaccaaauugaggugacuaacgcgaccgaacugguacagucuucaaguacagguaagaucugcgauaauccacacaggauucuagacggcaucaacuguacccucauagaugcucugcuuggggacccgcauugcgauggauuccagaaugagaaaugggaccuguuuguggaaagaagcaaggccuucuccaacuguuaucccuacgaugucccugacuaugcaucuuugcggucgcucguggccucaagcggcacucuggaguuuaucaaugaagguuucaacuggacagggguuacccagaauggaggcaguuccgcuugcaaacgcggcccagauaacggguuuuucucucgacugaauuggcucuacaagagcggauccacguaucccgugcaaaacgucacuaugccuaauaacgacaacucagauaaguuauacauuuggggugugcaccauccaaguaccgacaaagagcagacagaccuguauguacaggcaagcggcaagguuacugugucuaccaaacguucccagcaaacagucauccccaauguggggucaagaccuugggugaggggacuuagcagucgggucucuauuuacuggaccaucguuaagccaggcgauauauuggugauuaacuccaaugguaaccugaucgccccgcgcggguacuuuaaaaugagaacgggaaagagcucgauuaugaggucugacgcucccaucggcacuuguuccucagagugcaucacaccuaauggcaguauuccaaacgauaagcccuuccagaauguaaacaaaauaaccuauggggccuguccuaaguacaucaaacagaauacucuaaagcucgcgacaggaaugcggaacgugccagaaaaacagacccgcgguauuuuuggcgcaaucgccggguucauagagaauggaugggaaggcaugauugacgguugguauggguuucgacaccaaaacagcgagggcacgggacaggcugccgaucugaaguccacccaggcagcuaucgaccaaaucaauggcaaacuuaacaaggucauugagaagacaaaugaaaaauuccaccagaucgagaaggaguucucugaaguggaagggaggauucaggaucuggagaaauacguugaggacacuaagauagauuuguggagcuauaacgccgaacuccugguggcguuagagaaccagcauaccaucgaccugacagauucagaaaugaauaaacucuuugagaagacuagacggcaacuucgugaaaacgccgaggacaugggaaaugguugcuucaagauuuaccacaaaugugacaacgcaugcaucggcaguauccgcaaugggaccuaugaucaugacgucuacagagaugaggcucugaacaauagguuucagauuaagggaguggaauugaaauccggcuacaaggacuggauacuauggaucagcuucgccauuucuugcuuucugcucuguguaguucugcuugguuucaucaugugggcuugccagaaagggaacauucgguguaauaucugcauauga

SEQ ID NO: 136601 - RNA, 1701 nt, Artificial Sequence
  derived and/or modified CDS sequence (opt3) from hemagglutinin__InfluenzaA__AFG99072
augaagaccaucauugcccugagcuacauauucugccucguguuugcucaggaccuucccggcaacgauaauuccacagcaacucuguguuuggggcaccaugccgucccuaacggaacguuaguuaaaaccaucacaaaugaccaaauugaggugacuaacgcgaccgaacugguacagucuucaaguacagguaagaucugcgauaauccacacaggauucuagacggcaaaaacuguacccucaucgaugcucugcuuggggacccgcauugcgauggauuccagaaugagaagugggaccuguuuguggaaagaagcaaagccuucuccaacuguuaucccuacgaugucccugacuaugcaucuuugcggucgcucguggccucaagcggcacucuggaguuuauaaaugaagguuucaacuggacagggguuacccagaauggaggcaguuccgcuugcaagcgcggcccagauaacggguuuuucucucgacugaauuggcucuacaagagcggauccacguaucccgugcaaaacgucacuaugccuaauaacgacaacucagaucguuuauacaucuggggugugcaccauccaaguaccgacaaagagcagacagaccuguauguacaggcaagcggcaagguuacugugucuaccaaaagaucccagcaaacagucauucccaauguggggucaaggccuugggugcggggacuuagcagucgcgucucuaucuacuggaccauuguuaagccaggcgauaucuuggugauaaacuccaaugguaaccugauugccccgagaggguacuuuaaaaugaggacgggaaagagcucgaucaugcggucugacgcucccauuggcacuuguuccucagagugcaucacaccuaauggcaguaucccaaacgauaagcccuuccagaauguaaacaaaauuaccuauggggccuguccuaaguacgugaaacagaauacucuaaagcucgcgacaggaaugcgcaacgucccagaaaaacagacccgagguauauuuggcgcaaucgccggguucauugagaauggaugggaaggcaugaucgacgguugguauggguuuagacaccaaaacagcgagggcacgggacaggcugccgaucugaaguccacccaggcagcuauagaccaaauuaauggcaaacuuaacagggugaucgagaagacaaaugaaaaguuccaccagaucgagaaagaguucucugaaguugaagggcggauucaggaucuggagaaguacguggaggacacuaaaaucgauuuguggagcuauaacgccgaacuccuggucgcguuagagaaccagcauaccauugaccugacagauucagaaaugaauaagcucuuugagaaaacucgucgccaacuuagagaaaacgccgaggacaugggaaaugguugcuucaagauauaccacaagugugacaacgcaugcaucggcaguauuaggaaugggaccuauaaccaugauguguaccgggacgaggcucugaauaaccgauuucagaucaaaggaguagaauugaaguccggcuacaaagauuggauccuauggauuagcuucgccauaucuugcuuucugcucuguguugugcugcuugguuucaucaugugggcuugccagaaggggaauauucgcuguaacaucugcauuuga

SEQ ID NO: 136602 - RNA, 1701 nt, Artificial Sequence
  derived and/or modified CDS sequence (opt3) from hemagglutinin__InfluenzaA__AFG99083
augaagaccaucauugcccugagcuacauauucugccucguguuugcucaggaccuucccggcaacgauaauuccacagcaacucuguguuuggggcaccaugccgucccuaacggaacguuaguuaaaaccaucacaaaugaccaaauugaggugacuaacgcgaccgaacugguacagucuucaaguacagguaagaucugcgauaauccacacagaauacuagacggcaucaacuguacccucauagaugcucugcuuggggacccgcauugcgauggauuccagaaugagaaaugggaccuguuuguggaaaggagcaaggccuucuccaacuguuaucccuacgaugucccugacuaugcaucuuugcggucgcucguggccucaagcggcacucuggaguuuaucaaugaagguuucaacuggacagggguuacccagaauggaggcaguuccgcuugcaaacgcggcccagauaagggguuuuucucucgacugaacuggcucuacaagagcggauccacguaucccgugcaaaaugucacuaugccuaacaaugacaacucagauaaauuauacauuuggggugugcaccauccaaguaccgacaaggagcagacagaccuguauguacaggcaagcggcaaaguuacugugucuaccaagcguucccagcaaacagucauccccaacguggggucaagaccuugggugaggggacuuagcagucgggucucuauuuacuggaccaucguuaaaccaggcgauauauuggugauuaauuccaacgguaaucugaucgccccgcgcggguacuuuaagaugcuaacgggaaagagcucgauuaugagaucugacgcucccaucggcacuuguuccucagagugcaucacaccuaacggcaguauuccaaaugauaaacccuuccagaacguaaauaagauaaccuauggggccuguccuaaauacgugaagcagaacacucucaaacuggcgacaggaaugaggaaugucccagaaaagcagacccgggguaucuuuggcgcaauugccggguucaucgagaacggaugggaaggcaugauagacgguugguauggguuucgccaccaaaauagcgagggcacgggacaggcugccgaucuuaaauccacccaggcagcuauugaccaaaucaacggcaagcugaaucgagugaucgagaagacaaacgaaaaauuccaccagauugagaaggaguucucugaaguugaagggagaauccaugauuuggagaaauacguggaggacacuaagauugaucucuggagcuauaaugccgaacuguuagucgcgcuggagaaccagcacaccauagaccucacagauucagaaaugaacaaacuuuuugagaagacuaggcggcagcugcgugaaaaugccgaggacaugggaaacgguugcuucaagaucuaccauaaaugugacaaugcaugcauuggcaguauccgcaacgggaccuaugaucacgacguguacagagaugaggcuuugaauaacagguuucaaaucaagggaguagaacuaaaauccggcuacaaggacuggauucuguggauuagcuucgccaucucuugcuuucuccuguguguugugcuucuggguuucauuaugugggcuugccagaaagggaauauccgguguaacauuugcaucuga

SEQ ID NO: 136603 - RNA, 1701 nt, Artificial Sequence
  derived and/or modified CDS sequence (opt3) from hemagglutinin__InfluenzaA__AFG99094
augaagaccaucauugcccugagcuacauauucugccucguguuugcucaggaccuucccggcaacgauaauuccacagcaacucuguguuuggggcaccaugccgucccuaacggaacguuaguuaaaaccaucacaaaugaccaaauugaggugacuaacgcgaccgaacugguacagucuucaaguacagguaagaucugcgauaauccacacaggauucuagacggcaucaacuguacccucauagaugcucugcuuggggacccgcauugcgauggauuccagaaugagaaaugggaccuguuuguggaaagaagcaaggccuucuccaacuguuaucccuacgaugucccugacuaugcaucuuugcggucgcucguggccucaagcggcacucuggaguuuaucaaugaagguuucaacuggacagggguuacccagaauggaggcaguggcgcuugcaaacgcgggccagauaacggauuuuucucccgacugaauuggcucuacaagucugguagcacguaucccgugcaaaacgucacuaugccuaauaacgacaacuccgauaaguuauacauuuggggcgugcaccauccaucaaccgacaaagagcagacagaccuguauguacaggcaagugggaagguuacugugagcaccaaacguucucagcaaacagucauccccaaugugggauccagaccuugggugaggggccuuucaagccgggucaguauuuacuggaccaucguuaagccaggugauauauuggugauuaacucuaaugggaaccugaucgccccgcgcggauacuuuaaaaugagaacgggcaaguccagcauuaugaggucggacgcucccaucggcacuuguucuuccgagugcaucacaccuaaugggucaauuccaaacgauaagcccuuccagaauguaaacaaaauaaccuauggagccuguccuaaguacgugaaacagaauacucuaaagcucgcgacagguaugcggaacgucccagaaaaacagacccgcggcaucuuuggggcaauugccggauucaucgagaauggcugggaagguaugauagacgggugguauggcuuucgacaccaaaacagugagggaacgggccaggcugccgaucuuaagagcacccaggcagcuauugaccaaaucaaugggaaacugaacagagugaucgagaagacaaaugaaaaguuccaccagauugagaaagaguucuccgaaguugaaggaaggauccaggaucuggagaaguacguggaggacacuaaaauugauuuguggucuuauaacgccgaacuccuggucgcguuagagaaccagcauaccauagaccugacagauagcgaaaugaauaagcucuuugagaaaacucggcgucaacuucgcgaaaacgccgaggacauggguaauggcugcuucaagaucuaccacaagugugacaacgcaugcauugggucaaucagaaauggaaccuaugaucaugacguguacagggaugaggcucugaacaaucgguuucagaucaaaggcguagaauugaagagugguuacaaagacuggauucuauggauauccuucgccaucagcugcuuucugcucuguguugugcugcuuggguucauuaugugggcuugccagaagggcaacauccgauguaauauuugcaucuga

SEQ ID NO: 136604 - RNA, 1701 nt, Artificial Sequence
  derived and/or modified CDS sequence (opt3) from hemagglutinin__InfluenzaA__AFG99116
augaagaccaucauugcccugagcuacauauucugccucguguuugcucagaaccuucccggcaaugacaacuccacagcaacucuguguuuggggcaccaugccgucccuaauggaacguuaguuaaaaccaucacaaacgaucaaauugaggugacuaaugcgaccgaacugguacagucuucaaguacagguagaaucugcgacagcccacacaggauucuagauggcaagaacuguacccucguggacgcucugcuuggggauccgcauugcgacggauuccagaaugagaaaugggaucuguuugucgaacgguccaaggccuucucuaacuguuaucccuacgacgugccugauuaugcaucguugcgcucacucguugccagcaguggcacucuggaguuuaucaaugaauccuucaacuggacaggugugacccagucugggggaagcuacgcuugcaaacgaggcuccgacaauucauuuuucagucgucugaacuggcucuaugagagcgagucuaaguacccagucuuaaaugugacgaugcccaacaauggcaacuuugauaagcuguauauauggggaguacaccauccuuccacugacaaagaacaaaccaaccuuuacguuagagcaucagggagggugacagucagcacuaagcggagucagcagaccaucauuccaaauaucgguucucgccccugggugagaggcuuguccagcaggauuucgaucuacuggacaauagugaaaccuggggauauucugcuaaucaacucuaauggaaaccucauugccccacggggcuauuucaagauccgcaccgguaaauccucaaucaugcgaagugacgcuccgauugggacguguagcuccgagugcauaacucccaauggaucuaucccuaacgacaagccauuucagaaugucaacaagauuacauacggcgccugucccaaauauguuaagcaaaauacccugaaacuugcgacuggcaugagaaacgugccugaaaagcagacaagggggaucuucggagcaauagccgguuuuauugagaauggcugggaggggaugguagauggaugguacggcuuccggcaccagaacagcgaagguaccgggcaggcugccgaccugaaaucaacgcaagcagcuaucgaucagaucaauggcaaguugaaccgugugauugagaaaaccaaugaaaaguuccaccagaucgagaaggaauuuagugaggucgagggacgcauucaagaccucgaaaaauauguggaggauacaaagauagaccugugguccuacaacgccgaauuacugguugcgcucgagaaccagcauacuaucgaucuuaccgacagcgaaaugaauaaacuguucgagaagacaagaaggcaguugcgggagaacgccgaagauaugggcaaugggugcuuuaaaauuuaucacaagugugacaacgcaugcaucggaucuauccgaaaugguacuuacgaucaugacguguaccgcgacgaggcucuaaacaauagauuccagauuaagggcgucgaacugaaaucaggguauaaggauuggauacucuggaucaguuuugccauuagcugcuuccugcuuugugugguacuguugggauuuaucaugugggcuugccaaaaaggcaacauuagguguaauaucugcauauga

SEQ ID NO: 136605 - RNA, 1701 nt, Artificial Sequence
  derived and/or modified CDS sequence (opt3) from hemagglutinin__InfluenzaA__AFG99127
augaagaccaucauugcccugagcuacauacucugccuuguguucgcucagaaccugcccggcaaugacaacuccacagcaacuuuguguuuagggcaccaugccgucccuaauggaacgcugguuaaaaccaucacaaacgaucaaauugaggugacuaaugcgaccgaacuuguacagucuucaaguacagguagaaucugcgacagcccacacaggauucucgauggcaagaacuguacccugguggacgcccuucugggggauccgcauugcgacggauuucagaaugagaaaugggauuuguucgucgaacgguccaaggcuuuuucuaacuguuaucccuacgacgugccugauuaugcaucgcuccgcucacugguugccagcaguggcacucuggaguucaucaaugaauccuuuaacuggacaggugugacccagucugggggaagcuacgcuugcaaacgaggcuccgacaauucauucuuuagucgucucaacugguuauaugagagcgagucuaaguacccaguccugaaugugacgaugcccaacaauggcaacuucgauaagcuauauauauggggaguacaccauccuuccacugacaaagaacaaaccaacuuguacguuagagcaucagggagggugacagucagcacuaagcggagucagcagaccaucauuccaaauaucgguucucgccccugggugagaggccuguccagcaggauuucgaucuacuggacaauagugaaaccuggggauauucuacucaucaacucuaauggaaaccugauugccccacggggcuauuuuaagauccgcaccgguaaauccucaaucaugcgaagugacgcuccgauugggacguguagcuccgagugcauaacucccaauggaucuaucccuaacgacaagccauuccagaaugucaacaagauuacauacggcgccugucccaaauauguuaagcaaaauacccuuaaacuggcgacuggcaugagaaacgugccugaaaagcagacaagggggaucuuuggagcaauagccgguuucauugagaauggcugggaggggaugguagauggaugguacggcuuucggcaccagaacagcgaagguaccgggcaggcugccgacuugaaaucaacgcaagcagcuaucgaucagaucaauggcaagcucaaccgugugauugagaaaaccaaugaaaaguuccaccagaucgagaaggaguucagugaagucgagggacgcauucaagaccuggaaaaauauguggaggauacaaagauagacuuaugguccuacaacgccgaacugcucguugcgcuugagaaccagcauacuaucgaucugaccgacagcgaaaugaauaaauuguuugagaagacaagaaggcagcuacgggagaacgccgaagauaugggcaaugggugcuucaaaauuuaucacaagugugacaacgcaugcaucggaucuauccgaaaugguacuuacgaucaugacguguaccgcgacgaggcucugaacaauagauuucagauuaagggcgucgaacucaaaucaggguauaaggauuggauacuguggaucaguuucgccauuagcugcuuucuucugugugugguauugcucggauucaucaugugggcuugccaaaaaggcaacauuagguguaauaucugcauauga

SEQ ID NO: 136606 - RNA, 1701 nt, Artificial Sequence
  derived and/or modified CDS sequence (opt3) from hemagglutinin__InfluenzaA__AFG99138
augaagaccaucauugcccugagcuacauauucugccucguguuugcucagaaccuucccggcaaugacaacuccacagcaacucuguguuuggggcaccaugccgucccuaauggaacguuaguuaaaaccaucacaaacgaucaaauugaggugacuaaugcgaccgaacugguacagucuucaaguacagguagaaucugcgacagcccacacaggauucuagauggcaagaacuguacccucguggacgcucugcuuggggauccgcauugcgacggauuccagaaugagaaaugggaucuguuugucgaacgguccaaggccuucucuaacuguuaucccuacgacgugccugauuaugcaucguugcgcucacucguugccagcaguggcacucuggaguuuaucaaugaauccuucaacuggacaggugugacccagucugggggaagcuccgcuugcaaacgaggcucagacaauagcuuuuucagucgucugaacuggcucuacgagucugaguccaaguauccagucuuaaaugugacgaugcccaacaauggcaacuuugauaagcuguacauauggggaguacaccauccuucaacugacaaagaacaaaccaaccuuuauguuagagcaagcgggagggugacagucaguacuaagcggaaucagcagaccgugaucccaaacauugguucucgccccugggugagaggcuuguccagcaggaucucgauuuacuggacaaucgucaaaccuggggauauacugcuaauuaauucuaacggaaaucucaucgccccacggggcuacuucaagauucgcaacgguaaauccucaaucaugcgaagugacgcuccgaucgggaccuguagcuccgagugcauuacgcccaauggaucuauaccuaacgacaagccauuucagaauguuaacaagaucacuuauggcgccugucccaaauacgugaagcaaaauacacugaaacuugcgaccggcaugagaaacguaccugaaaagcagacuagggggauuuucggagcaaucgccgguuuuauagagaauggcugggaggggaugguggauggaugguauggcuuccggcaccguaacagcgaagguacagggcaggcugccgaccugaaaucaacccaggcagcuauugaucaaaucaauggcaaguugaaccgcgucaucgagaaaacgaacgaaaaguuccaccagauugagaaggaauuuagugagguggagggaagaauccaggaccucgaaaaauacguugaggauaccaagauugaccugugguccuauaaugccgaauuacugguggcgcucgagaaccaacauacaauagaucuuacugacagcgaaaugaauaaacuguucgagaagaccaggcggcaguugcgagagaacgccgaagauaugggcaaugggugcuuuaaaaucuaccacaagugugacaacgcaugcauuggaucuauccgcaaugguacauaugaucaugacgucuacagagacgaggcucuaaacaauagguuccagaucaagggcguggaacugaaaucaggguacaaggauuggauucucuggauaaguuuugccaucagcugcuuccugcuuuguguaguucuguugggauuuauuaugugggcuugccagaaaggcaacauccgguguaauauuugcaucuga

SEQ ID NO: 136607 - RNA, 1701 nt, Artificial Sequence
  derived and/or modified CDS sequence (opt3) from hemagglutinin__InfluenzaA__AFG99149
augaagaccaucauugcccugagcuacauacucugccuuguguucgcucagaaccugcccggcaaugacaacuccacagcaacuuuguguuuagggcaccaugccgucccuaauggaacgcugguuaaaaccaucacaaacgaucaaauugaggugacuaaugcgaccgaacuuguacagucuucaaguacagguagaaucugcgacagcccacacaggauucucgauggcaagaacuguacccugaucgacgcucuacugggggauccgcauugcgacggauuucagaaugagaaaugggauuuguucguggaacggucccgcgccuuuucuaacuguuaucccuacgacgucccugauuaugcaucgcuccgaucacugguggccagcaguggcacucuggaguucauaaaugaagguuuuaacuggacagggguuacccaguccggaggcucuuacgcuugcaagcguggcagcgacaauuccuucuuuucaagacucaacugguuauaugagagugagagcaaauacccagugcugaaugucacgaugcccaacaaugggaaguucgauaaguuguauaucuggggagugcaccauccuucuacugacaaagaacaaaccaacuuguacguaagggcauccggucggguuacagugucaacuaagcgcagccagcagaccgucauuccaaacaucggcaguagacccugggugagggggcugucuucccggauuagcaucuacuggacaauagugaaaccuggagauauucuacucaucaauucgaccggcaaccugauugccccacgcgguuauuuuaagauccgaacggggaaaucuuccaucaugagaucagacgcuccgauuggaacuuguaguagcgagugcauaacacccaauggcuccaucccuaacgacaagccauuccagaaugucaacaagauuaccuacggcgccugucccagguauguuaaacaaaauacucuuaagcuggcgacagggaugcggaacgugccugaaaaacagacccguggaaucuuuggugcaauagccggcuucauugagaaugggugggagggaaugguagauggcugguacgguuuucgccaccagaacucugaagggacgggccaggcugccgaccuuaagagcacccaagcagcuaucgaucagaucaauggaaaacucaacagagugauugagaagacaaaugaaaaauuccaccagaucgagaaggaguucucagaagucgagggcaggauucaagaccuggaaaaguauguggaggauacuaaaauagacuuauggaguuacaacgccgaacugcucguugcgcuugagaaucagcauaccaucgaucugacagacgccgaaaugaacaaguuguuugagaaaacucggaagcagcuacgagagaacgcagaagauauggggaauggaugcuucaaaauuuaucacaagugugacaacgcuugcaucgguuccauccgcaauggcaccuacgaucaugacguguacagagacgaggcccugaacaauagguuucagauuaagggggucgaacucaaaagcggauauaaggauuggauacuguggaucucuuucgcuauuucaugcuuucuucugugugugguauugcucggcuucaucaugugggccugccaaaaagguaacauucgguguaauaucugcauauga

SEQ ID NO: 136608 - RNA, 1701 nt, Artificial Sequence
  derived and/or modified CDS sequence (opt3) from hemagglutinin__InfluenzaA__AFG99171
augaagaccaucauugcccugagcuacauauucugccucguguuugcucagaaccuucccggcaaugacaacuccacagcaacucuguguuuggggcaccaugccgucccuaauggaacguuaguuaaaaccaucacaaacgaucaaauugaggugacuaaugcgaccgaacugguacagucuucaaguacagguagaaucugcgacagcccacacaggauucuagauggcaagaacuguacccucguggacgcucugcuuggggauccgcauugcgacggauuccagaaugagaaaugggaucuguuugucgaacgguccaaggccuucucuaacuguuaucccuacgacgugccugauuaugcaucguugcgcucacucguugccagcaguggcacucuggaguuuacaaaugaauccuucaacuggaccggugugacgcagucugggggaagcuacgcuugcaaacgaggcuccgacaauucauuuuucagucgucugaacuggcucuaugagagcgagucuaaguacccagucuuaaaugugacuaugcccaacaauggcaacuuugauaagcuguauaucuggggaguacaccauccuuccaccgacaaagaacaaacaaaccuuuacguuagagcaucagggagggugacugucagcaccaagcggaaucagcagacagugauaccaaacaucgguagucgccccugggugagaggcuugucuuccaggauuagcaucuacuggaccauugucaaaccuggggauauccugcuaauaaauucgaacggaaaucucauugccccacggggcuauuucaagauccgcaacgguaaaucuuccauuaugcgaucagacgcuccgaucgggacguguaguagcgagugcaucacucccaauggauccauuccuaacgacaagccauuucagaauguuaacaagauaacauacggcgccugucccaaauaugugaagcaaaauacccugaaacuugcgacuggcaugagaaacguaccugaaaagcagacaagggggaucuucggagcaauugccgguuuuaucgagaauggcugggaggggaugguggauggaugguacggcuuccggcaccguaacucugaagguaccgggcaggcugccgaccugaaaagcacgcaggcagcuauagaucaaauuaauggcaaguugaaccgcgucaucgagaaaaccaacgaaaaguuccaccagaucgagaaggaauuuucagagguggagggaaggauucaggaccucgaaaaauauguugaggauacaaagaucgaccuguggaguuacaaugccgaauuacugguggcgcucgagaaccaacauacuauugaucuuaccgacuccgaaaugaauaaacuguucgagaagacaagacggcaguugcgagagaacgccgaagauaugggcaaugggugcuuuaaaauauaucacaagugugacaacgcaugcaucggaagcauucgcaaugguacuuacgaucaugacgucuacagagacgaggcucuaaacaauagguuccagaucaagggcguggaacugaaaucuggguauaaggauuggauccucuggauuucauuugccauaaguugcuuccugcuuuguguaguucuguugggauuuaucaugugggcuugccagaaaggcaacauucgguguaauaucugcauuuga

SEQ ID NO: 136609 - RNA, 1701 nt, Artificial Sequence
  derived and/or modified CDS sequence (opt3) from hemagglutinin__InfluenzaA__AFG99182
augaagaccaucauugcccugagcuacauauucugccucguguuugcucagaaacuucccggcaacgacaauuccacagcaacucuguguuuggggcaccaugccgucccuaacggaacguuaguuaagaccaucacaaaugaucaaauugaggugacuaacgcgaccgaacugguacagucuucaaguacagguagaaucugcgacagcccacacaggauucuagauggcaaaaauuguacccucaucgacgcucugcuuggggauccgcauugcgacggauuccagaacgagaagugggaucuguuuguggaacgguccaaagccuucucuaauuguuaucccuacgacgucccugauuaugcaucguugcgcucacucguggccagcaguggcacucuggaguuuauaaacgaagguuucaauuggacagggguuacccaguccggaggcucuuacgcuugcaagcgaggcagcgugaacuccuuuuucucacgucugaauuggcucuaugagagugaguacaaguauccagcauuaaacgucacgaugcccaauaacgggaaauuugacaagcuguacaucuggggagugcaccauccuagcacugauaaagaacaaaccaaucuuuacguaagagccucugguaggguuacaguguccacuaagcggucacagcagaccgucauuccaaacaucggcagccgccccugggugagaggguugaguucuaggauuuccaucuauuggacaauagugaaaccuggagacauucugcuaaucaacagcaccggcaaucucauugcuccacgggguuacuucaagauccgcacggggaagucgucuaucaugcgauccgaugccccgauuggaacuuguucaagugagugcauaacacccaacggcagcaucccuaaugacaaaccauuucagaacgucaauaagauuaccuauggcgcgugucccagauacguuaaacaaaacacucugaaacuugcaacagggaugaggaaugugccugaaaagcagacccggggaaucuucggugccauagcuggcuuuauugagaacgggugggagggaaugguagacggcugguaugguuuccgucaccaaaauuccgaagggacgggccaggccgcagaucugaagucuacccaggcugccaucgaccagaucaacggaaaauugaaucgccucauugagaagacaaacgaaaaguuccaccagaucgagaaagaauuuagcgagguggagggcaggauucaagaucuggaaaaguacgucgaggacacuaaaauagauuuauggucauauaaugcggaacugcucguggcccuugagaaccagcauaccaucgaccugacagauagugaaaugaauaaguuguucgagaaaacuagaaagcagcuacgggagaacgcagaagacauggggaacggaugcuuuaagauuuaccacaaaugugauaaugcuugcaucgguuccauccgaaacggcaccuacgaccaugauguuuaucgcgacgaggcccugaauaacagauuccagauuaaggggguggaacucaaaagcggauacaaggacuggauacuguggaucucuuuugcuauuucaugcuuccuucugugugucguguugcucggcuuuaucaugugggccugccaaaaagguaauauuagguguaacaucugcauauga

SEQ ID NO: 136610 - RNA, 1701 nt, Artificial Sequence
  derived and/or modified CDS sequence (opt3) from hemagglutinin__InfluenzaA__AFG99193
augaagaccaucauugcccugagcuacauauccugccucguguucgcucagaaacuucccggcaacgacaauucuacagcaacucuguguuuggggcaccaugccgucccuaacggaacguuaguuaagaccaucacaaaugaucaaauugaggugacuaacgcgaccgaacugguacagucaaguagcacagguagaaucugcgacuccccacacaggauucuagauggcaaaaauuguacccucaucgacgcucugcuuggggauccgcauugcgacggauuucagaacgagaagugggaucuguucguggaacggucuaaagccuuuucgaauuguuaucccuacgacgucccugauuaugcaucauugcgcagccucguggccaguuccggcacucuggaguucauaaacgaagguuuuaauuggacagggguuacccagucuggaggcagcuacgcuugcaagcgaggcuccgugaacucauucuuuagucgucugaauuggcucuaugagagcgagucuaaguacccagcauuaaacgucacgaugcccaauaacgggaaauucgaaaagcuguauaucuggggagugcaccauccuuccacugacaaagagcaaaccaaucuuuacguaagagccucagguaggguuacagugagcacuaagcggagucagcagaccgucauuccaaacaucggcccccgcccuugggugagaggguugucuuccaggauuagcaucuacuggacaauagugaaaccaggagauauucugcuaaucaacucgaccggcaaucucauugcuccgcgggguuauuuuaagauccgcacggggaagucuuccaucaugcgaucagacgcccccauuggaacuuguaguagcgaaugcauaacaccuaacggcuccaucccaaaugauaaacccuuccagaacgucaauaagauuaccuacggcgcguguccuagauauguuaaacaaaacacucugaagcuggcaacagggaugaggaaugugccagagaaacagacccggggaaucuuuggugccauagcuggcuucauugagaacgggugggaaggaaugguagacggcugguacgguuuucgucaccaaaauucugaggggacgggccaggccgcagaccuuaagagcacccaggcugccaucgaucagaucaacggaaaauugaaucgccucauugaaaagacaaacgagaaguuccaccagaucgaaaaagaguucucagagguggaaggcaggauucaagaccuggagaaguaugucgaagauacuaaaauagacuuauggaguuacaaugcggagcugcucguggcccuugaaaaccagcauaccaucgauaugacagacuccgagaugaauaagcuguuugagaaaacuagaaagcaguugcgggaaaacgcagaggauauggggaacggaugcuucaagauuuaucacaaaugugacaaugcuugcaucgguagcauccgaaacggcaccuacgaucaugacguuuaccgcgaugaagcccuaaauaacagauuucagauuaaggggguggagcugaaaucuggauauaaggacuggauacucuggaucucauucgcuauuaguugcuuucugcuuugugucgugcuguugggcuucaucaugugggccugccaaaaagguaauauuagguguaacaucugcauauga

SEQ ID NO: 136611 - RNA, 1701 nt, Artificial Sequence
  derived and/or modified CDS sequence (opt3) from hemagglutinin__InfluenzaA__AFG99204
augaagaccaucauugcccugagcuacauauucugccucggcuuugcucagaaacuucccgggaacgacaauuccacagcaacucuguguuugggacaccaugccgugccuaacgguacguuagucaagaccaucacaaaugaucaaauugagguuacuaacgcgaccgaacuggugcagucuucaaguacaggcagaaucugcgacagcccacacaggauucuagaugggaaaaauuguacccucaucgacgcucugcuuggagauccgcauugcgacggcuuccagaacgagaagugggaucuguuuguagaacgguccaaagccuucucuaauuguuaucccuacgacgugccugauuaugcaucguugcgcucacucgucgccagcagugguacucuggaguuuauaaacgaaggguucaauuggacaggagugacccaguccggcggcucuuacgcuugcaagcgagggagcguuaacuccuuuuucucacgucugaauuggcucuauaagagugagagcaaauacccagcauuaaacgugacgaugcccaauaacggaaaguuugacaaacuguauaucugggguguccaccauccuucuacugauaaggagcaaaccaaucuuuacgugagagccuccggcaggguaacaguuucaacuaaacggagccagcagaccgugauuccaaacaucgggagucgccccugggucagaggauugucuuccaggauuagcaucuacuggacaauagugaagccuggcgacauucugcuaaucaacucgaccgguaaucucauugcuccacggggguauuucaagauccgcacgggaaaaucuuccaucauucgaucagaugccccgauaggcacuuguaguagcgaaugcaucacacccaacggcuccauuccuaaugacaagccauuucagaacgugaauaaaaucaccuacggggcgugucccagauaugucaagcaaaacacucugaaacuugcaacaggaaugaggaauguuccugagaagcagacccgggguauauucggcgccauugcuggguuuaucgaaaacggaugggagggcaugguggacgguugguacggguuccgucaccaaaauucugagggcacgggacaggccgcagaucugaaaagcacccaggcugccaucgaccagauuaacggcaaguugaaucgccucaucgaaaagacaaacgagaaauuccaccagauugaaaaggaguuuucagaaguagaggggagaauacaagaucuggagaaauauguggaagacacuaagaucgauuuauggaguuacaaugcggagcugcucgucgcccuugaaaaccagcauaccauugaccugacagauuccgagaugaauaaauuguucgaaaagacuaggaagcagcuacgggagaacgcagaggacaugggaaacgguugcuuuaaaaucuaucacaagugugauaaugcuugcaucggcagcauucgaaacgggaccuacgaccaugauguguaccgcgacgaagcccugaauaacagauuccagauaaaaggaguugagcucaagucuggcuauaaagacuggauccuguggauuucauuugcuaucaguugcuuccuucuguguguggucuugcucgguuuuauuaugugggccugccaaaaggggaauaucagguguaacauaugcaucuga

SEQ ID NO: 136612 - RNA, 1701 nt, Artificial Sequence
  derived and/or modified CDS sequence (opt3) from hemagglutinin__InfluenzaA__AFG99215
augaagaccaucauugcccugagcuacauauucugccucguguuugcucagaaacuucccggcaacgacaauuccacagcaacucuguguuuggggcaccaugccgucccuaacggaacguuaguuaagaccaucacaaaugaucaaauugaggugacuaacgcgaccgaacugguacagucuucaaguacagguagaaucugcgacagcccacacaggauucuagauggcaaaaauuguacccucaucgacgcucugcuuggggauccgcauugcgacggauuccagaacgagaagugggaucuguuuauagaacgguccaaagccuucucuaauuguuaucccuacgacgugccugauuaugcaucguugcgcucacucgucgccagcaguggcacucuggaguuuaucaacgaagguuucaauuggacaggggugacccaguccggaggcucuuacgcuugcaagcgaggcagcguuaacuccuuuuucucacgucugaauuggcucuaugagagugaguacaaguauccagcauuaaacgugacgaugcccaauaacgggaaauuugacaagcuguacauuuggggaguccaccauccuagcacugaaaaagagcaaaccaaucuuuacgugagagccucugguaggguaacaguuuccacuaagcggucacagcagaccgugacaccaaacaucggcagccgccccugggucagaggguugaguucuaggauuuccaucuauuggaccauagugaaaccuggagauauucugcuaaucaacagcacgggcaaucucauugcuccacgggguuacuucaagauccgcacugggaagucgucuaucaugcgauccgacgccccgauuggaacauguucaagugaaugcauaacccccaacggcagcaucccuaaugauaaaccauuucagaacgugaauaagauuacuuauggcgcgugucccagauacgucaaacaaaacacacugaaacuugcaaccgggaugaggaauguuccugagaagcagacgcggggaaucuucggugccauagcuggcuuuauugagaacgggugggaaggaaugguggacggcugguaugguuuccgucaccaaaauuccgaggggaccggccaggccgcagaccugaagucuacacaggcugccaucgaucagaucaacggaaaauugaaucgccucauugaaaagacuaacgagaaguuccaccagaucgaaaaagaguuuagcgagguagaaggcaggauucaagaccuggagaaguacguggaagauaccaaaauagacuuauggucauauaaugcggagcugcucgucgcccuugaaaaccagcauacaaucgaucugacugacagugagaugaauaaguuguucgagaaaaccagaaagcagcuacgggaaaacgcagaggauauggggaacggaugcuuuaagauuuaccacaaaugugacaaugcuugcaucgguuccauccgaaacggcacauacgaucaugacguguaucgcgaugaagcccugaauaacagauuccagauuaaggggguugagcucaaaagcggauacaaggacuggauacuguggaucucuuuugcuauuucaugcuuccuucuguguguggucuugcucggcuuuaucaugugggccugccaaaaagguaauauuagguguaacaucugcauauga

SEQ ID NO: 136613 - RNA, 1701 nt, Artificial Sequence
  derived and/or modified CDS sequence (opt3) from hemagglutinin__InfluenzaA__AFG99226
augaagaccaucauugcccugagcuacauauucugccucguguuugcucagaaacuucccggcaacgacaauuccacagcaacucuguguuuggggcaccaugccgucccuaacggaacguuaguuaagaccaucacaaaugaucaaauugaggugacuaacgcgaccgaacugguacagucuucaaguacagguagaaucugcgacagcccacacaggauucuagauggcaaaaauuguacccucaucgacgcucugcuuggggauccgcauugcgacggauuccagaacgagaagugggaucuguuuguggaacgguccaaagccuucucuaauuguuaucccuacgacgucccugauuaugcaucguugcgcucacucguggccagcaguggcacucuggaguuuauaaacgaagguuucaauuggacagggguuacccaguccggaggcucuuacgcuugcaagcgaggcagcgugaacuccuuuuucucacgucugaauuggcucuaugagagugaguacaaguauccagcauuaaacgucacgaugcccaauaacgggaaauuugacaagcuguacaucuggggagugcaccauccuagcacugauaaagaacaaaccaaucuuuacguaagagccucugguaggguuacaguguccacuaagcggucacagcagaccgucauuccaaacaucggcagccgccccugggugagaggguugaguucuaggauuuccaucuauuggacaauagugaaaccuggagacauucugagcaucaacucgaccggcaaucuaauugcuccacgggguuacuucaagauccgcacggggaagucuuccaucaugcgaucagaugccccgauuggaacuuguaguagcgagugcauaacacccaacggcuccaucccuaaugacaaaccauuucagaacgucaauaagauuaccuauggcgcgugucccagauacguuaaacaaaacacucucaagcuggcaacagggaugaggaaugugccugaaaaacagacccggggaaucuucggugccauagcuggcuuuauugagaacgggugggagggaaugguagacggcugguaugguuuccgucaccaaaauucugaagggacgggccaggccgcagaucuuaagagcacccaggcugccaucgaccagaucaacggaaaacugaaucgcuugauugagaagacaaacgaaaaguuccaccagaucgagaaagaauuuucagagguggagggcaggauucaagaucucgaaaaguacgucgaggacacuaaaauagaucuguggaguuauaaugcggaauuacugguggcccucgagaaccagcauaccaucgaccuuacagauuccgaaaugaauaagcuguucgagaaaacuagaaagcaguugcgggagaacgcagaagacauggggaacggaugcuuuaagauuuaccacaaaugugauaaugcuugcaucgguagcauccgaaacggcaccuacgaccaugauguuuaucgcgacgaggcccuaaauaacagauuccagauuaaggggguggaacugaaaucuggauacaaggacuggauacucuggaucucauuugcuauuaguugcuuccugcuuugugucgugcuguugggcuuuaucaugugggccugccaaaaagguaauauuagguguaacaucugcauauga

SEQ ID NO: 136614 - RNA, 1701 nt, Artificial Sequence
  derived and/or modified CDS sequence (opt3) from hemagglutinin__InfluenzaA__AFG99237
augaagaccaucauugcccugagcuacauauucugccucguguuugcucagaaacuucccggcaacgacaauuccacagcaacucuguguuuggggcaccaugccgucccuaacggaacguuaguuaagaccaucacaaaugaucaaauugaggugacuaacgcgaccgaacugguacagucuucaaguacagguagaaucugcgacagcccacacaggauucuagauggcaaaaauuguacccucaucgacgcucugcuuggggauccgcauugcgacggauuccagaacgagaagugggaucuguuuguggaacgguccaaagccuucucuaauuguuaucccuacgacgucccugauuaugcaucguugcgcucacucguggccagcaguggcacucuggaguuuauaaacgaagacuucaauuggacagguguuacccaguccgggggaucuuacgcuugcaagcgagagagcgugaacuccuuuuucucacgucugaauuggcucuaugagagugaauacaaguauccagcauuaaacgucacgaugcccaauaacggcaaauuugagaagcuguacaucuggggcgugcaccauccuagcacugauaaagaacaaaccaaucuuuacguaagagccucugggaggguuacaguguccacuaagcggucacagcagaccgucauuccaaacaucggaagccgccccugggugagagguuugaguucuaggauuuccaucuauuggacaauagugaaaccuggcgacauucugcuaaucaacagcaccgggaaucucauugcuccacggggauacuucaagauccgcacgggcaagucgucuaucaugcgauccgaugccccgauugguacuuguucaagugagugcauaacacccaacgggagcaucccuaaugacaaaccauuucagaacgucaauaagauuaccuauggagcgugucccagauacguuaggcaaaacacucugaaacuugcaacaggcaugcggaaugugccugagaagcagacccguggcaucuucggggccauagcuggauuuauugaaaacgguugggagggcaugguagacgggugguauggauuccgccaccaaaauuccgaaggcacgggucaggccgcagaucugaaaucuacccaggcugccaucgaccagaucaacgggaaguugaauagacucauugagaaaacaaacgaaaaguuccaccagaucgagaaggaguuuagcgaaguggagggcaggauucaagaucuggaaaaauacgucgaggacacuaagauagauuuauggucauauaaugcggaacugcucguggcccuugagaaccagcauaccaucgaccugacagauagugagaugaauaaauuguucgaaaagacucggaaacagcuacgagagaacgcagaagacaugggaaacggcugcuuuaagauuuaccacaagugugauaaugcuugcaucggguccauccgcaacggaaccuacgaccaugauguuuauagagacgaggcccugaauaacagguuccagauuaaagguguggaacucaagagcggcuacaaagacuggauacuguggaucucuuuugcuauuucaugcuuccuucugugugucguguugcucggguuuaucaugugggccugccaaaagggaaauauucgguguaacaucugcauauga

SEQ ID NO: 136615 - RNA, 1701 nt, Artificial Sequence
  derived and/or modified CDS sequence (opt3) from hemagglutinin__InfluenzaA__AFG99248
augaagaccaucauugcccugagcuacauauucugccucguguuugcucagaaacuucccggcaacgacaauuccacagcaacucuguguuuggggcaccaugccgucccuaacggaacguuaguuaagaccaucacaaaugaucaaauugaggugacuaacgcgaccgaacugguacagucuucaaguacagguagaaucugcgacagcccacacaggauucuagauggcaaaaauuguacccucaucgacgcucugcuuggggauccgcauugcgacggauuccagaacgagaagugggaucuguuuguggaacgguccaaagccuauucuaauuguuaccccuaugacgucccugauuacgcaucguugcgcucacucguggccagcaguggcacucuggaguucauaaacgaagacuuuaauuggacagguguuacccaguccgggggaucucacgcuugcaagcgaggcagcgugaacuccuucuuuucacgucugaauuggcuccaugagagugaguauaaguacccagcauuaaacgucacgaugcccaauaacggcaaauucgauaagcuguauaucuggggagugcaccacccuauuacugacagagaacaaaccaaucuuuacguaagggccagcgggcggguuacagugucuacuaaacgcucccagcagaccgucaucccaaacauugguuuuagacccugggugaggggcuugucaagccggaucaguauauacuggacaauugugaagccuggggauauccugcuaauuaacucuaccggaaaucucaucgcuccacgcggcuauuucaaaauccgaaacgguaaguccagcauuaugagaucggacgccccgauagggacguguucuuccgagugcaucacucccaauggaucaauuccuaacgacaagccauuucagaaugucaacaaaaucacauacggcgcgugucccagguauguuaagcaaaauacccugaaacuugcaacuggcaugcggaacgugccugaaaagcagacacgugggauauucggagccauugcugguuuuaucgagaauggcugggaggggaugguagauggaugguacggcuuccgccaucagaacagugaagguaccgggcaggccgcagaccugaaaagcacgcaagcugccaucgaucagauuaauggcaaguugaacagacucaucgagaaaaccaaugaaaaguuccaccagauugagaaggaauuuuccgagguggagggaaggauacaagaccuggaaaaauaugucgaggauacaaagaucgacuuauggucuuacaacgcggaacugcucguggcccuugagaaucagcauacuauugaucugaccgacagcgaaaugaacaaauuguucgagaagacacggaaacagcuacgagagaacgcagaagauaugggcaaugggugcuuuaagaucuaucacaagugugacaacgcuugcaucggaucaauucgcaaugguacuuacgaucacgacguuuacagagacgaggcccugaacaauagguuccagauaaaaggcguggaacucaagaguggguauaaagauuggauccuguggauuuccuuugcuaucagcugcuuccuucugugugucguguugcucggauuuauuaugugggccugccaaaagggcaacauccgguguaauauaugcaucuga

SEQ ID NO: 136616 - RNA, 1701 nt, Artificial Sequence
  derived and/or modified CDS sequence (opt3) from hemagglutinin__InfluenzaA__AFG99259
augaagaccaucauugcccugagcuacauauucugccucguguuugcucagaaacuucccggcaacgacaauuccacagcaacucuguguuuggggcaccaugccgucccuaacggaacguuaguuaagaccaucacaaaugaucaaguggagguaacuaacgcgaccgaacuggugcagucuucaaguacagguagaauuugcgacagcccacacaggauccuagauggcaaaaauuguacccucauugacgcucugcuuggggauccgcauugcgacggauuccagaacgagaagugggaucuguuugucgaacgguccaaagccuauucuaauuguuaccccuaugacgugccugauuacgcaucguugcgcucacucguugccagcaguggcacucuggaguucaucaacgaagacuuuaauuggacaggugugacccaguccgggggaucuuaugcuugcaagcgaggcagcgucaacuccuucuuuucacgucugaauuggcuccacaagagugaguacaaauauccagcauuaaacgugacgaugcccaauaacggcaaguucgauaaacuguacauauggggaguacaucacccuagcacugacagagagcaaaccaaucuuuacguuagggccucugggcgggugacagucuccacuaagcgcucacagcagaccgugaucccaaacauugguagcagacccugggugaggggcuugaguucucggaucuccauuuauuggacaaucgucaaaccuggggauauacugcuaauuaacagcaccggaaaucucaucgcuccacgcggcuacuuuaagauucgaacggguaagucgucuaucaugagauccgacgccccgaucgggacuuguucaagugaaugcauuacacccaacggaagcauaccuaaugacaaaccauuccagaacguuaauaagaucaccuauggcgcgugucccagguacgugaaacaaaacacucugaaacuugcaacaggcaugcggaauguaccugagaaacagacccgugggauuuuuggagccaucgcugguuucauagaaaacggcugggaggggaugguggauggaugguauggcuuucgccaccaaaauuccgaggguacggggcaggccgcagaccugaagucuacccaggcugccauugaucagaucaacggcaaauugaauagacucaucgaaaagacaaacgagaaguuccaucagauugaaaaagaguucagcgaagucgagggaaggauccaagaccuggagaaguacguggaagauacuaaaauugacuuauggucauauaaugcggagcugcucguugcccuugaaaaccagcacaccauagaucugacagacagugagaugaauaaguuguuugaaaagacucggaagcagcuacgagagaacgcagaggauaugggcaacgggugcuucaagaucuaccauaaaugugacaaugcuugcauuggauccauccgcaacgguaccuacgaucacgacguguauagagacgaagcccugaauaacagguuucagaucaagggcgucgagcucaaaagcggguacaaggauuggauucuguggauaucuuucgcuaucucaugcuuucuucugugugugguauugcucggauucauuaugugggccugccaaaaaggcaauauccgguguaacauuugcaucuga

SEQ ID NO: 136617 - RNA, 1701 nt, Artificial Sequence
  derived and/or modified CDS sequence (opt3) from hemagglutinin__InfluenzaA__AFG99270
augaagaccaucauugcccugagcuacauauucugccucguguuugcucagaaacuucccggcaacgacaauuccacagcaacucuguguuuggggcaccaugccgucccuaacggaacguuaguuaagaccaucacaaaugaucaaauugaggugacuaacgcgaccgaacugguacagucuucaaguacagguagaaucugcgacagcccacacaggauucuagauggcaaaaauuguacccucaucgacgcucugcuuggggauccgcauugcgacggauuccagaacaaggagugggaucuguuuguggaacgguccaaagccuauucuaauuguuaccccuaugacgucccugauuacgcaucguugcgcucacucguggccagcaguggcacucuggaguucauaaacgaagacuuuaauuggacagguguugcucaguccgggggaucuuaugcaugcaagcgaggcagcgugaacuccuucuuuucacgucugaauuggcuccacaagagugaguacaaauauccagccuuaaacgucaccaugcccaauaacggcaaguucgauaaacuguacaucuggggagugcaucacccuagcacggacagagagcaaacuaaucuuuacguaagggcuucugggcggguuaccguguccacaaagcgcucacagcagacugucauuccaaacaucgguagcagacccugggugaggggcuugaguucucggauuuccaucuauuggaccauagugaaaccuggggauauucugcuaaucaacagcacaggaaaucucauugccccacgcggcuacuuuaagauccgaaccgguaagucgucuaucaugagauccgacgcgccgauugggacguguucaagugaaugcauaacucccaacggaagcaucccuaaugacaaaccauuccagaacgucaauaggauuacauauggcgcauguccccgguacguuaagcaaaacacccugaaacuugccacuggcaugcguaaugugccugagaagcagacacgcgggaucuuuggagcuauagccgguuucauugaaaacggcugggaggggaugguagauggaugguauggcuuuagacaccauaauuccgaggguaccgggcaggcagcugaccugaaaucuacgcaggccgcgaucgaucaaaucaacggcaaguugaauaggcucauugagaaaaccaacgaaaaguuccaccagaucgaaaaggaguucagcgaaguggagggacggauucaggaccuggagaaauacgucgaagauacaaagauagacuuauggucauauaaugccgagcugcucguggcacuugaaaaccaacauacuaucgaucugaccgacagugagaugaauaaauuguuugaaaagacacgaaaacagcuacgcgagaacgcugaggauaugggcaacgggugcuucaagauuuaccacaagugugacaaugccugcaucggauccaucagaaacgguacuuacgaucacgacguuuauagggacgaagcucugaauaaccgguuucagauuaaaggcguggagcucaagagcggguacaaagauuggauacuguggaucucuuucgccauuucaugcuuucuucugugugucguguugcucggauucaucaugugggcaugccagaagggcaauauucgcuguaacaucugcauauga

SEQ ID NO: 136618 - RNA, 1701 nt, Artificial Sequence
  derived and/or modified CDS sequence (opt3) from hemagglutinin__InfluenzaA__AFG99281
augaagaccaucauugcccugagcuacauauucugccucguguuugcucagaaacuucccggcaacgacaauuccacagcaacucuguguuuggggcaccaugccgucccuaacggaacguuaguuaagaccaucacaaaugaucaaauugaggugacuaacgcgaccgaacugguacagucuucaaguacagguagaaucugcgacagcccacacaggauucuagauggcaaaaauuguacccucaucgacgcucugcuuggggauccgcauugcgacggauuccagaacgagaagugggaucuguuuguggaacgguccaaagccuucucuaauuguuaucccuacgacgucccugauuaugcaucguugcgcucacucguggccagcaguggcacucuggaguuuauaaacgaagaguucaauuggacagguguuacccaguccgggggaucuuacgcuugcaagcgaggcagcgugaacuccuuuuucucacgucugaauuggcuccacaagagugaguauaaauacccagcauuaaacgucacgaugcccaauaacggcagauuugacaagcuguauaucuggggagugcaucacccuagcacugauagggaacaaaccaaucuuuacguacgggccucugggcgcguuacaguguccacuaaaagaucacagcagaccgucauuccaaacaucggucccaggccuugggugcggggcuugagcagucgcauuucuaucuacuggacaauagugaagccaggggacauucugcuaaucaacuccaccggaaaucucauugcuccgcgaggcuauuucaaaauccacacggguaagagcucgaucaugagaucugaugcccccauugggacuuguuccucagagugcauaacaccuaacggaaguaucccaaaugacaagcccuuucagaacgucaauaaaauuaccuacggcgcguguccuagguauguuaagcaaaacacucugaaacuugcaacaggcaugcggaaugugccagacaagcagacccgugggaucuucggagccauagcugguuuuauugaaaacggcugggaggggaugguagauggaugguacggcuuccgccaucagaauagcgaggguacggggcaggccgcagaccugaaauccacccaagcugccaucgaucagaucaacggcaaguugaauagacucauugagaaaacaaacgaaaaguuccaccagaucgaaaaggaguuuucugaaguggagggaaggauucaagaccuggagaaauaugucgaagauacuaagauagacuuauggagcuacaaugcggagcugcucguggcccuugaaaaccagcauaccaucgaucugacagacucagagaugaauaaauuguucgaaaagacucggaaacagcuacgagagaacgcagaggauaugggcaacgggugcuuuaagauuuaucacaagugugacaaugcuugcaucggaaguauccgcaacgguaccuacgaucacgacguuuacagagacgaagcccugaauaacagguuccagauuaaaggcguggagcucaaguccggguauaaagauuggauacuguggaucagcuuugcuauuucuugcuuccuucugugugucguguugcucggauuuaucaugugggccugccaaaagggcaauauucgguguaacaucugcauauga

SEQ ID NO: 136619 - RNA, 1701 nt, Artificial Sequence
  derived and/or modified CDS sequence (opt3) from hemagglutinin__InfluenzaA__AFG99292
augaagaccaucauugcccugagcuacauauucugccucguguuugcucagaaacuucccggcaacgacaauuccacagcaacucuguguuuggggcaccaugccgucccuaacggaacguuaguuaagaccaucacaaaugaucaaguggagguaacuaacgcgaccgaacuggugcagucuucaaguacagguagaauuugcgacagcccacacaggauccuagauggcaaaaauuguacccucauugacgcucugcuuggggauccgcauugcgacggauuccagaacgagaagugggaucuguuugucgaacgguccaaagccuauucuaauuguuaccccuaugacgugccugauuacgcaucguugcgcucacucguugccagcaguggcacucuggaguucaucaacgaagacuuuaauuggacaggugugacccaguccgggggaucuuaugcuugcaagcgaggcagcgucaacuccuucuuuucacgucugaauuggcuccacgagagugaguacaaguauccagcauuaaacgugacgaugcccaauaacggcaaauucgauaagcuguacauauggggaguacaucacccuagcacugacagagaacaaaccaaucuuuacguuagggccucugggcgggugacagucuccacuaaacgcucacagcagaccgugaucccaaacauugguagcagacccugggugaggggcuugaguucucggaucuccauuuauuggacaaucgucaagccuggggauauacugcuaauuaacagcaccggaaaucucaucgcuccacgcggcuacuuuaaaauucgaacggguaagucgucuaucaugagauccgacgccccgaucgggacuuguucaagugagugcauuacacccaacggaagcauaccuaaugacaagccauuccagaacguuaauaaaaucaccuauggcgcgugucccagguacgugaagcaaaacacucugaaacuugcaacaggcaugcggaauguaccugaaaagcagacccgugggauuuuuggagccaucgcugguuucauagagaacggcugggaggggaugguggauggaugguauggcuuucgccaccaaaauuccgaagguacggggcaggccgcagaccugaaaucuacccaggcugccauugaucagaucaacggcaaguugaauagacucaucgagaaaacaaacgaaaaguuccaucagauugagaaggaguucagcgaagucgagggaaggauccaagaccuggaaaaauacguggaggauacuaagauugacuuauggucauauaaugcggaacugcucguugcccuugagaaccagcacaccauagaucugacagacagugaaaugaauaaauuguuugagaagacucggaaacagcuacgagagaacgcagaagauaugggcaacgggugcuucaagaucuaccauaagugugacaaugcuugcauuggauccauccgcaacgguaccuacgaucacgacguguauagagacgaggcccugaauaacagguuucagaucaaaggcgucgaacucaagagcggguacaaagauuggauucuguggauaucuuucgcuaucucaugcuuucuucugugugugguauugcucggauucauuaugugggccugccaaaagggcaauauccgguguaacauuugcaucuga

SEQ ID NO: 136620 - RNA, 1701 nt, Artificial Sequence
  derived and/or modified CDS sequence (opt3) from hemagglutinin__InfluenzaA__AFG99303
augaagaccaucauugcccugagcuacauauucugccucguggucgcucagaaacuucccggcaacgacaauuccacagcaacucuguguuuggggcaccaugccguuccuaacggaacguuagugaagaccaucacaaaugaucaaauugagguaacuaacgcgaccgaacuggugcagucuucaaguacagguagaaucugcgacagcccacacaggauucuagauggcaaaaauuguacccucaucgacgcucugcuuggggauccgcauugcgacggauuucagaacaaggagugggaucuguucgucgaacgguccaaagccuauucuaauuguuaccccuaugacgugccugauuacgcaucguugcgcucacucguugccagcaguggcacucuggaguuuauaaacgaagacuucaauuggacagguguggcucaguccgggggaucuuaugcaugcaagcgaggcagcgucaacuccuuuuucucacgucugaauuggcuccacgagagugaguacaaguauccagccuuaaacgugaccaugcccaauaacggcaaauuugauaagcuguacaucuggggaguacaucacccuagcacggacagagaacaaacuaaucuuuacguuagggcuucugggcgggugaccgucuccacaaaacgcucacagcagacugugauuccaaacaucgguagcagacccugggugaggggcuugaguucucggauuuccaucuauuggaccauagucaagccuggggauauucugcuaaucaacagcacaggaaaucucauugccccacgcggcuacuucaaaauccgaaccgguaagucgucuaucaugagauccgacgcgccgauugggacguguucaagugagugcauaacucccaacggaagcaucuccaaugacaagccuuuucagaacguuaauaggauuacauauggcgcauguccacgguacgugaaacaaaacacccugaagcuggccacuggcaugcguaauguacccgaaaaacagacacgcgggaucuucggagcuauagccgguuuuauugagaacggcugggaggggaugguggauggaugguauggcuucagacaccaaaauucugaagguaccgggcaggcagcugaccuuaagagcacgcaggccgcgaucgaucagaucaacggcaaauugaauaggcucauugagaagaccaacgaaaaauuucaucagaucgagaaggaguucucagaagucgagggacggauucaagaccuggaaaaguacguggaggauacaaaaauagacuuauggaguuauaaugccgaacugcucguugcacuugagaaccagcacacuaucgaucugaccgacuccgaaaugaauaaguuguucgagaaaacacgaaagcagcuacgcgagaacgcugaagauaugggcaacgggugcuuuaaaauuuaccauaagugugacaaugccugcaucggaagcaucagaaacgguacuuacgaucacgacguguauagggacgaggcucugaauaaccgguuccagauuaagggcgucgaacucaaaucuggguacaaggauuggauacuguggaucucauuugccauuaguugcuuccuucugugugugguauugcucggauuuaucaugugggcaugccaaaaaggcaauauucgcuguaacaucugcauauga

SEQ ID NO: 136621 - RNA, 1701 nt, Artificial Sequence
  derived and/or modified CDS sequence (opt3) from hemagglutinin__InfluenzaA__AFG99314
augaagaccaucauugcccugagcuacauauucugccucguguuugcucagaaacuucccggcaacgacaauuccacagcaacucuguguuuggggcaccaugccgucccuaacggaacguuaguuaagaccaucacaaaugaucaaauugaggugacuaacgcgaccgaacugguacagucuucaaguacagguagaaucugcgacagcccacacaggauucuagauggcaaaaauuguacccucaucgacgcucugcuuggggauccgcauugcgacuccuuccagaacgagaagugggaucuguuuguggaacggucuaaagccuauucgaauuguuaccccuaugacgucccugauuacgcaucauugcgcagccucguggccaguuccggaacucuggaguucauaaacgaagacuuuaauuggacaggcguuacccagucuggugggagcuaugcuugcaagcgaggauccgugaacucauucuuuagucgucugaauuggcuccacgagagcgaguacaaguauccagcauuaaacgucacgaugcccaauaacggcaaauucgauaagcuguacaucuggggcauucaucacccuucuacugacagagaacaaaccaaucuuuacgugagggccuccgggcggguaacaguuucaacuaaacgcagccagcagaccgugaucccaaacauuggaaguagacccugggucagggguuugucuucccggaucagcauauauuggacaauugugaagccuggcgauauccugcuaauuaacucgaccgggaaucucaucgcuccacgcggauacuuuaaacugcgaacgggcaagucuuccaucaugagaucagacgccccgauugguacuuguaguagcgagugcauaacacccaacggguccaucccuaaugacaagccauuccagaacgugaauaaaauuaccuauggagcgugucccagguacgucaagcaaaacacucuuaaacuggcaacaggcaugcggaauguuccugaaaagcagacccguggcaucuuuggggccauagcuggauucauugagaacgguugggagggcaugguggaugggugguauggauuucgccaccaaaauucugaaggcacgggucaggccgcagacuugaaaagcacccaggcugccaucgaucagaucaacgggaagcucaauagacugauugagaaaacaaacgaaaaguuccaucagaucgagaaggaguucucagaaguagagggcaggauucaagacuuagaaaaauacguggaggauacuaagauagaccuguggaguuauaaugcggaacuccuugucgcccuggagaaccagcacaccaucgauuugacagacuccgaaaugaauaaacuauuugagaagacucggaaacagcugcgagagaacgcagaagauaugggaaacggcugcuucaagauuuaccauaagugugacaaugcuugcaucgggagcauccgcaacggaaccuacgaucacgacguguauagagacgaggcccucaauaacagguuucagauuaaagguguugaacugaagucuggcuacaaagauuggauacuuuggaucucauucgcuauuaguugcuuucuguugugugugguccuccugggguucaucaugugggccugccaaaagggaaauauucgguguaacaucugcauauga

SEQ ID NO: 136622 - RNA, 1701 nt, Artificial Sequence
  derived and/or modified CDS sequence (opt3) from hemagglutinin__InfluenzaA__AFG99336
augaagaccaucauugcccugagcuacauauucugccucguguuugcucagaaacuucccggcaacgacaauuccacagcaacucuguguuuggggcaccaugccgucccuaacggaacguuaguuaagaccaucacaaaugaucaaauugaggugacuaacgcgaccgaacugguacagucuucaaguacagguagaaucugcgacagcccacacaggauucuagauggcaaaaauuguacccucaucgacgcucugcuuggggauccgcauugcgacggauuccagaacaaggagugggaucuguuuguggaacgguccaaagccuauucuaauuguuaccccuaugacgucccugauuacgcaucguugcgcucacucguggccagcaguggcacucuggaguucauaaacgaagacuuuaauuggacagguguugcucaguccgggggaucuuaugcaugcaagcgaggcagcgugaacuccuucuuuucacgucugaauuggcuccacaagagugaguacaaauauccagccuuaaacgucaccaugcccaauaacggcaaguucgauaaacuguacaucuggggagugcaucacccuagcacggacagagagcaaacuaaucuuuacguaagggcuucugggcggguuaccguguccacaaagcgcucacagcagacugucauuccaaacaucgguagcagacccugggugaggggcuugaguucucggauuuccaucuauuggaccauagugaaaccuggggauauucugcuaaucaacagcacaggaaaucucauugccccacgcggcuacuuuaagauccgaaccgguaagucgucuaucaugagauccgacgcgccgauugggacguguucaagugaaugcauaacucccaacggaagcaucccuaaugacaaaccauuccagaacgucaauaggauuacauauggcgcauguccccgguacguuaagcaaaacacccugaaacuugccacuggcaugcguaaugugccugagaagcagacacgcgggaucuuuggagcuauagccgguuucauugaaaacggcugggaggggaugguagauggaugguauggcuuuagacaccaaaauuccgaggguaccgggcaggcagcugaccugaaaucuacgcaggccgcgaucgaucagaucaacggcaaguugaauaggcucauugagaaaaccaacgaaaaguuccaucagaucgaaaaggaguucagcgaaguggagggacggauucaagaccuggagaaauacgucgaagauacaaagauagacuuauggucauauaaugccgagcugcucguggcacuugaaaaccagcacacuaucgaucugaccgacagugagaugaauaaauuguuugaaaagacacgaaaacagcuacgcgagaacgcugaggauaugggcaacgggugcuucaagauuuaccauaagugugacaaugccugcaucggauccaucagaaacgguacuuacgaucacgacguuuauagggacgaagcucugaauaaccgguuucagauuaaaggcguggagcucaagagcggguacaaagauuggauacuguggaucucuuucgccauuucaugcuuucuucugugugucguguugcucggauucaucaugugggcaugccaaaagggcaauauucgcuguaacaucugcauauga

SEQ ID NO: 136623 - RNA, 1701 nt, Artificial Sequence
  derived and/or modified CDS sequence (opt3) from hemagglutinin__InfluenzaA__AFG99347
augaagaccaucauugcccugagcuacauauucugccucguguuugcucagaaacuucccggcaacgacaauuccacagcaacucuguguuuggggcaccaugccgucccuaacggaacguuaguuaagaccaucacaaaugaucaaauugaggugacuaacgcgaccgaacugguacagucuucaaguacagguagaaucugcgacagcccacacaggauucuagauggcaaaaauuguacccucaucgacgcucugcuuggggauccgcauugcgacggauuccagaacaaggagugggaucuguuuguggaacgguccaaagccuauucuaauuguuaccccuaugacgucccugauuacgcaucguugcgcucacucguggccagcaguggcacucuggaguucauaaacgaagacuuuaauuggacagguguugcucaguccgggggaucuuaugcaugcaagcgaggcagcgugaacuccuucuuuucacgucugaauuggcuccacaagccagaguacaaauaucccgccuuaaacgucaccaugccuaauaacggcaaguucgauaaacuguacaucuggggagugcaucacccaaguacggacagagagcaaacuaaucuuuacguaagggcuagcgggcggguuaccgugucuacaaagcgcucccagcagacugucauucccaacaucgguucaagaccuugggugaggggcuugagcagucggauuucuaucuauuggaccauagugaaaccaggggauauucugcuaaucaacuccacaggaaaucucauugccccgcgcggcuacuuuaagauccgaaccgguaagagcucgaucaugagaucugacgcgcccauugggacguguuccucagaaugcauaacuccuaacggaaguaucccaaaugacaaacccuuccagaacgucaauaggauuacauauggcgcauguccucgguacguuaagcaaaacacccugaaacuugccacuggcaugcguaaugugccagagaagcagacacgcgggaucuuuggagcuauagccgguuucauugaaaacggcugggaggggaugguagauggaugguauggcuuuagacaccagaauagcgaggguaccgggcaggcagcugaccugaaauccacgcaagccgcgaucgaucagaucaacggcaaguugaauaggcucauugacaaaaccaacgaaaaguuccaucagaucgagaaggaguucucugaaguggaaggacggauucaagaucuggagaaauacgucgaggacacaaagauagauuuauggagcuauaaugccgaacugcucguggcacuugagaaccagcacacuaucgaccugaccgauucagaaaugaauaaauuguuugagaagacacgaaaacagcuacgcgaaaacgcugaggacaugggcaacgggugcuucaagauuuaccauaagugugauaaugccugcaucggaaguaucagaaacgguacuuacgaccacgacguuuauagggaugaggcucugaauaaccgguuucagauuaaaggcguggaacucaaguccggguacaaagacuggauacuguggaucagcuucgccauuucuugcuuucuucugugugucguguugcucggauucaucaugugggcaugccaaaagggcaauauucgcuguaacaucugcauauga

SEQ ID NO: 136624 - RNA, 1701 nt, Artificial Sequence
  derived and/or modified CDS sequence (opt3) from hemagglutinin__InfluenzaA__AFG99358
augaagaccaucauugcccugagccacauacucugccuuguguucgcucagaaacugcccggcaacgacaauuccacagcaacuuuguguuuagggcaucacgccgucccuaacggaacgcugguuaagaccaucacaaaugaucaaauugaggugacuaacgcgaccgaacuuguacagucuucaaguacagguagaaucugcgacagcccacauaggauucucgauggcaaaaauuguacccugaucgacgcucuacugggggauccgcacugcgacggauuucagaacaaggagugggauuuguucguggaacgguccaaagccuacucuaauuguuaucccuacgacgucccugauuaugcaucgcuccgcucacugguggccagcaguggcacucuggaguuuauaaacgaagacuucaauuggacagguguugcucaggaugggggauccuacgcaugcaagcgaggcucugugaacagcuuuuucucccgucucaauugguuacauaagcuggaguauaaauacccagcccuuaacgucaccaugcccaauaacggcaaguuugacaaauuguauaucuggggagugcaccacccuucaacggauagugaccaaacuagccuguacguaagagcuucugggaggguuaccguguccacaaagcggucacagcagacugucaccccaaauauugguagccgccccugggugagaggccuaaguucuaggaucuccauuuacuggacaaucgugaaaccuggggacauacuccugauuaacagcaucggaaaccuuauugccccacggggcuauuucaagauccgcaaugguaagucgucuaucaugcgauccgaugucccgauugggaacuguucaagugagugcauaacccccaauggaagcaucccuaacgacaaaccauuucagaauguuaacagaauuacguacggcgcgugucccagguaugugaagcaaaauacucugaaauuggcaacaggcaugcggaacguaccugaaaagcagacccgugggaucuucggagccauagcugguuuuauugagaauggcugggaagggaugguggauggaugguacggcuuccgccaucagaacuccgaggguacugggcaggccgcagaccucaaaucuacacaagcugccaucgaucagaucaauggcaagcugaacagauuaauugagaaaaccaaugaaaaguuucaccagaucgagaaggaguucagcgaagucgaaggaaggauucaagaccuggagaaauauguggaggauacgaagauagaccucuggucauacaacgcggaacuucugguugccuuggagaaucagcauaccaucgaucuaacagacagugaaaugaacaaacuguucgagaagacucggaaacagcuccgagaaaacgcagaggauaugggcaaugggugcuuuaagauuuaucacaagugugacaacgcuugcaucggauccauccgcaaugguaccuacgaccacgauguguacagagacgaggcccugaacaauagguuccagauuaaaggcgucgaacuuaagagcggguauaaagauuggauacuguggaucucuuuugcuauuucaugcuucuugcucugugugguacuguuaggauuuaucaugugggccugccaaaagggcaacauucgguguaauaucugcauauga

SEQ ID NO: 136625 - RNA, 1701 nt, Artificial Sequence
  derived and/or modified CDS sequence (opt3) from hemagglutinin__InfluenzaA__AFG99369
augaagaccaucauugcccugagcuacauauucugccucguguuugcucagaaacuucccggcaacgacaauuccacagcaacucuguguuuggggcaccaugccgucccuaacggaacguuaguuaagaccaucacaaaugaucaaauugaggugacuaacgcgaccgaacugguacagucuucaaguacagguagaaucugcgacagcccacacaggauucuagauggcaaaaauuguacccucaucgacgcucugcuuggggauccgcauugcgacggauuccagaacaaggagugggaucuguuuguggaacgguccaaagccuauucuaauuguuaccccuaugacgucccugauuacgcaucguugcgcucacucguggccagcaguggcacucuggaguucauaaacgaagacuuuaauugggcugguguugcacaguccgggggaucuuaugccugcaagcgaggcagcgugaacuccuucuuuucacgucugaauuggcuccacgagagugaguacaaguauccagcuuuaaacgucacaaugcccaauaacggcaaauucgauaagcuguacaucuggggagugcaucacccuagcaccgacagagaacaaacgaaucuuuacguaagggccucugggcggguuacuguguccaccaaacgcucacagcagacagucauuccaaacaucgguagcagacccugggugaggggcuugaguucucggauuuccaucuauuggacuauagugaagccuggggauauucugcuaaucaacagcaccggaaaucucauugcgccacgcggcuacuuuaaaauccgaacagguaagucgucuaucaugagauccgacgcaccgauugggaccuguucaagugagugcauaacgcccaacggaagcaucccuaaugacaagccauuccagaacgucaauaggauuacuuauggcgccuguccccgguacguuaaacaaaacacacugaaacuugcuaccggcaugcguaaugugccugaaaagcagacucgcgggaucuuuggagccauagcagguuucauugagaacggcugggaggggaugguagauggaugguauggcuuuagacaccaaaauuccgaagguacagggcaggcugccgaccugaagucuacccaggcggccaucgaucagaucaacggcaaauugaauaggcucauugagaagacgaacgaaaaauuccaucagaucgagaaggaguucagcgaaguggagggacggauucaagaccuggaaaaguacgucgaggauaccaaaauagacuuauggucauauaaugcagaacugcucguggcucuugagaaccagcacacaaucgaucugacugacagugaaaugaauaaguuguuugagaaaacccgaaagcagcuacgcgagaacgccgaagauaugggcaacgggugcuucaaaauuuaccauaagugugacaaugcuugcaucggauccaucagaaacgguacauacgaucacgacguuuauagggacgaggcccugaauaaccgguuucagauuaagggcguggaacucaaaagcggguacaaggauuggauacuguggaucucuuucgcaacuucaugcuuucuucugugugucguguugcucggauucauuaugugggccugccaaaaaggcaauauccgcuguaacauuugcaucuga

SEQ ID NO: 136626 - RNA, 1701 nt, Artificial Sequence
  derived and/or modified CDS sequence (opt3) from hemagglutinin__InfluenzaA__AFG99380
augaagaccaucauugcccugagcuacauauucugccucguguuugcucagaaacuucccggcaacgacaauuccacagcaacucuguguuuggggcaccaugccgucccuaacggaacguuaguuaagaccaucacaaaugaucaaauugaggugacuaacgcgaccgaacugguacagucuucaaguacagguagaaucugcgacagcccacacaggauucuagauggcaaaaauuguacccucaucgacgcucugcuuggggauccgcauugcgacggauuccagaacaaggagugggaucuguuuguggaacgguccaaagccuauucuaauuguuaccccuaugacgucccugauuacgcaucguugcgcucacucguggccagcaguggcacucuggaguucauaaacgaagacuuuaauuggacagguguugcucaguccgggggaucuuaugcaugcaagcgaggcagcgugaacuccuucuuuucacgucugaauuggcuccacgagagugaguacaaguauccagccuuaaacgucaccaugcccaauaacggcaaauucgauaagcuguacaucuggggagugcaucacccuagcacggacagagaacaaacuaaucuuuacguaagggcuucugggcggguuaccguguccacaaaacgcucacagcagacugucauuccaaacaucgguagcagacccugggugaggggcuugaguucucggauuuccaucuauuggaccauagugaagccuggggauauucugcuaaucaacagcacaggaaaucucauugccccacgcggcuacuuuaaaauccgaaccgguaagucgucuaucaugagauccgacgcgccgauugggacguguucaagugagugcauaacucccaacggaagcaucccuaaugacaagccauuccagaacgucaauaggauuacauauggcgcauguccccgguacguuaaacaaaacacccugaaacuugccacuggcaugcguaaugugccugaaaagcagacacgcgggaucuuuggagcuauagccgguuucauugagaacggcugggaggggaugguagauggaugguauggcuuuagacaccaaaauuccgaagguaccgggcaggcagcugaccugaagucuacgcaggccgcgaucgaucagaucaacggcaaauugaauaggcucauugagaagaccaacgaaaaauuccaucagaucgagaaggaguucagcgaaguggagggacggauucaagaccuggaaaaguacgucgaggauacaaaaauagacuuauggucauauaaugccgaacugcucguggcacuugagaaccagcacacuaucgaucugaccgacagugaaaugaauaaguuguuugagaaaacacgaaagcagcuacgcgagaacgcugaagauaugggcaacgggugcuucaaaauuuaccauaagugugacaaugccugcaucggauccaucagaaacgguacuuacgaucacgacguuuauagggacgaggcucugaauaaccgguuucagauuaagggcguggaacucaaaagcggguacaaggauuggauacuguggaucucuuucgccauuucaugcuuucuucugugugucguguugcucggauucaucaugugggcaugccaaaaaggcaauauucgcuguaacaucugcauauga

SEQ ID NO: 136627 - RNA, 1701 nt, Artificial Sequence; identical to SEQ ID NO: 136626
  derived and/or modified CDS sequence (opt3) from hemagglutinin__InfluenzaA__AFG99391

SEQ ID NO: 136628 - RNA, 1701 nt, Artificial Sequence
  derived and/or modified CDS sequence (opt3) from hemagglutinin__InfluenzaA__AFG99402
augaagaccaucauugcccugagcuacauauucugccucguguuugcucagaaacuucccggcaacgacaauuccacagcaacucuguguuuggggcaccaugccgucccuaacggaacguuaguuaagaccaucacaaaugaucaaauugaggugacuaacgcgaccgaacugguacagucuucaaguacagguagaaucugcgacagcccacacaggauucuagauggcaaaaauuguacccucaucgacgcucugcuuggggauccgcauugcgacggauuccagaacgagaagugggaucuguuuguggaacgguccaaagccuauucuaauuguuaccccuaugacgucccugauuacgcaucguugcgcucacucguggccagcaguggcacucuggaguucauaaacgaagacuuuaauuggacagguguuacccaguccgggggaucuuaugcuugcaagcgaggcagcgugaacuccuucuuuucacgucugaauuggcuccacaagagugaguacaaauauccagcauuaaacgucacgaugcccaauaacggcaaguucgauaaacuguacaucuggggagugcaucacccuguaacugacagagagcaaaccaaucuuuacguuagggccagcgggcgggugacagucucuacuaagcgcucccagcagaccgugauuccaaacaucgguucaagacccugggugaggggcuugagcagucggauuucuaucuauuggacaauagucaaaccuggggauauucugcuaaucaacuccaccggaaaucucauugcuccacgcggcuacuuuaagauccgaacggguaagagcucgaucaugagaucugacgccccgauugggacuuguuccucagaaugcauaacacccaacggaaguaucccuaaugacaaaccauuccagaacguuaauaagauuaccuauggcgcgugucccagguacgugaaacaaaacacucugaaacuugcaacaggcaugcggaauguaccugagaaacagacccgugggaucuuuggagccauagcugguuucauugaaaacggcugggaggggaugguggauggaugguauggcuuucgccaccagaauagcgaggguacggggcaggccgcagaccugaaguccacccaagcugccaucgaucagaucaacggcaaauugaauagacucauugaaaagacaaacgagaaguuccaucagaucgaaaaagaguucucugaagucgagggaaggauucaagaccuggagaaguacguggaagauacuaaaauagacuuauggagcuauaaugcggagcugcucguugcccuugaaaaccagcacaccaucgaucugacagacucagagaugaauaaguuguuugaaaagacucggaagcagcuacgagagaacgcagaggauaugggcaacgggugcuucaagauuuaccauaaaugugacaaugcuugcaucggaaguauccgcaacgguaccuacgaucacgacguguauagagacgaagcccugaauaacagguuucagauuaagggcgucgagcucaaauccggguacaaggauuggauacuguggaucagcuucgcuauuucuugcuuucuucugugugugguauugcucggauucaucaugugggccugccaaaaaggcaauauucgguguaacaucugcauauga

SEQ ID NO: 136629 - RNA, 1701 nt, Artificial Sequence
  derived and/or modified CDS sequence (opt3) from hemagglutinin__InfluenzaA__AFG99413
augaagaccaucauugcccugagcuacauauucugccucguguuugcucagaaacuucccggcaacgacaauuccacagcaacucuguguuuggggcaccaugccgucccuaacggaacguuaguuaagaccaucacaaaugaucaaauugaggugacuaacgcgaccgaacugguacagucuucaaguacagguagaaucugcgacagcccacacaggauucuagauggcaaaaauuguacccucaucgacgcucugcuuggggauccgcauugcgacggauuccagaacaaggagugggaucuguuuguggaacgguccaaagccuauucuaauuguuaccccuaugacgucccugauuacgcaucguugcgcucacucguggccagcaguggcacucuggaguucauaaacgaagacuuuaauuggacagguguugcucaguccgggggaucuuaugcaugcaagcgaggcagcgugaacuccuucuuuucacgucugaauuggcuccacgagagugaguacaaguauccagccuuaaacgucaccaugcccaauaacggcaaauucgauaagcuguacaucuggggagugcaucacccuagcacggacagagaacaaacuaaucuuuacguaagggcuucugggcggguuaccguguccacaaaacgcucacagcagacugucauuccaaacaucgguagcagacccugggugaggggcuugaguucucggauuuccaucuauuggaccauagugaagccuggggauauucugcuaaucaacagcacaggaaaucucauugccccacgcggcuacuuuaaaauccgaaccgguaagucgucuaucaugagauccgacgcgccgauugggacguguucaagugagugcauaacucccaacggaagcaucccuaaugacaagccauuccagaacgucaauaggauuacauauggcgcauguccccgguacguuaaacaaaacacccugaaacuugccacuggcaugcguaaugugccugaaaagcagacacgcgggaucuuuggagcuauagccgguuucauugagaacggcugggaggggaugguagauggaugguauggcuuuagacaccaaaauuccgaagguaccgggcaggcagcugaccugaagucuacgcaggccgcgaucgaucagaucaacggcaaauugaauaggcucauugagaagaccaacgaaaaauuccaucagaucgagaaggaguucagcgaaguggagggacggauucaagaccuggaaaaguacgucgaggauacaaaaauagacuuauggucauauaaugccgaacugcucguggcacuugagaaccagcacacuaucgaucugaccgacagugaaaugaauaaguuguuugagaaaacacgacgccagcuaagagagaacgcugaagauaugggcaacgggugcuucaagauuuaccauaaaugugacaaugccugcaucggauccaucaggaacgguacuuacgaucacgacguuuaucgggacgaggcucugaauaaccgcuuucagauuaagggcguggaacucaagagcggguacaaagauuggauacuguggaucucuuucgccauuucaugcuuucuucugugugucguguugcucggauucaucaugugggcaugccaaaagggcaauauuagauguaacaucugcauauga

SEQ ID NO: 136630 - RNA, 1701 nt, Artificial Sequence
  derived and/or modified CDS sequence (opt3) from hemagglutinin__InfluenzaA__AFG99424
augaagaccaucauugcccugagcuacauauucugccucguguuugcucagaaacuucccggcaacgacaauuccacagcaacucuguguuuggggcaccaugccgucccuaacggaacguuaguuaagaccaucacaaaugaucaaauugaggugacuaacgcgaccgaacugguacagucuucaaguacagguagaaucugcgacagcccacacaggauucuagauggcaaaaauuguacccucaucgacgcucugcuuggggauccgcauugcgacggauuccagaacaaggagugggaucuguuuguggaacgguccaaagccuauucuaauuguuaccccuaugacgucccugauuacgcaucguugcgcucacucguggccagcaguggcacucuggaguucauaaacgaagacuuuaauuggacagguguugcucaguccgggggaucuuaugcaugcaagcgaggcagcgugaacuccuucuuuucacgucugaauuggcuccacaagagugaguacaaauauccagccuuaaacgucaccaugcccaauaacggcaaguucgauaaacuguacaucuggggagugcaucacccuagcacggacagagagcaaacuaaucuuuacguaagggcuucugggcggguuaccguguccacaaagcgcucacagcagacugucauuccaaacaucgguagcagacccugggugaggggcuugaguucucggauuuccaucuauuggaccauagugaaaccuggggauauucugcuaaucaacagcacaggaaaucucauugccccacgcggcuacuuuaagauccgaaccgguaagucgucuaucaugagauccgacgcgccgauugggacguguucaagugaaugcauaacucccaacggaagcaucccuaaugacaaaccauuccagaacgucaauaggauuacauauggcgcauguccccgguacguuaagcaaaacacccugaaacuugccacuggcaugcguaaugugccugagaagcagacacgcgggaucuuuggagcuauagccgguuucauugaaaacggcugggaggggaugguagauggaugguauggcuuuagacaccaaaauuccgaggguaccgggcaggcagcugaccugaaaucuacgcaggccgcgaucgaucagaucaacggcaaguugaauaggcucauugagaaaaccaacgaaaaguuccaucagaucgaaaaggaguucagcgaaguggagggacggauucaagaccuggagaaauacgucgaagauacaaagauagacuuauggucauauaaugccgagcugcucguggcacuugaaaaccagcacacuaucgaucugaccgacagugagaugaauaaauuguuugaaaagacacgacgccagcuaagagagaacgcugaggauaugggcaacgggugcuucaaaauuuaccauaagugugacaaugccugcaucggauccaucaggaacgguacuuacgaucacgacguuuaucgggacgaagcucugaauaaccgcuuucagauuaagggcguggagcucaaaagcggguacaaggauuggauacuguggaucucuuucgccauuucaugcuuucuucugugugucguguugcucggauucaucaugugggcaugccaaaaaggcaauauuagauguaacaucugcauauga

SEQ ID NO: 136631 - RNA, 1701 nt, Artificial Sequence
  derived and/or modified CDS sequence (opt3) from hemagglutinin__InfluenzaA__AFG99435
augaagaccaucauugcccugagcuacauauucugccucguguuugcucagaaacuucccggcaacgacaauuccacagcaacucuguguuuggggcaccaugccgucccuaacggaacguuaguuaagaccaucacaaaugaucaaauugaggugacuaacgcgaccgaacugguacagaauagcucaacagguagaaucugcgacaguccacacaggauucuagauggcaaaaacuguacccucaucgacgcucugcuuggggauccgcauugcgacggacugcagaauaaggagugggauuuguucguggaacggagcaaagccuauuccaacuguuaccccuaugacgucccugauuacgcaucucuccgcucgcugguggccucaagcggcacucuggaguuuacaaaggaagacuucaauuggaccgguguugcucagagugggggauccuaugcaugcaagcgaggcucugugaacagcuuuuucucccgucucaauugguuacacgagucagaguacaaauauccagcccugaacgucacgaugcccaauaacggcaaguuugauaaacuuuacauauggggagugcaucacccuaguacugacagagaacaaaccaauuuguacguaagggcuagcgggcggguuacagugucuacuaagcgcucccagcagaccgucaucccaaacauugguucaagacccugggugaggggccugagcagucggaucucuauuuauuggacaaucgugaaaccuggggauauacuacucauuaacuccaccggaaaucugaucgccccacgcggcuacuucaagauucgaacggguaagagcucgaucaugagaucugacgcgccgaucgggacuuguuccucagagugcauuacacccaacggaaguauaccuaaugacaaaccauuucagaacgucaauaggaucaccuauggcgcauguccccgguacguuaagcaaaacacucuuaaacuggccacaggcaugcguaaugugccugaaaagcagacccgcgggauuuucggagcuaucgccgguuuuauagagaacggcugggaggggaugguagauggaugguauggcuucagacaccagaauagcgaagguacggggcaggcagcugacuugaaauccacccaagccgcgauugaucagaucaacggcaagcucaauaggcugaucgagaaaacaaacgaaaaguuucaucagauugagaaggaguucucugaaguggagggacggauccaagacuuagaaaaauacgucgaggauacuaagauugaccuguggagcuauaaugccgaacuccuuguggcacuggagaaccagcacaccauagauuugacagacucagaaaugaauaaacuauucgagaagacucgaaaacagcugcgcgagaacgcugaagauaugggcaacgggugcuuuaagaucuaccauaagugugacaaugccugcauuggaaguaucagaaacgguaccuacgaucacgacguuuauagggacgaggcucucaauaaccgguuccagaucaaaggcguggaacugaaguccggguacaaagauuggauucuuuggauaucuuuugccaucucuugcuuccuguugugugucgugcuccugggauuuauuaugugggcaugccaaaagggcaauauccgcuguaacauuugcaucuga

SEQ ID NO: 136632 - RNA, 1701 nt, Artificial Sequence; identical to SEQ ID NO: 136631
  derived and/or modified CDS sequence (opt3) from hemagglutinin__InfluenzaA__AFG99446

SEQ ID NO: 136633 - RNA, 1701 nt, Artificial Sequence
  derived and/or modified CDS sequence (opt3) from hemagglutinin__InfluenzaA__AFG99457
augaagaccaucauugcccugagcuacauacucugccuuguguucgcucagaaacugcccggcaacgacaauuccacagcaacuuuguguuuagggcaccaugccgucccuaacggaacgcugguuaagaccaucacaaaugaucaaauugaggugacuaacgcgaccgaacugguacagucuucaaguacagguagaaucugcgacagcccacacaggauucucgauggcgagaauuguacccugaucgacgcccuucugggggauccgcauugcgacggauuucagaacaaagaaugggauuuguucguggagcgguccaaggcuuauucuaauuguuaccccuaugacgucccugauuacgcaucgcuccgcucacugguggccagcaguggcacucuggaauuuauaaacgaggacuucaauuggacagguguugcucaguccgggggaucuuaugcaugcaaacgaggcagcgugaacuccuuuuucucacgucucaauugguuacacaagagugaguacaaguauccagcccugaacgucaccaugcccaauaacggcaaauuugauaaacuuuacaucuggggagugcaucacccuagcacggacagagaucaaacuucuuuguacguaagggcuuccgggcggguuaccgugucaacaaaacgcagccagcagacugucauuccaaauaucgguaguagacccugggugaggggccagucuucccggauuagcaucuauuggaccauagugaagccuggggacauucugcuaaucaacucgacaggaaaccucauugccccacgcggcuacuucaaaauccgaaaugguaagucuuccaucaugagaucagacgcgccgauugggaccuguaguagcgaaugcauaacgcccaacggauccaucccuaaugauaagccauuucaaaacgucaauaggauuacuuauggcgcauguccccgguacguuaaacagaacacacugaaacuugccaccggcaugcguaaugugccugagaagcagacucgcgggaucuucggagcuauagccgguuuuauugaaaacggcugggaggggaugguagacggaugguauggcuucagacaccaaaauucugaggguacagggcaggcagcugaucuaaagagcacccaggccgcgaucgaccagaucaacggcaaauugaauaggcucauugaaaagacgaacgagaaauuucaucaaaucgaaaaggaguucucagaaguggagggacggauucaggaucuggagaaguacgucgaagacaccaaaauagauuuauggaguuauaaugccgagcugcucguggcacuugaaaaccagcacacaaucgaccugacugauuccgagaugaauaaguuguucgaaaagacccgaaagcagcuacgcgagaacgcugaggacaugggcaacgggugcuuuaaaauuuaccauaagugugauaaugccugcaucggaagcaucagaaacgguacauacgaccacgacguuuauagggaugaagcucugaauaaccgguuccaaauuaagggcguggagcucaaaucuggguacaaggacuggauacuguggaucucauuugccauuaguugcuuccuucugugugucguguugcucggauuuaucaugugggcaugccagaaaggcaauauucgcuguaacaucugcauauga

SEQ ID NO: 136634 - RNA, 1701 nt, Artificial Sequence
  derived and/or modified CDS sequence (opt3) from hemagglutinin__InfluenzaA__AFG99468
augaagaccaucauugcccugagcuacauauucugccucguguuugcucagaaacuucccggcaacgacaauuccacagcaacucuguguuuggggcaccaugccgucccuaacggaacguuaguuaagaccaucacaaaugaucaaauugaggugacuaacgcgaccgaacugguacagucuucaaguacagguagaaucugcgacagcccacacaggauucuagauggcaaaaauuguacccucaucgacgcucugcuuggggauccgcauugcgacggauuccagaacaaggagugggaucuguuuguggaacgguccaaagccuauucuaauuguuaccccuaugacgucccugauuacgcaucguugcgcucacucguggccagcaguggcacucuggaguucauaaacgaagacuuuaauuggacagguguugcucaguccgggggaucuuaugcaugcaagcgaggcagcgugaacuccuucuuuucacgucugaauuggcuccacgagagugaguacaaguauccagccuuaaacgucaccaugcccaauaacggcaaauucgauaagcuguacaucuggggagugcaucacccuagcacggacagagaacaaacuaaucuuuacguaagggcuucugggcggguuaccguguccacaaaacgcucacagcagacugucauuccaaacaucgguagcagacccugggugaggggcuugaguucucggauuuccaucuauuggaccauagugaagccuggggauauucugcuaaucaacagcacaggaaaucucauugccccacgcggcuacuuuaaaauccgaaccgguaagucgucuaucaugagauccgacgcgccgauugggacguguucaagugagugcauaacucccaacggaagcaucccuaaugacaagccauuccagaacgucaauaggauuacauauggcgcauguccccgguacguuaaacaaaacacccugaaacuugccacuggcaugcguaaugugccugaaaagcagacacgcgggaucuuuggagcuauagccgguuucauugagaacggcugggaggggaugguagauggaugguauggcuuuagacaccaaaauuccgaagguaccgggcaggcagcugaccugaagucuacgcaggccgcgaucgaucagaucaacggcaaauugaauaggcucauugagaagaccaacgaaaaauuccaucagaucgagaaggaguucagcgaaguggagggacggauucaagaccuggaaaaguacgucgaggauacaaaaauagacuuauggucauauaaugccgaacugcucguggcacuugagaaccagcacacuaucgaucugaccgacagugaaauggauaaguuguuugagaaaacacgaaagcagcuacgcgagaaugcugaagacaugggcaacgggugcuucaaaauuuaccauaagugugauaacgccugcaucggauccaucagaaaugguacuuacgaccacgacguuuauagggaugaggcucugaacaaucgguuucagauuaagggcguggaacucaaaagcggguacaaggacuggauacuguggaucucuuucgccauuucaugcuuucuucugugugucguguugcucggauucaucaugugggcaugccaaaaaggcaacauucgcuguaauaucugcauauga

SEQ ID NO: 136635 - RNA, 1701 nt, Artificial Sequence
  derived and/or modified CDS sequence (opt3) from hemagglutinin__InfluenzaA__AFG99490
augaagaccaucauugcccugagcuacauacucugccuuguguucgcucagaaacugcccggcaacgacaauuccacagcaacuuuguguuuagggcaccaugccgucccuaacggaacgcugguuaagaccaucacaaaugaucaaauugaggugacuaacgcgaccgaacuuguacagucuucaaguacagguagaaucugcgacagcccacacaggauucucgauggcaaaaauuguacccugaucgacgcucuacugggggauccgcauugcgacggauuucagaacaaggagugggauuuguucauagaacgguccaaagccuauucuaauuguuaccccuaugacgugccugauuacgcaucgcuccgcucacuggucgccagcaguggcacucuggaguuuaucaacgaagacuucaauuggacagguguggcucaguccggggagucuuaugcaugcaagcgaggaagcguuaaguccuuuuucucacgucucaacugguuacacgagagugaauacaaauauccagcccugaaugugaccaugcccaacaauggcaaguuugauaaacuuuacauuuggggcguccaucacccuagcacggacagagagcaaacuucuuuguacgugagggcuuccgggcggguaaccguuucaacaaagcgcagccagcagacugugaucccaaacauuggaaguagacccugggucaggggucugucuucccggaucagcauauauuggaccauugugaaaccuggcgauauccuacucauuaauucgacagggaaccugaucgccccacgcggauacuucaagauccgaaccggcaagucuuccauuaugagaucagacgcgccgauagguacguguaguagcgaaugcaucacucccaacggguccauuccuaaugacaaaccauuucagaacgugaauaggaucacauauggagcauguccccgguacgucaagcaaaacacccuuaaacuggccacuggcaugcguaauguuccugagaagcagacacgcggcauauucggggcuauugccggauuuaucgagaacgguugggaaggcaugguggaugggugguauggauucagacaccaaaauucugagggcaccggucaggcagcugacuugaaaagcacgcaggccgcgaucgaucagauuaacgggaagcucaauaggcugaucgagaaaaccaacgaaaaguuucaucagauugaaaaggaguucucagagguagaaggccggauacaagacuuagagaaauacguggaagauacaaagaucgaccuguggaguuauaaugccgagcuccuugucgcacuggaaaaccagcacacuauugauuugaccgacuccgagaugaauaaacuauucgagaagacacgaaaacagcugcgcgaaaacgcugaggauaugggaaauggcugcuuuaagaucuaccauaagugugacaacgccugcaucgggagcauuagaaacggaacuuacgaucacgacguguauagggacgaagcucucaauaaccgguuccagauaaaagguguugagcugaagucuggcuacaaagauuggauccuuuggauuucauuugccaucaguugcuuccuguugugugugguccuccugggguuuauuaugugggcaugccaaaagggaaauauccgcuguaacauaugcaucuga

SEQ ID NO: 136636 - RNA, 1701 nt, Artificial Sequence
  derived and/or modified CDS sequence (opt3) from hemagglutinin__InfluenzaA__AFG99501
augaagaccaucauugcccugagcuacauauucugccucguggucgcucagaaacuucccggcaacgacaauuccacagcaacucuguguuuggggcaccaugccguuccuaacggaacguuagugaagaccaucacaaaugaucaaauugagguaacuaacgcgaccgaacuggugcagucuucaaguacagguagaaucugcgacagcccacacaggauucuagauggcaaaaauuguacccucaucgacgcucugcuuggggauccgcauugcgacggauuucagaacaaggagugggaucuguucgucgaacgguccaaagccuauucuaauuguuaccccuaugacgugccugauuacgcaucguugcgcucacucguugccagcaguggcacucuggaguuuauaaacgaagacuucaauuggacagguguggcucaguccgggggaucuuauaccugcaagcgaggcagcgucaacuccuuuuucucacgucugaauuggcuccacgagagugaguacaaguauccagcauuaaacgugacgaugcccaauaacggcaaauuugauaagcuguacaucuggggaguacaucacccuagcacugacagagaacaaaccaaucuuuacguuagggccucugggcgggugacagucuccacuaaacgcucacagcagaccgugauuccaaacaucgguagcagacccugggugaggggcuugaguucucggauuuccaucuauuggacaauagucaagccuggggauauucugcuaaucaacagcaccggaaaucucauugcuccacgcggcuacuucaaaauccgaacggguaagucgucuaucaugagauccgacgccccgauugggacuuguucaagugagugcauaacacccaacggaagcaucuccaaugacaagccuuuucagaacguuaauaggauuaccuauggcgcguguccacgguacgugaaacaaaacacucugaagcuggcaacaggcaugcguaauguacccgaaaaacagacccgcgggaucuucggagccauagcugguuuuauugagaacggcugggaggggaugguggauggaugguauggcuucagacaccaaaauucugaagguacggggcaggccgcagaccuuaagagcacccaggcugccaucgaucagaucaacggcaaauugaauaggcucauugagaagacaaacgaaaaauuucaucagaucgagaaggaguucucagaagucgagggacggauucaagaccuggaaaaguacguggaggauacuaaaauagacuuauggaguuauaaugcggaacugcucguugcccuugagaaccagcacaccaucgaucugacagacuccgaaaugaauaaguuguucgagaaaacucgaaagcagcuacgcgagaacgcagaagauaugggcaacgggugcuuuaaaauuuaccauaagugugacaaugcuugcaucggaagcaucagaaacgguaccuacgaucacgacguguauagggacgaggcccugaauaaccgguuccagauuaagggcgucgaacucaaaucuggguacaaggauuggauacuguggaucucauuugcuauuaguugcuuccuucugugugugguauugcucggauuuaucaugugggccugccaaaaaggcaauauucgcuguaacaucugcauauga

SEQ ID NO: 136637 - RNA, 1701 nt, Artificial Sequence
  derived and/or modified CDS sequence (opt3) from hemagglutinin__InfluenzaA__AFG99512
augaagaccaucauugcccugagcuacauacucugccuuguguucgcucagaaacugcccggcaacgacaauuccacagcaacuuuguguuuagggcaccaugccgucccuaacggaacgcugguuaagaccaucacaaaugaucaaauugaggugacuaacgcgaccgaacuuguacagucuucaaguacagguagaaucugcgacagcccacacaggauucucgauggcaaaaauuguacccugaucgacgcucuacugggggauccgcauugcgacggauuucagaacaaggagugggauuuguucguggaacgguccaaagccuauucuaauuguuaccccuaugacgucccugauuacgcaucgcuccgcucacugguggccagcaguggcacucuggaguuuauaaacgaagacuucaauuggacagguguugcucaguccggggauucuuaugcaugcaagcgaggaagcgugaaguccuuuuucucacgucucaacugguuacacgagagugaguacaaauauccagcccugaaugucaccaugcccaacaaugacaaguuugauaaacuuuacaucuggggcgugcaucacccuagcacggacagagaacaaacuucuuuguacauuagggcuuccggccggguaaccguuucaacaaagcgcagccagcagacugugaucccaaacauugggaguagacccugggucaggggacugucuucccggaucagcauauauuggaccauugugaaaccuggugacauccuacucauuaauucgacaggcaaccugaucgccccacgcggguacuucaagauccgaaccggaaagucuuccauuaugagaucagaugcgccgauaggcacguguaguagcgagugcaucacucccaacgguuccauuccuaaugacaaaccauuucagaacgugaauaggaucacauauggggcauguccccgguacgucaagcaaaacacccuuaaacuggccacuggaaugcguaauguuccugaaaagcagacacgcggcauauucggcgcuauugccggguuuaucgagaacggaugggaggguaugguggauggcugguauggguucagacaccaaaauucugaaggaaccggccaggcagcugacuugaaaagcacgcaggccgcgaucgaucagauuaacgguaagcucaauaggcugaucgagaaaaccaacgaaaaguuucaucagauugagaaggaguucucagaaguagaggggcggauacaagacuuagaaaaauacguggaggauacaaagaucgaccuguggaguuauaaugccgaacuccuugucgcacuggagaaccagcacacuauugauuugaccgacuccgaaaugaauaaacuauucgagaagacacgaaaacagcugcgcgagaacgcugaagauaugggcaauggaugcuuuaagaucuaccauaagugugacaacgccugcaucggcagcauuagaaacgggacuuacgaccacgauguguauagggacgaggcucucaauaaccgguuccagauaaaaggaguugaacugaagucugguuacaaagauuggauccuuuggauuucauuugccaucaguugcuuccuguugugugugguccuccugggcuuuauuaugugggcaugccaaaaggggaauauccgcuguaacauaugcaucuga

SEQ ID NO: 136638 - RNA, 1701 nt, Artificial Sequence
  derived and/or modified CDS sequence (opt3) from hemagglutinin__InfluenzaA__AFG99523
augaagaccaucauugcccugagcuacauauucugccucguguuugcucagaaacuucccggcaacgacaauuccacagcaacucuguguuuggggcaccaugccgucccuaacggaacguuaguuaagaccaucacaaaugaucaaauugaggugacuaacgcgaccgaacugguacagucuucaaguacagguagaaucugcgacagcccacacaggauucuagauggcaaaaauuguacccucaucgacgcucugcuuggggauccgcauugcgacggauuccagaacaaggagugggaucuguuuguggaacgguccaaagccuauucuaauuguuaccccuaugacgucccugauuacgcaucguugcgcucacucguggccagcaguggcacucuggaguucauaaacgaagacuuuaauuggacagguguugcucaguccgggggaucuuaugcaugcaagcgaggcagcgugaacuccuucuuuucacgucugaauuggcuccacgagagucaauacaaguauccagccuuaaacgucaccaugcccaauaacggcaaauucgauaagcuguacaucuggggagugcaucacccuagcacggacagagagcagacuaaucuuuacguaagggcuucugggcggguuaccguguccacaaaacgcucacagcagacugucauuccaaacaucgguagcagacccugggugaggggcuugaguucucggauuuccaucuauuggaccauagugaagccuggggauauucugcuaaucaacagcacaggaaaucucauugccccacgcggcuacuuuaaaauccgaaccgguaagucgucuaucaugagauccgacgcgccgauugggacguguucaagugaaugcauaacucccaacggaagcaucccuaaugacaagccauuccaaaacgucaauaggauuacauauggcgcauguccccgguacguuaaacagaacacccugaaacuugccacuggcaugcguaaugugccugagaaacagacacgcgggaucuuuggagcuauagccgguuucauugaaaacggcugggaggggaugguagauggaugguauggcuuuagacaccaaaauuccgaggguaccgggcaggcagcugaccugaagucuacgcaggccgcgaucgaucagaucaacggcaaauugaauaggcucauugaaaagaccaacgagaaauuccaucaaaucgaaaaggaguucagcgaaguggagggacggauucaggaccuggagaaguacgucgaagauacaaaaauagacuuauggucauauaaugccgagcugcucguggcacuugaaaaccagcacacuaucgaucugaccgacagugagaugaauaaguuguuugaaaagacacgaaagcagcuacgcgagaacgcugaggauaugggcaacgggugcuucaaaauuuaccauaagugugacaaugccugcaucggauccaucagaaacgguacuuacgaucacgacguuuauagggacgaagcucugaauaaccgguuucaaauuaagggcguggagcucaaaagcggguacaaggauuggauacuguggaucucuuucgccauuucaugcuuucuucugugugucguguugcucggauucaucaugugggcaugccagaaaggcaauauucgcuguaacaucugcauauga

SEQ ID NO: 136639 - RNA, 1701 nt, Artificial Sequence; identical to SEQ ID NO: 136535
  derived and/or modified CDS sequence (opt3) from hemagglutinin__InfluenzaA__AFG99534

SEQ ID NO: 136640 - RNA, 1701 nt, Artificial Sequence; identical to SEQ ID NO: 136535
  derived and/or modified CDS sequence (opt3) from hemagglutinin__InfluenzaA__AFG99545

SEQ ID NO: 136641 - RNA, 1701 nt, Artificial Sequence
  derived and/or modified CDS sequence (opt3) from hemagglutinin__InfluenzaA__AFG99556
augaagaccaucauugcccugagcuacauacucugccuuguguucgcucagaaacugcccggcaacgacaauuccacagcaacuuuguguuuagggcaccaugccgucccuaacggaacgcugguuaagaccaucacaaaugaucaaauugaggugacuaacgcgaccgaacuuguacagucuucaaguacagguagaaucugcgacagcccacacaggauucucgauggcaaaaauuguacccugaucgacgcucuacugggggauccgcauugcgacggauuucagaacaaggagugggauuuguucguggaacgguccaaagccuauucuaauuguuaccccuaugacgucccugauuacgcaucgcuccgcucacugguggccagcaguggcacucuggaguuuacaaacgaagacuucaauuggaccgguguugcucaguccggggagucuuaugcaugcaagcgaggaagcgugaaguccuuuuucucacgucucaacugguuacacgagagugauuacaaauauccagcccugaaugucacgaugcccaacaauggcaaguuugacaaacuuuacauauggggcgugcaucacccuagcacugauagagaacaaaccucuuuguacguaagggcuuccgggcggguuacagugucaacuaagcgcagccagcagaccgucaucccaaacauuggaaguagacccugggugaggggucugucuucccggaucagcauuuauuggacaaucgugaaaccuggcgacauacuacucauuaauucgaccgggaaccugaucgccccacgcggauacuucaagauucgaacgggcaagucuuccaucaugagaucagacgcgccgaucgguacuuguaguagcgagugcauuacacccaacggguccauaccuaaugauaaaccauuucagaacgucaauaggaucaccuauggagcauguccccgguacguuaagcaaaacacucuuaaacuggccacaggcaugcguaaugugccugaaaagcagacccgcggcauuuucggggcuaucgccggauuuauagagaacgguugggagggcaugguagacgggugguauggauucagacaccaaaauucugaaggcacgggucaggcagcugauaggaaaagcacccaggccgcgauugaccagaucaacgggaaguugaaucggcucaucgagaaaacaaacgaaaaguuucaucagauugagaaggaguucucagaaguggagggccgaauccaagaucuggaaaaauacgucgaggacacuaagauugauuuauggaguuauaaugccgaacugcucguggcacuugagaaccagcacaccauagaccugacagauuccgaaaugaauaaauuguucgagaagacucgcaaacagcuaagagagaacgcugaagacaugggaaauggcugcuuuaagaucuaccauaagugugauaacgccugcauugggagcaucaggaacggaaccuacgaccacgacguuuaucgggaugaggcucugaauaaccgcuuccagaucaaagguguggaacucaagucuggcuacaaagacuggauucuguggauaucauuugccaucaguugcuuccuucugugugucguguugcucggguuuauuaugugggcaugccaaaagggaaauaucagauguaacauuugcaucuga

SEQ ID NO: 136642 - RNA, 1701 nt, Artificial Sequence; identical to SEQ ID NO: 136535
  derived and/or modified CDS sequence (opt3) from hemagglutinin__InfluenzaA__AFG99567

SEQ ID NO: 136643 - RNA, 1701 nt, Artificial Sequence; identical to SEQ ID NO: 136535
  derived and/or modified CDS sequence (opt3) from hemagglutinin__InfluenzaA__AFG99578

SEQ ID NO: 136644 - RNA, 1701 nt, Artificial Sequence; identical to SEQ ID NO: 136535
  derived and/or modified CDS sequence (opt3) from hemagglutinin__InfluenzaA__AFG99589

SEQ ID NO: 136645 - RNA, 1701 nt, Artificial Sequence
  derived and/or modified CDS sequence (opt3) from hemagglutinin__InfluenzaA__AFG99600
augaagaccaucauugcccugagcuacauacucugccuuguguucgcucagaaacugcccggcaacgacaauuccacagcaacuuuguguuuagggcaccaugccgucccuaacggaacgcugguuaagaccaucacaaaugaucaaauugaggugacuaacgcgaccgaacuuguacagucuucaaguacagguagaaucugcgacagcccacacagggugcucgauggcaaaaauuguacccugauugacgcucuacugggggauccgcauugcgacggauuucagaacaaggagugggauuuguucgucgaacgguccaaagccuauucuaauuguuaccccuaugacgugccugauuacgcaucgcuccgcucacugguugccagcaguggcacucuggaguuuacaaacgaagacuucaauuggaccgguguggcucaguccggggagucuuaugcaugcaagcgaggaagcgucaaguccuuuuucucacgucucaacugguuacacgagagugauuacaaauauccagcccugaaugugacgaugcccaacaauggcaaguuugacaaacuuuacaucuggggcguacaucacccuagcacugauagagaacaaaccucuuuguacguuagggcuuccgggcgggugacagucucaacuaagcgcagccagcagaccgugauaccaaacaucggaaguagacccugggugaggggucugucuucccggauuagcaucuauuggacaauugucaaaccuggcgacauccuacucauaaauucgaccgggaaccugauugccccacgcggauacuucaagauccgaauuggcaagucuuccaucaugagaucagacgcgccgaucgguacguguaguagcgagugcauuacucccaacggguccauaccuaaugauaaaccauuucagaacguuaauaggaucacauauggagcauguccccgguacgugaagcaaaacacccuuaaacuggccacuggcaugcguaauguaccugaaaagcagacacgcggcauuuucggggcuaucgccggauuuauagagaacgguugggagggcaugguggacgggugguauggauucagacaccaaaauucugaaggcaccggucaggcagcugauuugaaaagcacgcaggccgcgauugaccagaucaacgggaagcucaauaggcugaucgagaaaaccaacgaaaaguuucaucagauugagaaggaguucucagaagucgagggccggauccaagauuuagaaaaauacguggaggacacaaagauugaucuguggaguuauaaugccgaacuccuuguugcacuggagaaccagcacacuauagacuugaccgauuccgaaaugaauaaacuauucgagaagacacgaaaacagcugcgcgagaacgcugaagacaugggaaauggcugcuuuaagaucuaccauaagugugauaacgccugcauugggagcaucagaaacggaacuuacgaccacgacguguauagggaugaggcucucaauaaccgguuccagaucaaaggugucgaacugaagucuggcuacaaagacuggauucuuuggauaucauuugccaucaguugcuuccuguugugugugguacuccugggguuuauuaugugggcaugccaaaagggaaauauccgcuguaacauuugcaucuga

SEQ ID NO: 136646 - RNA, 1701 nt, Artificial Sequence; identical to SEQ ID NO: 136535
  derived and/or modified CDS sequence (opt3) from hemagglutinin__InfluenzaA__AFG99611

SEQ ID NO: 136647 - RNA, 1701 nt, Artificial Sequence; identical to SEQ ID NO: 136535
  derived and/or modified CDS sequence (opt3) from hemagglutinin__InfluenzaA__AFG99622

SEQ ID NO: 136648 - RNA, 1701 nt, Artificial Sequence; identical to SEQ ID NO: 136535
  derived and/or modified CDS sequence (opt3) from hemagglutinin__InfluenzaA__AFG99633

SEQ ID NO: 136649 - RNA, 1701 nt, Artificial Sequence
  derived and/or modified CDS sequence (opt3) from hemagglutinin__InfluenzaA__AFG99644
augaagaccaucauugcccugagcuacauacucugccuuguguucgcucagaaacugcccggcaacgacaauuccacagcaacuuuguguuuagggcaccaugccgucccuaacggaacgcugguuaagaccaucacaaaugaucaaauugaggugacuaacgcgaccgaacuuguacagaauaguucaacagguagaaucugcgacaguccacacaggauucucgauggcaaaaacuguacccugaucgacgcucuacugggggauccgcauugcgacgauuuucagaauaaggagugggacuuguucguggaacggagcaaagccuauuccaacuguuaccccuaugaugucccugacuacgcaucucuccgcucgcugguggccgcuucaggaacucuggaguuuauaaaugaagauuucaacuggacaggcguugcacagagcggugagaguuaugccugcaagcgaggguccgugaagucuuucuuuagccgucucaauugguuacacgaguccgaauacaaauauccagcucugaacgucaccaugcccaauaacggaaaguuugacaaacuuuacaucuggggcgugcaucacccuucaacggauagagagcaaacuucuuuguacguaagggccagcggccggguuaccgugucuacaaagcgcucccagcagacugucauuccaaauaucgggucaagacccugggugaggggacugagcagucggauuucuaucuauuggaccauagugaaaccuggugacauucuacucaucaacuccacaggcaaccugauugcgccacgcggguacuucaagauccgaaccggaaagagcucgaucaugagaucugacgcaccgauuggcacguguuccucagaaugcauaacucccaaugguaguaucccuaacgauaaaccauuucagaaugucaacaggauuacauauggggccuguccccgguacguuaagcaaaauacccuuaaacuggcuacuggaaugcguaacgugccugagaagcagacacgcggcaucuucggcgccauagcaggguuuauugagaauggaugggaagguaugguagacggcugguauggguucagacaccagaacagcgagggaaccggccaggcugccgauuugaaauccacgcaagcggccaucgaccagaucaaugguaagcucaacaggcugauugagaaaaccaaugaaaaguuucaucagaucgaaaaggaguucucugagauugaagggcggauacaaaacuuagagaaauacguggaagauacaaagaucgaccuguggagcuauaaugcagagcuccuugucgcucuggaaaaccagcacacuauugauuugaccgacucagagaugaauaaacuauucgagaagacacgaaaacagcugcgcgaaaacgccgaggauaugggcaacggaugcuuuaagaucuaccauaagugugacaaugcuugcaucggcaguauuagaaacgggacuuacgaucacgacguguauagggacgaagcccucaauaaccgguuccagauaaaaggaguugagcugaaguccgguuacaaagauuggauccuuuggauuagcuuugcaaucucuugcuuccuguugugugugguccuccugggcuuuauuaugugggccugccaaaaggggaauauccgcuguaacauaugcaucuga

SEQ ID NO: 136650 - RNA, 1701 nt, Artificial Sequence
  derived and/or modified CDS sequence (opt3) from hemagglutinin__InfluenzaA__AFG99655
augaagaccaucauugcccugagcuacauacucugccuuguguucgcucagaaacugcccggcaacgacaauuccacagcaacuuuguguuuagggcaccaugccgucccuaacggaacgcugguuaagaccaucacaaaugaucaaauugaggugacuaacgcgaccgaacuuguacaaaauucuucaacagguagaaucugcgacaguccacacaggauucucgauggcaaaaacuguacccugaucgacgcucuacugggggauccgcauugcgacgauuuucagaauaaggagugggacuuguucguggaacggagcaaagccuauuccaacuguuaccccuaugaugucccugacuacgcaucucuccgcucgcugguggccucaagcggaacucuggaguuuauaaaugaagauuucaacuggacaggcguugcucagaguggugaguccuaugcaugcaagcgagggucugucaagagcuuuuucucccgucucaauugguuacacgagucagaauacaaauauccagcccugaacgugaccaugcccaauaacggaaaguuugacaaacuuuacaucuggggcgugcaucacccuaguacggauagagagcagacuagcuuguacguaagggcuucuggccggguuaccguguccacaaagcgcucacagcagacugucauuccaaauaucgggagcagacccugggugaggggacugaguucucggauuuccaucuauuggaccauagugaaaccuggugacauucuacucaucaacagcacaggcaaccugauugccccacgcggguacuucaagauccgaaccggaaagucgucuaucaugagauccgacgcgccgauuggcacguguucaagugaaugcauaacucccaaugguagcaucccuaacgauaaaccauuucagaaugucaacaggauuacauauggggcauguccccgguacguuaagcaaaauacccuuaaacuggccacuggaaugcguaacgugccugagaagcagacacgcggcaucuucggcgcuauagccggguuuauugagaauggaugggaagguaugguagacggcugguauggguucagacaccagaacuccgagggaaccggccaggcagcugauuugaaaucuacgcaagccgcgaucgaccagaucaaugguaagcucaacaggcugauugaaaagaccaaugagaaguuucaucagaucgaaaaggaguucagcgagauugaagggcggauacaagauuuagagaaauacguggaagacacaaagaucgaucuguggucauauaacgccgagcuccuugucgcacuggaaaaucagcacacuauugacuugaccgauagugagaugaacaaacuauucgagaagacacgaaaacagcugcgcgaaaaugcugaggacaugggcaacggaugcuuuaagaucuaccauaagugugauaacgccugcaucggcuccauuagaaaugggacuuacgaccacgacguguauagggaugaagcucucaacaaucgguuccagauaaaaggaguugagcugaaaagcgguuacaaagacuggauccuuuggauuucuuuugccaucucaugcuuccuguugugugugguccuccugggcuuuauuaugugggcaugccaaaaggggaacauccgcuguaauauaugcaucuga

SEQ ID NO: 136651 - RNA, 1701 nt, Artificial Sequence; identical to SEQ ID NO: 136650
  derived and/or modified CDS sequence (opt3) from hemagglutinin__InfluenzaA__AFG99666

SEQ ID NO: 136652 - RNA, 1701 nt, Artificial Sequence; identical to SEQ ID NO: 130386
  derived and/or modified CDS sequence (opt3) from hemagglutinin__InfluenzaA__AFG99677

SEQ ID NO: 136653 - RNA, 1701 nt, Artificial Sequence; identical to SEQ ID NO: 136535
  derived and/or modified CDS sequence (opt3) from hemagglutinin__InfluenzaA__AFG99688

SEQ ID NO: 136654 - RNA, 1701 nt, Artificial Sequence
  derived and/or modified CDS sequence (opt3) from hemagglutinin__InfluenzaA__AFG99701
augaagaccaucauugcccugagcuacauacucugccuuguguucgcucagaaacugcccggcaacgacaauuccacagcaacuuuguguuuagggcaccaugccgucccuaacggaacgcugguuaagaccaucacaaaugaucaaauugaggugacuaacgcgaccgaacuuguacagucuucaaguacagguagaaucugcgacagcccacacaggauucucgauggcaaaaauuguacccugaucgacgcucuacugggggauccgcauugcgacggauuucagaacaaggagugggauuuguucguggaacgguccaaugccuauucuaacuguuaccccuaugacgucccugauuacgcaucgcuccgcucacugguggccagcaguggcacucuggaguuuacaaaugaagacuucaacuggaccgguguugcucaguccggggagucuuaugcaugcaaacgaggaagcgugaaguccuuuuucucacgucucaauugguuacacgagagugauuacaaguauccagcccugaacgucacgaugcccaauaacggcaaauuugacaaguuguacauauggggcgugcaucacccuagcacugauagagaacaaaccucuuuguacguaagggcuuccgggcggguuacagugucaacuaaacgcagccagcagaccgucaucccaaauauuggaaguagacccugggugaggggucugucuucccggaucagcauuuauuggacaaucgugaagccuggcgacauacuacucauuaacucgaccgggaaccugaucgccccacgcggauacuucaaaauucgaacgggcaagucuuccaucaugagaucagacgcgccgaucgguacuuguaguagcgagugcauuacacccaauggguccauaccuaacgauaagccauuucagaaugucaacaggaucaccuauggagcauguccccgguacguuaaacaaaauacucuuaagcuggccacaggcaugcguaacgugccugaaaaacagacccgcggcauuuucggggcuaucgccggauuuauagagaaugguugggagggcaugguagacgggugguauggauucagacaccagaacucugaaggcacgggucaggcagcugaucuuaagagcacccaagccgcgauugaccagaucaaugggaaacucaacaggcugaucgagaagacaaaugaaaaauuucaucagauugagaaggaguucucagaaguggagggccggauccaagauuuagaaaaguacgucgaggacacuaaaauugaucuguggaguuauaacgccgaacuccuuguggcacuggagaaucagcacaccauagacuugacagauuccgaaaugaacaagcuauucgagaaaacucgaaagcagcugcgcgagaaugcugaagacaugggaaacggcugcuuuaaaaucuaccauaagugugauaacgccugcauugggagcaucagaaauggaaccuacgaccacgacguuuauagggaugaggcucucaacaaucgguuccagaucaagggugccgaacugaaaucuggcuacaaggacuggauucuuuggauaucauuugcaaucaguugcuuccuguugugugugguccuccugggguuuauuaugugggccugccaaaaaggaaacauccgcuguaauauuugcaucuga

SEQ ID NO: 136655 - RNA, 1701 nt, Artificial Sequence
  derived and/or modified CDS sequence (opt3) from hemagglutinin__InfluenzaA__AFG99712
augaagaccaucauugcccugagcuacauacucugccuuguguucgcucagaaacugcccggcaacgacaauuccacagcaacuuuguguuuagggcaccaugccgucccuaacggaacgcugguuaagaccaucacaaaugaucaaauugaggugacuaacgcgaccgaacuuguacagucuucaaguacagguagaaucugcgacagcccacacaggauucucgauggcaaaaauuguacccugaucgacgcucuacugggggauccgcauugcgacggauuucagaacaaggagugggauuuguucguggaacgguccaaagccuauucuaauuguuaccccuaugaggucccugacuacgcaucgcuccgcucacugguggccagcaguggcacucuggaauuuacaaacgaggauuucaauuggaccgguguugcucaguccggggagucuuaugcaugcaagcgaggaagcgugaaguccuuuuucucacgucucaacugguuacacgaaagugacuacaaauauccagcccugaaugucacgaugcccaacaauggcaaguuugauaaacuuuacauauggggcgugcaucacccuagcacugacagagagcaaaccucuuuguacguaagggcuuccgggcggguuacagugucaacuaagcgcagccagcagaccgucaucccaaacauuggaaguagacccugggugaggggucugucuucccggaucagcauuuauuggacaaucgugaaaccuggcgauauacuacucauuaauucgaccgggaaccugaucgccccacgcggauacuucaagauucgaacgggcaagucuuccaucaugagaucagacgcgccgaucgguacuuguaguagcgaaugcauuacacccaacggguccauaccuaaugacaaaccauuucagaacgucaauaggaucaccuauggagcauguccccgguacguuaagcaaaacacucuuaaacuggccacaggcaugcguaaugugccugagaagcagacccgcggcauuuucggggcuaucgccggauuuauagagaacgguugggaaggcaugguagaugggugguauggauucagacaccaaaauucugagggcacgggucaggcagcugacuugaaaagcacccaggccgcgauugaucagaucaacgggaagcucaauaggcugaucgagaaaacaaacgaaaaguuucaucagauugaaaaggaguucucagagguggaaggccggauccaagacuuagagaaauacgucgaagauacuaagauugaccuguggaguuauaaugccgagcuccuuguggcacuggaaaaccagcacaccauagauuugacagacuccgagaugaauaaacuauucgagaagacucgaaaacagcugcgcgaaaacgcugaggauaugggaaauggcugcuuuaagaucuaccauaagugugacaacgccugcauugggagcaucagaaacggaaccuacgaucacgacguuuauagggacgaagcucucaauaaccgguuccagaucaaagguguggagcugaagucuggcuacaaagauuggauucuuuggauaucauuugccaucaguugcuuccuguugugugucgugcuccugggguuuauuaugugggcaugccaaaagggaaauauccgcuguaacauuugcaucuga

SEQ ID NO: 136656 - RNA, 1701 nt, Artificial Sequence; identical to SEQ ID NO: 136535
  derived and/or modified CDS sequence (opt3) from hemagglutinin__InfluenzaA__AFG99723

SEQ ID NO: 136657 - RNA, 1701 nt, Artificial Sequence; identical to SEQ ID NO: 136650
  derived and/or modified CDS sequence (opt3) from hemagglutinin__InfluenzaA__AFG99734

SEQ ID NO: 136658 - RNA, 1701 nt, Artificial Sequence
  derived and/or modified CDS sequence (opt3) from hemagglutinin__InfluenzaA__AFG99745
augaagaccaucauugcccugagcuacauacucugccuuguguucgcucagaaacugcccggcaacgacaauuccacagcaacuuuguguuuagggcaccaugccgucccuaacggaacgcugguuaagaccaucacaaaugaucaaauugaggugacuaacgcgaccgaacuuguacagucuucaaguacagguagaaucugcgacagcccacacaggauucucgauggcaaaaauuguacccugaucgacgcucuacugggggauccgcauugcgacggauuucagaacaaggagugggauuuguucguggaacgguccaaagccuauucuaauuguuaccccuaugacgucccugauuacgcaucgcuccgcucacugguggccagcaguggcacucuggaguuuauaaacgaagacuucaauuggacagguguugcucaguccggggauucuuaugcaugcaagcgaggaagcgugaaguccuuuuucucacgucucaacugguuacacgagagugaguacaaauauccagcccugaaugucaccaugcccaacaaugacaaguuugauaaacuuuacaucuggggcgugcaucacccuagcacggaaagagagcaaacuucuuuguacauuagggcuuccggccggguaaccguuucaacaaagcgcagccagcagacugugaucccaaacauugggaguaaacccugggucagaggacugucuuccaggaucagcauauauuggaccauugugaagccuggugacauccuacucauuaauucgacaggcaaccugaucgccccacggggguacuucaagauccgcaccggaaaaucuuccauuaugcgaucagacgcgccgauaggcacguguaguagcgaaugcaucacucccaacgguuccauuccuaaugauaagccauuucagaacgugaauagaaucacauauggggcaugucccagguacgucaaacaaaacacccuuaagcuggccacuggaaugcggaauguuccugagaaacagacacguggcauauucggcgcuauugccggguuuaucgagaacggaugggaagguaugguggacggcugguauggguuccgccaccagaauagcgagggaaccggccaggcagcugauuugaagucuacgcaagccgcgaucgaccagauuaacgguaaacucaauagacugaucgaaaagaccaacgagaaguuucaucagauugaaaaagaguucucagagguagaagggaggauacaagauuuagagaaguacguggaagacacaaaaaucgaucuguggaguuauaaugccgagcuccuugucgcacuggaaaaccagcacacuauugacuugaccgauuccgagaugaauaagcuauucgagaaaacacggaagcagcugcgagaaaacgcugaggacaugggcaauggaugcuuuaagaucuaccauaaaugugauaacgccugcaugggcagcauccgcaacgggacuuacgaccacgacguguauagagaugaagcucucaauaacagguuccagauuaagggaguugagcugaaaucugguuacaaggacuggauacuuuggaucucauuugccauuaguugcuuccuguugugugugguccuccugggcuuuaucaugugggcaugccaaaaagggaauauucgguguaacaucugcauauga

SEQ ID NO: 136659 - RNA, 1701 nt, Artificial Sequence; identical to SEQ ID NO: 136535
  derived and/or modified CDS sequence (opt3) from hemagglutinin__InfluenzaA__AFG99756

SEQ ID NO: 136660 - RNA, 1701 nt, Artificial Sequence
  derived and/or modified CDS sequence (opt3) from hemagglutinin__InfluenzaA__AFG99767
augaagaccaucauugcccugagcuacauacucugccuuguguucgcucagaaacugcccggcaacgacaauuccacagcaacuuuguguuuagggcaccaugccgucccuaacggaacgcugguuaagaccaucacaaaugaucaaauugaggugacuaacgcgaccgaacuuguacagucuucaaguacagguagaaucugcgacagcccacacaggauucucgauggcaaaaauuguacccugaucgacgcucuacugggggauccgcauugcgacgauuuucagaacaaggagugggacuuguucguggaacgguccaaagccuauucuaauuguuaccccuaugaugucccugacuacgcaucgcuccgcucacugguggccagcaguggaacucuggaguuuauaaacgaagauuucaauuggacaggcguugcucaguccggugagucuuaugcaugcaagcgagggagcgugaaguccuuuuucucacgucucaacugguuacacgagagugaauacaaauauccagcccugaaugucaccaugcccaacaaugacaaguuugauaaacuuuacaucuggggagugcaucacccuagcacggacagagagcaaacuucuuuguacauuagggcuuccggccggguaaccguuucaacaaagcgcagccagcagacugugaucccaaacauuggcaguagacccugggucagggggcugucuucccggaucagcauauauuggaccauugugaaaccuggagacauccuacucauuaauucgacagguaaccugaucgccccacgcggcuacuucaagauccgaaccgggaagucuuccauuaugagaucagaugcgccgauaggaacguguaguagcgaaugcaucacucccaacggcuccauuccuaaugacaaaccauuucagaacgugaauaggaucacauauggugcauguccccgguacgucaagcaaaacacccuuaaacuggccacugggaugcguaauguuccugagaagcagacacgcggaauauucggcgcuauugccggcuuuaucgagaacgggugggaaggaaugguggaugguugguauggcuucagacaccaaaauucugaggggaccggacaggcagcugacuugaaaagcacgcaggccgcgaucgaucagauuaacggcaagcucaauaggcugaucgagaaaaccaacgaaaaguuucaucagauugaaaaggaguucucagagguagaaggucggauacaagacuuagagaaauacguggaagauacaaagaucgaccuguggaguuauaaugccgagcuccuugucgcacuggaaaaccagcacacuauugauuugaccgacuccgagaugaauaaacuauucgagaagacacgaaaacagcugcgcgaaaacgcugaggauauggggaauggcugcuuuaagaucuaccauaagugugacaacgccugcaucggaagcauuagaaacggcacuuacgaccacgauguguauagggacgaagcucucaauaaccgguuccagauaaaagggguugagcugaagucuggauacaaagauuggauccuuuggauuucauuugccaucaguugcuuccuguugugugugguccuccuggguuuuauuaugugggcaugccaaaagggcaauauccgcuguaacauaugcaucuga

SEQ ID NO: 136661 - RNA, 1701 nt, Artificial Sequence
  derived and/or modified CDS sequence (opt3) from hemagglutinin__InfluenzaA__AFG99778
augaagaccaucauugcccugagcuacauacucugccuuguguucgcucagaaacugcccggcaacgacaauuccacagcaacuuuguguuuagggcaccaugccgucccuaacggaacgcugguuaagacccuaacaaaugaucaaaucgaggugacuaacgcgaccgaacucguacagucuucaaguacagguaaaauuugcgacagcccacacagaauccuggauggcaagaauuguacccuuauugacgcucuguugggggauccgcauugcgacggacuccagaacaaagagugggaucuguuuguggaaagguccaaggccuauucuaauuguuaccccuaugacgucccugauuacgcaucgcugcggucacucguggccagcaguggcacuuuagaguucaucaacgaagacuuuaauuggacagguguugcucaggaugggggauccuaugcaugcaagcgcggcucugugaacagcuucuuuucccgacugaauuggcuucacaaaucagaguacaaguauccagccuugaacgucaccaugcccaauaacggcaaaguggacaagcuguacauauggggaguacaucacccuaguacggaucgugaccaaacuagccuauacguuagagcuucugggagggugaccgucuccacaaaacggucacagcagacugugaucccaaauauugguagccgccccugggugagaggccagaguucuaggaucuccauuuauuggaccaucgucaagccuggggacauacuccugauuaacagcacaggaaaccuuaucgccccacggggcuacuucaagauucgcaaugguaaaucgucuaucaugcgauccgaugcgccgaucgggaccuguucaagugagugcauuacgcccaacggaagcauaccuaaugacaagccauuucaaaacguuaauagaaucacuuauggcgcaugucccagguacgugaaacagaacacacugaaguuggccaccggcaugcggaauguaccugaaaaacagacucgugggauuuucggagcuaucgccgguuuuauagagaacggcugggaagggaugguggauggaugguauggcuuccgccaccaaaauuccgaggguacagggcaggcagcugaccucaagucuacccaggccgcgauugaucagaucaacggcaaacugaauagauuaaucgagaagacgaacgaaaaguuucaucaaauugagaaagaguucagcgaagucgaaggaaggauccaggaccuggagaaguacguggaggauaccaaaauugaccucuggucauauaaugccgaacuucugguugcauuggagaaccagcacacaauagaucuaacugacagugaaaugaauaagcuguuugagaaaacccggaagcagcuccgagaaaacgcugaggauaugggcaacgggugcuucaagaucuaccauaaaugugacaaugccugcauuggauccauccgcaacgguacauacgaccacgauguguauagagacgaggcucugaauaacagguuccaaaucaagggcgucgaacuuaaaagcggguacaaggauuggauucuguggauaucuuuugccaucucaugcuucuugcucugugugguacuguuaggauuuauuaugugggcaugccagaaaggcaauauccgguguaacauuugcaucuga

SEQ ID NO: 136662 - RNA, 1701 nt, Artificial Sequence; identical to SEQ ID NO: 136535
  derived and/or modified CDS sequence (opt3) from hemagglutinin__InfluenzaA__AFG99789

SEQ ID NO: 136663 - RNA, 1701 nt, Artificial Sequence; identical to SEQ ID NO: 136650
  derived and/or modified CDS sequence (opt3) from hemagglutinin__InfluenzaA__AFG99800

SEQ ID NO: 136664 - RNA, 1701 nt, Artificial Sequence
  derived and/or modified CDS sequence (opt3) from hemagglutinin__InfluenzaA__AFG99811
augaagaccaucauugcccugagcuacauacucugccuuguguucucccagaaacugcccggcaacgacaauucuacagcuacuuuguguuuagggcaccaugcagucccuaacggaacgcugguuaagaccaucacaaaugaucaaauugaggugacuaacgccaccgagcuaguacaaaauucaaguacagguagaaucugcgacagcccacacaggauucucgauggcaaaaacuguacccugaucgacgcgcuucugggggauccgcauugcgacgauuuucagaauaaggaaugggacuuguucguggaacgguccaaggcuuauucuaacuguuaccccuaugaugucccugacuacgccucgcuccgcucacugguggcaagcaguggaacucuggaguuuauaaaugaagauuucaacuggacaggcguugcccaguccggugagucuuaugcuugcaaacgagggagcgugaaguccuuuuucucacgucucaauugguuacacgagagugaauacaaauauccagcacugaacgucaccaugcccaauaacggaaaguuugacaaacuuuacaucuggggcgugcaucacccuagcacggauagagagcagacuucuuuguacguaagggccuccggccggguuaccgugucaacaaagcgcagccagcagacugucauuccaaauaucgggaguagacccugggugaggggacugucuucccggauuagcaucuauuggaccauagugaaaccuggugacauucuacucaucaacucgacaggcaaccugauugcuccacgcggguacuucaagauccgaaccggaaagucuuccaucaugagaucagacgccccgauuggcacguguaguagcgaaugcauaacucccaaugguuccaucccuaacgauaaaccauuucagaaugucaacaggauuacauauggggcguguccccgguacguuaagcaaaauacccuuaaacuggcaacuggaaugcguaacgugccugagaagcagacacgcggcaucuucggcgccauagcuggguuuauugagaauggaugggaagguaugguagacggcugguauggguucagacaccagaacucugagggaaccggccaggccgcagauuugaaaagcacgcaagcugccaucgaccagaucaaugguaagcucaacaggcugauugagaaaaccaaugaaaaguuucaucagaucgaaaaggaguucucagagauugaagggcggauacaagauuuagagaaauacguggaagacacaaagaucgaucuguggaguuauaacgcggagcuccuugucgcccuggaaaaucagcacacuauugacuugaccgauuccgagaugaacaaacuauucgagaagacacgaaaacagcugcgcgaaaaugcagaggacaugggcaacggaugcuuuaagaucuaccauaagugugauaacgcuugcaucggcagcauuagaaaugggacuuacgaccacgacguguauagggaugaagcccucaacaaucgguuccagauaaaaggaguugagcugaagucugguuacaaagacuggauccuuuggauuucauuugcuaucaguugcuuccuguugugugugguccuccugggcuuuauuaugugggccugccaaaaggggaacauccgcuguaauauaugcaucuga

SEQ ID NO: 136665 - RNA, 1701 nt, Artificial Sequence; identical to SEQ ID NO: 136535
  derived and/or modified CDS sequence (opt3) from hemagglutinin__InfluenzaA__AFG99822

SEQ ID NO: 136666 - RNA, 1701 nt, Artificial Sequence; identical to SEQ ID NO: 136535
  derived and/or modified CDS sequence (opt3) from hemagglutinin__InfluenzaA__AFG99833

SEQ ID NO: 136667 - RNA, 1701 nt, Artificial Sequence; identical to SEQ ID NO: 136535
  derived and/or modified CDS sequence (opt3) from hemagglutinin__InfluenzaA__AFG99844

SEQ ID NO: 136668 - RNA, 1701 nt, Artificial Sequence
  derived and/or modified CDS sequence (opt3) from hemagglutinin__InfluenzaA__AFG99855
augaagaccaucauugcccugagcuacauacucugccuuguguucgcucagaaacugcccggcaacgacaauuccacagcaacuuuguguuuagggcaccaugccgucccuaacggaacgcugguuaagaccaucacaaaugaucaaauugaggugacuaacgcgaccgaacuuguacagucuucaaguacagguagaaucugcgacagcccacacaggauucucgauggcaaaaauuguacccugaucgacgcucuacugggggauccgcauugcgacggauuucagaacaaggagugggauuuguucguggaacgguccaaagccuauucuaauuguuaccccuaugacgucccugauuacgcaucgcuccgcucacugguggccagcaguggcacucuggaguuuacaaacgaagacuucaauuggaccgguguugcucaguccggggagucuuaugcaugcaagcgaggaagcgugaaguccuuuuucucacgucucaacugguuacacgagagugauuacaaauauccagcccugaaugucacgaugcccaacaauggcaaguuugacaaacuuuacauauggggcgugcaucacccuagcacugauagagaacaaaccucuuuguacguaagggcuuccgggcggguuacagugucaacuaagcgcagccagcagaccgucaucccaaacauuggaaguagacccugggugaggggucugucuucccggaucagcauuuauuggacaaucgugaaaccuggcgacauacuacucauuaauucgaccgggaaccugaucgccccacgcggauacuucaagauucgaacgggcaagucuuccaucaugagaucagacgcgccgaucgguacuuguaguagcgagugcauuacacccaacggguccauaccuaaugauaaaccauuucagaacgucaauaggaucaccuauggagcauguccccgguacguuaagcaaaacacucuuaaacuggccacaggcaugcguaaugugccuggcaagcagacccgcgggauuuucggagcuaucgccgguuuuauagaaaacggcugggaggggaugguagacggaugguauggcuucagacaccaaaauucugaggguacggggcaggcagcugauuugaaaagcacccaggccgcgauugaccagaucaacggcaagcucaauaggcugaucgagaaaacaaacgaaaaguuucaucagauugaaaaggaguucucagaaguggagggacggauccaagauuuagagaaauacgucgaagacacuaagauugaucuguggaguuauaaugccgagcuccuuguggcacuggaaaaccagcacaccauagacuugacagauuccgagaugaauaaacuauucgaaaagacucgaaaacagcugcgcgagaacgcugaggacaugggcaaugggugcuuuaagaucuaccauaagugugauaacgccugcauuggaagcaucagaaacgguaccuacgaccacgacguuuauagggaugaagcucucaauaaccgguuccagaucaaaggcguggagcugaagucuggguacaaagacuggauucuuuggauaucauuugccaucaguugcuuccuguugugugucgugcuccugggauuuauuaugugggcaugccaaaagggcaauauccgcuguaacauuugcaucuga

SEQ ID NO: 136669 - RNA, 1701 nt, Artificial Sequence; identical to SEQ ID NO: 136535
  derived and/or modified CDS sequence (opt3) from hemagglutinin__InfluenzaA__AFG99866

SEQ ID NO: 136670 - RNA, 1701 nt, Artificial Sequence; identical to SEQ ID NO: 136535
  derived and/or modified CDS sequence (opt3) from hemagglutinin__InfluenzaA__AFG99877

SEQ ID NO: 136671 - RNA, 1701 nt, Artificial Sequence
  derived and/or modified CDS sequence (opt3) from hemagglutinin__InfluenzaA__AFG99888
augaagaccaucauugcccugagcuacauacucugccuuguguucgcucagaaacugcccggcaacgacaauuccacagcaacuuuguguuuagggcaccaugccgucccuaacggaacgcugguuaagaccaucacaaaugaucaaauugaggugacuaacgcgaccgaacuuguacagucuucaaguacagguagaaucugcgacagcccacacaggauucucgauggcaaaaauuguacccugaucgacgcucuacugggggauccgcauugcgacggauuucagaacaaggagugggauuuguucguggaacgguccaaagccuauucuaauuguuaccccuaugacgucccugauuacgcaucgcuccgcucacugguggccagcaguggcacucuggaguuuauaaacgaagacuucaauuggacagguguugcucaguccggggagucuuaugcaugcaagcgaggaagcgugaaguccuuuuucucacgucucaacugguuacacgagagugaauacaaauauccagcccugaaugucaccaugcccaacaaugauaaguuugacaaacuuuacaucuggggcgugcaucacccuagcacggauagagagcaaacuucuuuguacauuagggcuuccggccggguaaccguuucaacaaagcgcagccagcagacugugaucccaaacauugggaguagacccugggucaggggacugucuucccggaucagcauauauuggaccauugugaaaccuggugacauccuacucauuaauucgacaggcaaccugaucgccccacgcggguacuucaagauccgaaccggaaagucuuccauuaugagaucagacgcgccgauaggcacguguaacagugaaugcaucacucccaaugguagcauuccuaacgauaaaccauuucagaaugugaacaggaucacauauggggcauguccccgguacgucaagcaaaauacccuuaaacuggccacuggaaugcguaacguuccugagaagcagacacgcggcauauucggcgcuauugccggguuuaucgagaauggaugggaagguaugguggacggcugguauggguucagacaccagaacuccgagggaaccggccaggcagcugauuugaaaucuacgcaagccgcgaucgaccagauuaaugguaagcucaacaggcugaucgaaaagaccaaugagaaguuucaucagauugaaaaggaguucagcgagguagaagggcggauacaagauuuagagaaauacguggaagacacaaagaucgaucuguggucauauaacgccgagcuccuugucgcacuggaaaaucagcacacuauugacuugaccgauagugagaugaacaaacuauucgagaagacacgaaaacagcugcgcgaaaaugcugaggacaugggcaacggaugcuuuaagaucuaccauaagugugauaacgccugcaucggcuccauuagaaaugggacuuacaaccacgacguguauagggacgaagcucucaauaaccgguuccagauaaaaggaguugagcugaaaagcgguuacaaagauuggauccuuuggauuucuuuugccaucucaugcuuccuguugugugugguccuccugggcuuuauuaugugggcaugccaaaaggggaauauccgcuguaacauaugcaucuga

SEQ ID NO: 136672 - RNA, 1701 nt, Artificial Sequence; identical to SEQ ID NO: 136535
  derived and/or modified CDS sequence (opt3) from hemagglutinin__InfluenzaA__AFG99899

SEQ ID NO: 136673 - RNA, 1701 nt, Artificial Sequence; identical to SEQ ID NO: 136535
  derived and/or modified CDS sequence (opt3) from hemagglutinin__InfluenzaA__AFG99910

SEQ ID NO: 136674 - RNA, 1701 nt, Artificial Sequence; identical to SEQ ID NO: 136535
  derived and/or modified CDS sequence (opt3) from hemagglutinin__InfluenzaA__AFG99921

SEQ ID NO: 136675 - RNA, 1701 nt, Artificial Sequence
  derived and/or modified CDS sequence (opt3) from hemagglutinin__InfluenzaA__AFG99932
augaagaccaucauugcccugagcuacauacucugccuuguguucgcucagaaacugcccggcaacgacaauuccacagcaacuuuguguuuagggcaccaugccgucccuaacggaacgcugguuaagaccaucacaaaugaucaaauugaggugacuaacgcgaccgaacuuguacagucuucaaguacagguagaaucugcgacagcccacacaggauucucgauggcaaaaauuguacccugaucgacgcucuacugggggauccgcauugcgacggauuucagaacaaggagugggauuuguucguggaacgguccaaagccuauucuaauuguuaccccuaugacgucccugauuacgcaucgcuccgcucacugguggccagcaguggcacucuggaguuuauaaacgaagacuucaauuggacagguguugcucaguccggggagucuuaugcaugcaagcgaggaagcgugaaguccuuuuucucacgucucaacugguuacacgagagugaauacaaauauccagcccugaaugucaccaugcccaacaaugauaaguuugacaaacuuuacaucuggggcgugcaucacccuagcacggauagagagcaaacuucuuuguacauuagggcuuccggccggguaaccguuucaacaaagcgcagccagcagacugugaucccaaacauugggaguagacccugggucaggggacugucuucccggaucagcauauauuggaccauugugaaaccuggugacauccuacucauuaauucgacaggcaaccugaucgccccacgcggguacuucaagauccgaaccggaaagucuuccauuaugagaucagacgcgccgauaggcacguguaguagcgaaugcaucacucccaacgguuccauuccuaaugauaaaccauuucagaacgugaauaggaucacauauggggcauguccccgguacgucaagcaaaacacccuuaaacuggccacuggaaugcguaauguuccugagaagcagacacgcggcauauucggcgcuauugccggguuuaucgagaacggaugggaagguaugguggacggcugguauggguucagacaccaaaauucugagggaaccggccaggcagcugauuugaaaagcacgcaggccgcgaucgaccagauuaacgguaagcucaauaggcugaucgagaaaaccaacgaaaaguuucaucagauugaaaaggaguucucagagguagaagggcggauacaagauuuagagaaauacguggaagacacaaagaucgaucuguggaguuauaaugccgagcuccuugucgcacuggaaaaccagcacacuauugacuugaccgauuccgagaugaauaaacuauucgagaagacacgaaaacagcugcgcgaaaacgcugaggacaugggcaauggaugcuuuaagaucuaccauaagugugauaacgccugcaucggcagcauuagaaacgggacuuacgaccacgacguguauagggaugaagcucucaauaaccgguuccagauaaaaggaguugagcugaagucugguuacaaagacuggauccuuuggauuucauuugccaucaguugcuuccuguugugugugguccuccugggcuuuauuaugugggcaugccaaaaggggaauauccgcuguaacauaugcaucuga

SEQ ID NO: 136676 - RNA, 1701 nt, Artificial Sequence; identical to SEQ ID NO: 136535
  derived and/or modified CDS sequence (opt3) from hemagglutinin__InfluenzaA__AFG99943

SEQ ID NO: 136677 - RNA, 1701 nt, Artificial Sequence
  derived and/or modified CDS sequence (opt3) from hemagglutinin__InfluenzaA__AFG99954
augaagaccaucauugcccugagcuacauacucugccuuguguucgcucagaaacugcccggcaacgacaauuccacagcaacuuuguguuuagggcaccaugccgucccuaacggaacgcugguuaagaccaucacaaaugaucaaauugaggugacuaacgcgaccgaacuuguacagucuucaaguacagguagaaucugcgacagcccacacaggauucucgauggcaaaaauuguacccugaucgacgcucuacugggggauccgcauugcgacggauuucagaacaaggagugggauuuguucguggaacgguccaaagccuauucuaauuguuaccccuaugacgucccugauuacgcaucgcuccgcucacugguggccagcaguggcacucuggaguuuauaaacgaagacuucaauuggacagguguugcucaguccggggauucuuaugcaugcaagcgaggaagcgugaaguccuuuuucucacgucucaacugguuacacgagagugaguacaaauauccagcccugaaugucaccaugcccaacaaugacaaguuugauaaacuuuacaucuggggcgugcaucacccuagcacggaaagagagcaaacuucuuuguacauuagggcuuccggccggguaaccguuucaacaaagcgcagccagcagacugugaucccaaacauuggguucaaacccugggucagaggacugaguucuaggaucuccauauauuggaccauugugaagccuggugacauccuacucauuaauagcacaggcaaccugaucgccccacggggguacuuuaagauccgcaccggaaaaucgucuauuaugcgauccgacgcgccgauaggcacguguucaagugaaugcaucacucccaacgguagcauuccuaaugauaagccauuccagaacgugaauagaaucacauauggggcaugucccagguacgucaaacaaaacacccuuaagcuggccacuggaaugcggaauguuccugagaaacagacacguggcauauuuggcgcuauugccggguucaucgagaacggaugggaagguaugguggacggcugguauggguuucgccaccaaaauuccgagggaaccggccaggcagcugauuugaagucuacgcaggccgcgaucgaccagauuaacgguaaacucaauagacugaucgaaaagaccaacgagaaguuccaucagauugaaaaagaguucagcgagguagaagggaggauacaagauuuagagaaguacguggaagacacaaaaaucgaucuguggucauauaaugccgagcuccuugucgcacuggaaaaccagcacacuauugacuugaccgauagugagaugaauaagcuauuugagaaaacacggaagcagcugcgagaaaacgcugaggacaugggcaauggaugcuucaagaucuaccauaaaugugauaacgccugcaucggcuccauucgcaacgggacuuacgaccacgacguguauagagaugaagcucucaauaacagguuucagauaaagggaguugagcugaaaagcgguuacaaggacuggauccuuuggauuucuuucgccaucucaugcuuucuguugugugugguccuccugggcuucauuaugugggcaugccaaaaagggaauauccgguguaacauaugcaucuga

SEQ ID NO: 136678 - RNA, 1701 nt, Artificial Sequence
  derived and/or modified CDS sequence (opt3) from hemagglutinin__InfluenzaA__AFG99965
augaagaccaucauugcccugagcuacauacucugccuugcuuucgcacagaaacugcccggcaacgacaauuccacagccacuuuguguuuagggcaccaugcggugccuaacggaacgcuggucaagaccaucacaaaugaucaaauugagguuacuaacgcuaccgagcuagugcagucuucaaguacagguagaaucugcgacagcccacacaggauucucgauggcaaaaauuguacccugaucgacgcccuucugggggauccgcauugcgacggauuucagaacaaggaaugggauuuguucguagaacgguccaaagcauauucuaauuguuaccccuaugacgugccugauuacgccucgcuccgcucacuggucgcuagcaguggcacucuggaguuuacaaacgaagacuucaauuggaccgguguggcacaguccggggagucuuaugccugcaagcgaggaagcguuaaguccuuuuucucacgucucaacugguuacacgagagugauuacaaauauccagcucugaaugugacgaugcccaacaauggcaaguuugacaaacuuuacauauggggcguccaucacccuagcacugauagagaacaaaccucuuuguacgugagggccuccgggcggguaacaguuucaacuaagcgcagccagcagaccgugaucccaaacauuggaaguagacccugggucaggggucugucuucccggaucagcauuuauuggacaaucgugaaaccuggcgacauacuacucauuaauucgaccgggaaccugaucgcgccacgcggauacuucaagauucgaacgggcaagucuuccaucaugagaucagacgcaccgaucgguacuuguaguagcgagugcauuacacccaacggguccauaccuaaugauaaaccauuucagaacgugaauaggaucaccuauggagccuguccccgguacgucaagcaaaacacucuuaaacuggcuacaggcaugcguaauguuccugaaaagcagacccgcggcauuuucggggccaucgcaggauuuauagagaacgguugggagggcaugguggacgggugguauggauucagacaccaaaauucugaaggcacgggucaggcugccgauuugaaaagcacccaggcggccauugaccagaucaacgggaagcucaauaggcugaucgagaaaacaaacgaaaaguuucaucagauugagaaggaguucucagaaguagagggccggauccaagauuuagaaaaauacguggaggacacuaagauugaucuguggaguuauaaugcagaacuccuugucgcucuggagaaccagcacaccauagacuugacagauuccgaaaugaauaaacuauucgagaagacucgaaaacagcugcgcgagaacgccgaagacaugggaaauggcugcuuuaagaucuaccauaagugugauaacgcuugcauugggagcaucagaaacggaaccuacgaccacgacguguauagggaugaggcccucaauaaccgguuccagaucaaagguguugaacugaagucuggcuacaaagacuggauucuuuggauaucauuugcaaucaguugcuuccuguugugugugguccuccugggguuuauuaugugggccugccaaaagggaaauauccgcuguaacauuugcaucuga

SEQ ID NO: 136679 - RNA, 1701 nt, Artificial Sequence; identical to SEQ ID NO: 136535
  derived and/or modified CDS sequence (opt3) from hemagglutinin__InfluenzaA__AFG99976

SEQ ID NO: 136680 - RNA, 1701 nt, Artificial Sequence
  derived and/or modified CDS sequence (opt3) from hemagglutinin__InfluenzaA__AFG99987
augaagaccaucauugcccugagcuacauacucugccuuguguucgcucagaaacugcccggcaacgacaauuccacagcaacuuuguguuuagggcaccaugccgucccuaacggaacgcugguuaagaccaucacaaaugaucaaauugaggugacuaacgcgaccgagcuaguacagucuucaaguacagguagaaucugcgacagcccacacaggauucucgauggcaaaaauuguacccugaucgacgcucugcugggggauccgcauugcgacggauuucagaacaaggaaugggauuuguucguggaacgguccaaagccuauucuaauuguuaccccuaugacgucccugauuacgcaucgcuccgcucacugguggccagcaguggcacucuggaguuuauaaacgaagacuucaauuggacagguguugcucagaacggggauuccuaugcaugcaagcgaggaucugucaagagcuuuuucucccgucucaauugguuacacgagucagaguacaaauauccagcccugaacgugaccaugcccaauaacgacaaguuugauaaacuuuacaucuggggcgugcaucacccuaguacggacagagaacaaacuagcuuguacauuagggcuucuggccggguaaccguuuccacaaagcgcucacagcagacugugaucccaaauauugggagcagacccugggucaggggacugaguucucggaucuccauauauuggaccauugugaaaccuggugacauccuacucauuaacagcacaggcaaccugaucgccccacgcggguacuucaagauccgaaccggaaagucgucuauuaugagauccgaugcgccgauaggcacguguucaagugagugcaucacucccaaugguagcauuccuaacgacaaaccauuucagaaugugaacaggaucacauauggggcauguccccgguacgucaagcaaaauacccuuaaacuggccacuggaaugcguaacguuccugaaaagcagacacgcggcauauucggcgcuauugccggguuuaucgagaauggaugggaggguaugguggauggcugguauggguucagacaccagaacuccgaaggaaccggccaggcagcugacuugaaaucuacgcaagccgcgaucgaucagauuaaugguaagcucaacaggcugaucgagaaaaccaaugaaaaguuucaucagauugagaaggaguucagcgaaguagaggggcggauacaagacuuagaaaaauacguggaggauacaaagaucgaccuguggucauauaacgccgaacuccuugucgcacuggagaaucagcacacuauugauuugaccgacagugaaaugaacaaacuauucgagaagacacgaaaacagcugcgcgagaaugcugaagauaugggcaacggaugcuuuaagaucuaccauaagugugacaacgccugcaucggcuccauuagaaaugggacuuacgaccacgauguguauagggacgaggcucucaacaaucgguuccagauaaaaggaguugaacuuaagagcgguuacaaagauuggauccuuuggauuucuuuugccaucucaugcuuccuguugugugugguccuccugggcuuuauuaugugggcaugccaaaaggggaacauccgcuguaauauaugcaucuga

SEQ ID NO: 136681 - RNA, 1701 nt, Artificial Sequence
  derived and/or modified CDS sequence (opt3) from hemagglutinin__InfluenzaA__AFG99998
augaagaccaucauugcccugagcuacauacucugccuuguguucgcucagaaacugcccggcaacgacaauuccacagcaacuuuguguuuagggcaccaugccgucccuaacggaacgcugguuaagaccaucacaaaugaucaaauugaggugacuaacgcgaccgaacuuguacagucuucaaguacagguagaaucugcgacagcccacacaggauucucgauggcaaaaauuguacccugaucgacgcucuacugggggauccgcauugcgacggauuucagaacaaggagugggauuuguucguggaacgguccaaagccuauucuaauuguuaccccuaugacgucccugauuacgcaucgcuccgcucacugguggccagcaguggcacucuggaguuuauaaacgaagacuucaauuggacagguguugcucaggaugggggauccuaugcaugcaagcgaggcucugugaacagcuuuuucucccgucucaauugguuacacaagcuggaguacaaauauccagcccuuaacgucaccaugcccaauaacggcaaguuugacaaauuguacaucuggggagugcaucacccuucaacggauagugaccaaacuagccuguacguaagagcuucugggaggguuaccguguccacaaagcggucacagcagacugucaccccaaauauugguagccgccccugggugagaggccuaaguucuaggaucuccauuuauuggacaaucgugaaaccuggggacauacuccugauuaacagcaccggaaaccuuaucgccccacggggcuacuucaagauucgcaaugguaagucgucuaucaugcgauccgaugcgccgaucgggaacuguucaagugagugcauuacgcccaauggaagcauaccuaacgacaaaccauuucagaaugucaacagaaucacuuauggcgcaugucccagguacguuaagcaaaauacacugaaauuggccaccggcaugcggaacgugccugaaaagcagacucgugggauuuucggagcuaucgccgguuuuauagagaauggcugggaagggaugguagauggaugguauggcuuccgccaccagaacuccgaggguacagggcaggcagcugaccucaaaucuacccaagccgcgauugaucagaucaauggcaagcugaacagauuaaucgagaaaacgaaugaaaaguuucaucagauugagaaggaguucagcgaaguggaaggaaggauccaagaccuggagaaauacgucgaggauaccaagauugaccucuggucauauaacgccgaacuucugguggcauuggagaaucagcacacaauagaucuaacugacagugaaaugaacaaacuguucgagaagacccggaaacagcuccgagaaaacgcugaggauaugggcaaugggugcuuuaagaucuaccauaagugugacaacgccugcauuggauccauccgcaaugguacauacgaccacgauguuuauagagacgaggcucugaacaauagguuccagaucaaaggcguggaacuuaagagcggguacaaagauuggauucuguggauaucuuuugccaucucaugcuucuugcucugugucgugcuguuaggauuuauuaugugggcaugccaaaagggcaacauccgguguaauauuugcaucuga

SEQ ID NO: 136682 - RNA, 1701 nt, Artificial Sequence; identical to SEQ ID NO: 136650
  derived and/or modified CDS sequence (opt3) from hemagglutinin__InfluenzaA__AFH00021

SEQ ID NO: 136683 - RNA, 1701 nt, Artificial Sequence
  derived and/or modified CDS sequence (opt3) from hemagglutinin__InfluenzaA__AFH00032
augaagaccaucauugcccugagcuacauacucugccuuguguucgcucagaaacugcccggcaacgacaauuccacagcaacuuuguguuuagggcaccaugccgucccuaacggaacgcugguuaagaccaucacaaaugaucaaauugaggugacuaacgcgaccgaacuuguacagucuucaaguacagguaaaaucugcgacagcccacacaggauucucgauggcaagaauuguacccugaucgacgcucuacugggggauccgcauugcgacgauuuucagaacaaagagugggacuuguucguggaaagauccaaggccuauucuaauuguuaccccuaugaugucccugacuacgcaucgcuccggucacugguggccagcaguggaacucuggaguuuauaaacgaagauuucaauuggacaggcguugcucaguccggugacucuuaugcaugcaagcgcgggagcgugaaauccuuuuucucacgacucaacugguuacacgagagugaguacaaguauccagcccugaaugucaccaugcccaacaaugauaaauuugacaaguuguacaucuggggagugcaucacccuagcacggaccgugaacaaacuucuuuguacauuagagcuuccggcaggguaaccguuucaacaaaacggagccagcagacugugaucccaaacauuggcagucgccccugggucagagggcugucuuccaggaucagcauauauuggaccauugugaagccuggagauauccuacucauuaauucgacagguaaccugaucgccccacggggcuacuucaagauccgcaccgggaaaucuuccauuaugcgaucagacgcgccgauaggaacguguaguagcgagugcaucacucccaacggcuccauuccuaaugauaagccauuucagaacgugaauagaaucacauauggugcaugucccagguacgucaaacaaaacacccuuaagcuggccacugggaugcggaauguuccugaaaaacagacacguggaauauucggcgcuauugccggcuuuaucgagaacgggugggagggaaugguggacgguugguauggcuuccgccaccaaaauucugaagggaccggacaggcagcugaucuuaagagcacgcaggccgcgaucgaccagauuaacggcaaacucaauaagcugaucgagaagaccaacgaaaaauuucaucagauugagaaggaguucucagaaguagaggguagaauacaagauuuagaaaaauacguggaggacacaaagaucgaucuguggaguuauaaugccgaacuccuugucgcacuggagaaccagcacacuauugacuugaccgauuccgaaaugaauaaacuauucgagaagacaaggaagcagcugcgggagaacgcugaagacauggggaauggcugcuuuaaaaucuaccauaagugugacaacgccugcaucggaagcauucgaaacggcacuuacgaucacgacguguaucgcgaugaggcucucaauaacagauuccagauaaaagggguugaacugaagucuggauacaaagacuggauccuuuggauuucauuugccaucaguugcuuccuguugugugugguccuccuggguuuuauuaugugggcaugccaaaagggcaauaucagguguaacauaugcaucuga

SEQ ID NO: 136684 - RNA, 1701 nt, Artificial Sequence
  derived and/or modified CDS sequence (opt3) from hemagglutinin__InfluenzaA__AFH00043
augaagaccaucauugcccugagcuacauacucugccuuguguucgcucagaaacugcccggcaacgacaauuccacagcaacuuuguguuuagggcaccaugccgucccuaacggaacgcugguuaagaccaucacaaaugaucaaauugaggugacuaacgcgaccgaacuuguacagucuucaaguacagguaaaaucugcgacagcccacacaggauucucgauggcaagaauuguacccugaucgacgcucuacugggggauccgcauugcgacgauuuucagaacaaagagugggacuuguucguggaaagauccaaggccuauucuaauuguuaccccuaugaugucccugacuacgcaucgcuccggucacugguggccagcaguggaacucuggaguuuauaaacgaagauuucaauuggacaggcguugcucaguccggugacucuuaugcaugcaagcgcgggagcgugaaauccuuuuucucacgacucaacugguuacacgagagugaguacaaguauccagcccugaaugucaccaugcccaacaaugauaaauuugacaaguuguacaucuggggagugcaucacccuagcacggaccgugaacaaacuucuuuguacauuagagcuuccggcaggguaaccguuucaacaaaacggagccagcagacugugaucccaaacauuggcagucgccccugggucagagggcugucuuccaggaucagcauauauuggaccauugugaagccuggagauauccuacucauuaauucgacagguaaccugaucgccccacggggcuacuucaagauccgcaccgggaaaucuuccauuaugcgaucagacgcgacgauaggaacuuguaguagcgagugcaucacaccgaacggcuccauucccaaugauaagccuuuucagaacgugaauagaaucaccuauggugcauguccaagguacgucaaacaaaacacucuuaagcuggccacagggaugcggaauguucccgaaaaacagacccguggaauauucggcgcuauugccggcuuuaucgagaacgggugggagggaaugguggacgguugguauggcuuccgccaccaaaauucugaagggacgggacaggcagcugaucuuaagagcacccaggccgcgaucgaccagauuaacggcaaacucaauaagcugaucgagaagacaaacgaaaaauuucaucagauugagaaggaguucucagaaguagaggguagaauacaagauuuagaaaaauacguggaggacacuaagaucgaucuguggaguuauaaugccgaacuccuugucgcacuggagaaccagcacaccauugacuugacagauuccgaaaugaauaaacuauucgagaagacuaggaagcagcugcgggagaacgcugaagacauggggaauggcugcuuuaaaaucuaccauaagugugacaacgccugcaucggaagcauucgaaacggcaccuacgaucacgacguguaucgcgaugaggcucucaauaacagauuccagauaaaagggguugaacugaagucuggauacaaagacuggauccuuuggauuucauuugccaucaguugcuuccuguugugugugguccuccuggguuuuauuaugugggcaugccaaaagggcaauaucagguguaacauaugcaucuga

SEQ ID NO: 136685 - RNA, 1701 nt, Artificial Sequence
  derived and/or modified CDS sequence (opt3) from hemagglutinin__InfluenzaA__AFH00054
augaagaccaucauugcccugagcuacauacucugccuuguguucgcucagaaacugcccggcaacgacaauuccacagcaacuuuguguuuagggcaccaugccgucccuaacggaacgcugguuaagaccaucacaaaugaucaaauugaggugacuaacgcgaccgagcuaguacagucuucaaguacagguagaaucugcgacagcccacacaggauucucgauggcaaaaauuguacccugaucgacgcucugcugggggauccgcauugcgacggauuucagaacaaggaaugggauuuguucguggaacgguccaaagccuauucuaauuguuaccccuaugacgucccugauuacgcaucgcuccgcucacugguggccagcaguggcacucuggaguuuauaaacgaagacuucaauuggacagguguugcucagaacggggauuccuaugcaugcaagcgaggaucugucaagagcuuuuucucccgucucaauugguuacacgagucagaguacaaauauccagcccugaacgugaccaugcccaauaacgacaaguuugauaaacuuuacaucuggggcgugcaucacccuaguacggacagagaacaaacuagcuuguacauuagggcuucuggccggguaaccguuuccacaaagcgcucacagcagacugugaucccaaauauugggagcagacccugggucaggggacugaguucucggaucuccauauauuggaccauugugaaaccuggugacauccuacucauuaacagcacaggcaaccugaucgccccacgcggguacuucaagauccgaaccggaaagucgucuauuaugagauccgaugcgccgauaggcacguguucaagugagugcaucacucccaaugguagcauuccuaacgacaaaccauuucagaaugugaacaggaucacauauggggcauguccccgguacgucaagcaaaauacccuuaaacuggccacuggaaugcguaacguuccugaaaagcagacacgcggcauauucggcgcuauugccggguuuaucgagaauggaugggaggguaugguggauggcugguauggguucagacaccagaacuccgaaggaaccggccaggcagcugacuugaaaucuacgcaagccgcgaucgaucagauuaaugguaagcucaacaggcugaucgagaaaaccaaugaaaaguuucaucagauugagaaggaguucagcgaaguagaggggcggauacaagacuuagaaaaauacguggaggauacaaagaucgaccuguggucauauaacgccgaacuccuugucgcacuggagaaucagcacacuauugauuugaccgacagugaaaugaacaaacuauucgagaagacacgaaaacagcugcgcgagaaugcugaagauaugggcaacggaugcuuuaagaucuaccauaagugugacaacgccugcaucggcuccauuagaaaugggacuuacgaccacgauguguauagggacgaggcucucaacaaucgguuccacauaaaaggaguugaacuuaagagcgguuacaaagauuggauccuuuggauuucuuuugccaucucaugcuuccuguugugugugguccuccugggcuuuauuaugugggcaugccagaaggggaacauccgcuguaauauaugcaucuga

SEQ ID NO: 136686 - RNA, 1701 nt, Artificial Sequence
  derived and/or modified CDS sequence (opt3) from hemagglutinin__InfluenzaA__AFH00065
augaagaccaucauugcccugagcuacauacucugccuuguguucgcucagaaacugcccggcaacgacaauuccacagcaacuuuguguuuagggcaccaugccgucccuaacggaacgcugguuaagaccaucacaaaugaucaaauugaggugacuaacgcgaccgaacuuguacagucuucaaguacagguagaaucugcgacagcccacacaggauucucgauggcaaaaauuguacccugaucgacgcucuacugggggauccgcauugcgacggauuucagaacaaggagugggauuuguucguggaacgguccaaagccuauucuaauuguuaccccuaugacgucccugauuacgcaucgcuccgcucacugguggccagcaguggcacucuggaguuuauaaacgaagacuucaauuggacagguguugcucaggaugggggauccuaugcaugcaagcgaggcucugugaacagcuuuuucucccgucucaauugguuacacaagcuggaguacaaauauccagcccuuaacgucaccaugcccaauaacggcaaguuugacaaauuguacaucuggggagugcaucacccuucaacggauagugaccaaacuagccuguacguaagagcuucugggaggguuaccguguccacaaagcggucacagcagacugucauuccaaauaucgguagccgccccugggugagaggccagccuaguaggauuucuaucuauuggaccauagugaaaccaggggacauucuacucaucaacuccacaggaaaccugauugccccgcggggcuacuucaagauccgcaaugguaagagcucgaucaugcgaucugaugcgcccauugggaacuguuccucagagugcauaaccccuaauggaaguaucccaaacgacaaacccuuucaaaaugucaacagaauuacguauggcgcauguccuagguacguuaagcagaauacucuuaaacuggccacaggcaugcggaacgugccagaaaagcagacccgugggaucuucggagcuauagccgguuuuauugagaauggcugggaagggaugguagauggaugguauggcuuccgccaccagaacagcgaggguacugggcaagcagcugacuugaaauccacacaggccgcgaucgaucagaucaauggcaagcucaacagacugauugagaaaaccaaugaaaaguuucaucaaaucgagaaggaguucucugaaguggaaggaaggauucaggacuuagagaaauacgucgaggauacgaagauagaccuguggagcuauaacgccgaacuccuuguggcacuggagaaucagcacaccaucgauuugacagacucagaaaugaacaaacuauucgagcggacucgaaagcagcugcgcgaaaacgcugaggauaugggcaaugggugcuuuaaaauuuaccauaagugugacaacgccugcaucggaaguaucagaaaugguaccuacgaccacgauguuuauagggacgaggcucucaacaaucgguuccaaauuaagggcguggaacugaaauccggguacaaggauuggauacuuuggaucagcuuugccauuucuugcuuccuguugugugucgugcuccugggauuuaucaugugggcaugccagaaaggcaacauucgcuguaauaucugcauauga

SEQ ID NO: 136687 - RNA, 1701 nt, Artificial Sequence
  derived and/or modified CDS sequence (opt3) from hemagglutinin__InfluenzaA__AFH00076
augaagaccaucauugcccugagcuacauacucugccuuguguucgcucagaaacugcccggcaacgacaauuccacagcaacuuuguguuuagggcaccaugccgucccuaacggaacgcugguuaagaccaucacaaaugaucaaauugaggugacuaacgcgaccgaacuuguacagucuucaaguacagguaaaaucugcgacagcccacacaggauucucgauggcaagaauuguacccugaucgacgcccuucugggggauccgcauugcgacgauuuucagaacaaagagugggacuuguucguggaaagauccaaggcuuauucuaauuguuaccccuaugaugucccugacuacgcaucgcuccggucacugguggccagcaguggaacucuggaguuuauaaacgaagauuucaauuggacaggcguugcucaguccggugacucuuaugcaugcaagcgcgggagcgugaaauccuuuuucucacgacucaacugguuacacgagagugaguacaaguauccagcccugaaugucaccaugcccaacaaugauaaauuugacaagcuauacaucuggggagugcaucacccuagcacggaccgugaacaaacuucuuuguacauuagagcuuccggcaggguaaccguuucaacaaaacggagccagcagacugugaucccaaacauuggcagucgccccugggucagagggcugucuuccaggaucagcauauauuggaccauugugaagccuggagauauccuacucauuaauucgacagguaaccugaucgccccacggggcuacuucaagauccgcaccgggaaaucuuccauuaugcgaucagacgcgccgauaggaacguguaacagugagugcaucacucccaauggcagcauuccuaacgauaagccauuucagaaugugaacagaaucacauauggugcaugucccagguacgucaaacaaaauacccuuaagcuggccacugggaugcggaacguuccugaaaaacagacacguggaauauucggcgcuauugccggcuuuaucgagaaugggugggagggaaugguggacgguugguauggcuuccgccaccagaacuccgaagggaccggacaggcagcugauuugaagucuacgcaagccgcgaucgaccagauuaauggcaaacucaacagacugaucgagaagaccaaugaaaaguuucaucagauugagaaagaguucagcgaaguagaggguaggauacaagauuuagaaaaguacguggaggacacaaaaaucgaucuguggucauauaacgccgaacuccuugucgcacuggagaaucagcacacuauugacuugaccgauagugaaaugaacaagcuauucgagaaaacacggaagcagcugcgagagaaugcugaagacauggggaacggcugcuuuaagaucuaccauaaaugugacaacgccugcaucggauccauucgcaauggcacuuacgaucacgacguguauagagaugaggcucucaacaauagguuccagauaaaggggguugaacugaaaagcggauacaaggacuggauccuuuggauuucuuuugccaucucaugcuuccuguugugugugguccuccuggguuuuauuaugugggcaugccaaaaaggcaacauccgguguaauauaugcaucuga

SEQ ID NO: 136688 - RNA, 1701 nt, Artificial Sequence
  derived and/or modified CDS sequence (opt3) from hemagglutinin__InfluenzaA__AFH00087
augaagaccaucauugcccugagcuacauacucugccuuguguucgcucagaaacugcccggcaacgacaauuccacagcaacuuuguguuuagggcaccaugccgucccuaacggaacgcugguuaagaccaucacaaaugaucaaauugaggugacuaacgcgaccgaacuuguacagucuucaaguacagguagaaucugcgacagcccacacaggauucucgauggcaaaaauuguacccugaucgacgcucuacugggggauccgcauugcgacggauuucagaacaaggagugggauuuguucguggaacgguccgaggccuauucuucguguuaccccuaugacgucccugauuacgcaucacuccgcagccugguggccaguuccggcacucuggaauuuauaaaugaggacuucaacuggacagguguugcucaggaugggaaaucuuaugcaugcaagcgaggaagcgugaauagcuuuuucucacgucucaacugguuacacaagcuggaguacaaauauccagcccuuaaugucaccaugcccaacaauggcaaguuugacaaauuguacaucuggggcgugcaucacccuaguacggauagcgaccaaacuucucuguacguaagagcuuccgggaggguuaccgugucaacaaagcggagccagcagacugucauuccaaacaucggaagucgccccugggugagaggucagucuuccaggauuggcaucuauuggaccauagugaaaccuggggacauucuacucaucaauagcacaggaaaccugauugccccacggggcuacuucaagauccgcaacgguaagucgucuaucaugcgauccgaugcgccgauugggaauuguucaagugaaugcauaacccccaacggaagcaucccuaaugacaaaccauuucaaaacgucaauaagauuacguauggcgcaugucccagauacguuaaacagaacacucuuaagcuggccacaggcaugaggaaugugccugagaaacagacccgggggaucuucggagcuauagccgguuuuauugaaaacggcugggaggggaugguagauggaugguauggcuuccgucaccaaaauuccgaggguacugggcaggcagcugacuugaagucuacacaggccgcgaucgaucagaucaacggcaaacucaaucgccugauugaaaagaccaacgagaaguuucaucaaaucgaaaaagaguucagcgaaguggagggaaggauucaggacuuagagaaguacgucgaagauacgaaaauagaccuguggucauauaaugccgagcuccuuguggcacuggaaaaccagcacaccaucgauuugacagacagugagaugaauaagcuauucgaaagaacucggaaacagcugcgagagaacgcugaggauaugggcaacgggugcuuuaagauuuaccauaagugugacaaugccugcaucggauccauccgcaacgguaccuacgaccacgauguuuauagagacgaagcucucaauaacagguuccaaauuaaaggcguggagcugaaguccggguacaaagauuggauacuuuggaucucuuuugccauuucaugcuuccuguugugugucgugcuccugggauuuaucaugugggcaugccagaagggcaauauucgguguaacaucugcauauga

SEQ ID NO: 136689 - RNA, 1701 nt, Artificial Sequence
  derived and/or modified CDS sequence (opt3) from hemagglutinin__InfluenzaA__AFH00098
augaagaccaucauugcccugagcuacauacucugccuuguguucgcucagaaacugcccggcaacgacaauuccacagcaacuuuguguuuagggcaccaugccgucccuaacggaacgcugguuaagaccaucacaaaugaucaaauugaggugacuaacgcgaccgaacuuguacagucuucaaguacagguagaaucugcgacagcccacacaggauucucgauggcaaaaauuguacccugaucgacgcucuacugggggauccgcauugcgacggauuucagaacaaggagugggauuuguucguggaacgguccaaagccuauucuaauuguuaccccuaugacgucccugauuacgcaucgcuccgcucacugguggccagcaguggcacucuggaguuuauaaacgaagacuucaauuggacagguguugcucaggaugggggauccuaugcaugcaagcgaggcucugugaacagcuuuuucucccgucucaauugguuacacaagcuggaguacaaauauccagcccuuaacgucaccaugcccaauaacggcaaguuugacaaauuguacaucuggggagugcaucacccuucaacggauagugaccaaacuagccuguacguaagagcuucugggaggguuaccguguccacaaagcggucacagcagacugucauuccaaauaucgguagccgccccugggugagaggccuaccuaguaggauuucuaucuauuggaccauagugaaaccaggggacauucuccugaucaacuccacaggaaaccuuauugccccgcggggcuacuucaagauccgcaaugguaagagcucgaucaugcgaucugaugcgcccauugggaacuguuccucagagugcauaaccccuaauggaaguaucccaaacgacaaacccuuucagaaugucaacagaauuacguauggcgcauguccuagguacguuaagcaaaauacucugaaauuggccacaggcaugcggaacgugccagaaaagcagacccgugggaucuucggagcuauagccgguuuuauugagaauggcugggaagggaugguagauggaugguauggcuuccgccaccagaacagcgaggguacugggcaggcagcugaccucaaauccacacaagccgcgaucgaucagaucaauggcaagcugaacagauuaauugagaaaaccaaugaaaaguuucaucagaucgagaaggaguucucugaaguggaaggaaggauucaagaccuggagaaauacgucgaggauacgaagauagaccucuggagcuauaacgccgaacuucugguggcauuggagaaucagcacaccaucgaucuaacagacucagaaaugaacaaacuguucgagcggacucgaaagcagcuccgcgaaaacgcugaggauaugggcaaugggugcuuuaaaauuuaccauaagugugacaacgccugcaucggaaguaucagaaaugguaccuacgaccacgauguuuauagggacgaggcucugaacaaucgguuccagauuaagggcguggaacuuaaauccggguacaaggauuggauacuguggaucagcuuugccauuucuugcuucuugcucugugucgugcuguuaggauuuaucaugugggcaugccaaaaaggcaacauucgcuguaauaucugcauauga

SEQ ID NO: 136690 - RNA, 1701 nt, Artificial Sequence
  derived and/or modified CDS sequence (opt3) from hemagglutinin__InfluenzaA__AFH00109
augaagaccaucauugcccugagcuacauacucugccuuguguucgcucagaaacugcccggcaacgacaauuccacagcaacuuuguguuuagggcaccaugccgucccuaacggaacgcugguuaagaccaucacaaaugaucaaauugaggugacuaacgcgaccgaacuuguacagucuucaaguacagguagaaucugcgacagcccacacaggauucucgauggcaaaaauuguacccugaucgacgcucuacugggggauccgcauugcgacggauuucagaacaaggagugggauuuguucguggaacgguccaaagccuauucuaauuguuaccccuaugacgucccugauuacgcaucgcuccgcucacugguggccagcaguggcacucuggaguuuauaaacgaagacuucaauuggacagguguugcucaggaugggaaguccuauaccugcaagcgaggaucugugaacagcuuuuucucccgucucaauugguuacacaaacuggaguacaaguauccagcacuuaacgucacgaugcccaauaacggcaaauuugacaaguuguacaucuggggcgugcaucacccuucaacugauagugaccaaaccagccuguacguaagagccucugggaggguuacaguguccacuaaacggucacagcagaccgucauuccaaauaucggauuccgccccugggugagaggucuaagcaguaggauuucuaucuauuggacaauagugaagccuggcgacauucuccugaucaacuccaccgggaaccuuauugcuccacggggauacuuuaagauccgcaauggcaaaagcucgaucaugcgaucugaugccccgauugguaacuguuccucagagugcauaacgcccaaugggaguaucccuaacgacaagccauuccagaaugucaacagaauuacuuauggagcgugucccagguacguuaaacaaaauacacugaaguuggcaaccggcaugcggaacgugccugaaaaacagacucguggcaucuuuggggccauagcuggauucauugagaaugguugggaaggcaugguagaugggugguauggauuucgccaccagaacagcgagggcacaggucaggccgcagaccucaaguccacccaagcugccaucgaucagaucaaugggaaacugaacagauuaauugagaagacgaaugaaaaguuccaucagaucgagaaagaguucucugaaguggaaggcaggauucaagaccuggagaaguacgucgaggauaccaaaauagaccucuggagcuauaacgcgggacuucugguggccuuggaaaaucagcacacaaucgaucuaacugacucagagaugaacaagcuguuugaacggacccgaaaacagcuccgcgagaacgcagaagauaugggcaaugggugcuucaagauuuaccauaagugugacaacgcuugcaucggaaguaucagaaaugguacauacgaccacgauguuuauagggacgaggcccugaacaaucgguuucagauuaaaggcguggagcuuaaguccggguacaaagauuggauacuguggaucagcuucgcuauuucuugcuuuuugcucugugucgugcuguuaggauucaucaugugggccugccaaaagggcaacauucgcuguaauaucugcauauga

SEQ ID NO: 136691 - RNA, 1701 nt, Artificial Sequence
  derived and/or modified CDS sequence (opt3) from hemagglutinin__InfluenzaA__AFH00120
augaagaccaucauugcccugagcuacauacucugccuuguguucgcucagaaacugcccggcaacgacaauuccacagcaacuuuguguuuagggcaccaugccgucccuaacggaacgcugguuaagaccaucacaaaugaucaaauugaggugacuaacgcgaccgaacuuguacagucuucaaguacagguagaaucugcgacagcccacacaggauucucgauggcaaaaauuguacccugaucgacgcucuacugggggauccgcauugcgacggauuucagaacaaggagugggauuuguucguggaacgguccaaagccuauucuaauuguuaccccuaugacgucccugauuacgcaucgcuccgcucacugguggccagcaguggcacucuggaguuuauaaacgaagacuucaauuggacagguguugcucaggaugggaaguccuaugcaugcaagcgaggaucugugaacagcuuuuucucccgucucaauugguuacacaaacuggaguacaaguauccagcccuuaacgucaccaugcccaauaacggcaaauuugacaaguuguacaucuggggcgugcaucacccuucaacggauagugaccaaacuagccuguacguaagagcuucugggaggguuaccguguccacaaaacggucacagcagacugucauuccaaauaucggauuccgccccugggugagaggucuaagcaguaggauuucuaucuauuggaccauagugaagccuggcgacauucuccugaucaacuccacagggaaccuuauugccccacggggauacuuuaagauccgcaauggcaaaagcucgaucaugcgaucugaugcgccgauugguaacuguuccucagagugcauaacccccaaugggaguaucccuaacgacaagccauuccagaaugucaacagaauuacguauggagcaugucccagguacguuaaacaaaauacucugaaguuggccacaggcaugcggaacgugccugaaaaacagacccguggcaucuuuggggcuauagccggauucauugagaaugguugggaaggcaugguagaugggugguauggauuucgccaccagaacagcgagggcacuggucaggcagcugaccucaaguccacacaagccgcgaucgaucagaucaaugggaaacugaacagauuaauugagaagaccaaugaaaaguuccaucagaucgagaaagaguucucugaaguggaaggcaggauucaagaccuggagaaguacgucgaggauacgaaaauagaccucuggagcuauaacgccggacuucugguggcauuggaaaaucagcacaccaucgaucuaacagacucagagaugaacaagcuguuugaacggacucgaaaacagcuccgcgagaacgcugaagauaugggcaaugggugcuucaagauuuaccauaagugugacaacgccugcaucggaaguaucagaaaugguaccuacgaccacgauguuuauagggacgaggcucugaacaaucgguuucagauuaaaggcguggagcuuaaguccggguacaaagauuggauacuguggaucagcuucgccauuucuugcuuuuugcucugugucgugcuguuaggauucacaaugugggcaugccaaaagggcaacauccgcuguaauauuugcaucuga

SEQ ID NO: 136692 - RNA, 1701 nt, Artificial Sequence; identical to SEQ ID NO: 136546
  derived and/or modified CDS sequence (opt3) from hemagglutinin__InfluenzaA__AFH00131

SEQ ID NO: 136693 - RNA, 1701 nt, Artificial Sequence
  derived and/or modified CDS sequence (opt3) from hemagglutinin__InfluenzaA__AFH00153
augaagaccaucauugcccugagcuacauacucugccuuguguucgcucagaaacugcccggcaacgacaauuccacagcaacuuuguguuuagggcaccaugccgucccuaacggaacgcugguuaagaccaucacaaaugaucaaauugaggugacuaacgcgaccgaacuuguacagucuucaaguacagguagaaucugcgacagcccacacaggauucucgauggcaaaaauuguacccugaucgacgcucuacugggggauccgcauugcgacggauuucagaacaaggagugggauuuguucguggaacgguccaaagccuauucuaauuguuaccccuaugacgucccugauuacgcaucgcuccgcucacugguggccagcaguggcacucuggaguuuauaaacgaagacuucaauuggacagguguugcucaggaugggaaguccuaugcaugcaagcgaggaucugugaacagcuuuuucucccgucucaauugguuacacaaacuggaguacaaguauccagcccuuaacgucaccaugcccaauaacggcaaauuugacaaguuguacaucuggggcgugcaucacccuucaacggauagugaccaaacuagccuguacauuagagcuucugggaggguaaccguuuccacaaaacggucacagcagacugugaucccaaauauuggaagccgccccugggucagaggucuaaguucuaggaucuccauauauuggaccauugugaagccuggcgacauccuccugauuaacagcacagggaaccuuaucgccccacggggauacuucaagauccgcaauggcaaaucgucuauuaugcgauccgaugcgccgauagguaacuguucaagugagugcaucacccccaaugggagcauuccuaacgacaagccauuucagaaugugaacagaaucacguauggagcaugucccagguacgucaaacaaaauacucugaaguuggccacaggcaugcggaacguuccugaaaaacagacccguggcauauucggggcuauugccggauuuaucgagaaugguugggaaggcaugguggaugggugguauggauuccgccaccagaacuccgagggcacuggucaggcagcugaccucaagucuacacaagccgcgaucgaucagauuaaugggaaacugaacagauuaaucgagaagaccaaugaaaaguuucaucagauugagaaagaguucagcgaaguagaaggcaggauacaagaccuggagaaguacguggaggauacgaaaaucgaccucuggucauauaacgccgaacuucuggucgcauuggagaaucagcacaccauugaucuaacagacagugaaaugaacaagcuguucgagcggacucgaaaacagcuccgcgaaaacgcugaggauaugggaaauggcugcuuuaagaucuaccauaagugugacaacgccugcaucggguccauuagaaauggaaccuacgaccacgauguguauagggacgaggcucugaacaaucgguuccagauaaaagguguugaacuuaagagcggcuacaaagauuggauccuguggauuucuuuugccaucucaugcuucuugcucugugugguccuguuaggguuuauuaugugggcaugccaaaagggaaacauccgcuguaauauaugcaucuga

SEQ ID NO: 136694 - RNA, 1701 nt, Artificial Sequence
  derived and/or modified CDS sequence (opt3) from hemagglutinin__InfluenzaA__AFH00164
augaagaccaucauugcccugagcuacauacucugccuuguguucgcucagaaacugcccggcaacgacaauuccacagcaacuuuguguuuagggcaccaugccgucccuaacggaacgcugguuaagaccaucacaaaugaucaaauugaggugacuaacgcgaccgagcuaguacagucuucaaguacagguagaaucugcgacagcccacacaggauucucgauggcaaaaauuguacccugauggacgcucugcugggggauccgcauugcgacggauuucagaacaaggaaugggauuuguucguggaacgguccaaagccuauucuaauuguuaccccuaugacgucccugauuacgcaucgcuccgcucacugguggccagcaguggcacucuggaguuuaucaacgaagacuucaauuggacagguguugcucagaacggggauuccuaugcaugcaagcgaggaucugucaagagcuuuuucucccgucucaauugguuacacgagucagaguacaaauauccagcccugaacgugaccaugcccaauaacgacaaguuugauaaacuuuacauauggggcgugcaucacccuaguacggacagagaacaaacuagcuuguacaucagggcuucuggccggguaaccguuuccacaaagcgcucacagcagacugugauuccaaauaucgggagcagacccugggucaggggacugaguucucggauuuccaucuauuggaccauagugaaaccuggugacauucuacucaucaacagcacaggcaaccugauugccccacgcggguacuucaagauccgaaccggaaagucgucuaucaugagauccgaugcgccgauuggcacguguucaagugagugcauaacucccaaugguagcaucccuaacgacaaaccauuucagaaugugaacaggauuacauauggggcauguccccgguacgucaagcaaaauacccuuaaacuggccacuggaaugcguaacguuccugaaaagcagacacgcggcaucuucggcgcuauagccggguuuauugagaauggaugggaggguaugguggauggcugguauggguucagacaccagaacuccgaaggaaccggccaggcagcugacuugaaaucuacgcaagccgcgaucgaucagaucaaugguaagcucaacaggcugauugagaaaaccaaugaaaaguuucaucagaucgagaaggaguucagcgaaguagaggggcggauucaagacuuagaaaaauacguggaggauacaaagauagaccuguggucauauaacgccgaacuccuugucgcacuggagaaucagcacacuaucgauuugaccgacagugaaaugaacaaacuauucgagaagacacgaaaacagcugcgcgagaaugcugaagauaugggcaacggaugcuuuaagauuuaccauaagugugacaacgccugcaucggcuccaucagaaaugggacuuacgaccacgauguguauagggacgaggcucucaacaaucgguuccagauuaaaggaguugaacuuaagagcgguuacaaagauuggauacuuuggaucucuuuugccauuucaugcuuccuguugugugugguccuccugggcuuuaucaugugggcaugccaaaaggggaacauucgcuguaauaucugcauauga

SEQ ID NO: 136695 - RNA, 1701 nt, Artificial Sequence
  derived and/or modified CDS sequence (opt3) from hemagglutinin__InfluenzaA__AFH00175
augaagaccaucauugcccugagcuacauacucugccuuguguucgcucagaaacugcccggcaacgacaauuccacagcaacuuuguguuuagggcaccaugccgucccuaacggaacgcugguuaagaccaucacaaaugaucaaauugaggugacuaacgcgaccgagcuaguacagucuucaaguacagguagaaucugcgacagcccacacaggauucucgauggcaaaaauuguacccugaucgacgcucugcugggggauccgcauugcgacggauuucagaacaaggaaugggauuuguucguggaacgguccaaagccuauucuaauuguuaccccuaugacgucccugauuacgcaucgcuccgcucacugguggccagcaguggcacucuggaguuuauaaacgaagacuucaauuggacagguguugcucaggaugggaaguccuaugcaugcaagcgaggaucugugaaauccuuuuucucccgucucaacugguuacacaagcuggaguacaaauauccagcccuuaaugucaccaugcccaacaauggcaaguuugacaaauuguacaucuggggcgugcaucacccuucaacggauagugaccaaacuagccuguacguaagagcuucugggaggguuaccguguccacaaagaagucacagcagacugucauuccaaacaucggaagccggcccugggugcgcggucagaguucuagaauuuccaucuauuggaccauagugaaaccuggcgacauucuacucaucaauagcacagggaaccugauugccccaaggggauacuucaagauccggaacggcaaaucgucuaucaugcgcuccgaugcgccgauugguaauuguucaagugagugcauaacccccaacgggagcaucccuaaugacaagccauuucaaaacgucaaucgaauuacguauggagcaugucccagauacguuaaacagaacacucuuaagcuggccacaggcaugaggaaugugccugaaaaacagacccggggcaucuucggggcuauagccggauuuauugagaacgguugggaaggcaugguagaugggugguauggauuccgucaccagaauagcgagggcacuggucaagcagcugacuugaagucuacacaggccgcgaucgaucagaucaacgggaagcucaaucgccugauugagaaaaccaacgaaaaguuucaucaaaucgagaaagaguucagcgaaguggaaggcaggauucaggacuuagagaaguacgucgaggauacgaaaauagaccuguggucauauaaugccgaacuccuuguggcacuggagaaccagcacaccaucgauuugacagacagugaaaugaauaagcuauucgagagaacucggaagcagcugcgagaaaacgcugaggauaugggaaacggcugcuuuaaaauuuaccauaagugugacaaugccugcaucggguccauccgcaacggaaccuacgaccacgauguuuauagagacgaggcucucaauaacagguuccaaauuaaagguguggaacuuaagagcggcuacaaagauuggauacuuuggaucucuuuugccauuucaugcuuccuguugugugucgugcuccugggguuuaucaugugggcaugccagaagggaaauauucgguguaacaucugcauauga

SEQ ID NO: 136696 - RNA, 1701 nt, Artificial Sequence
  derived and/or modified CDS sequence (opt3) from hemagglutinin__InfluenzaA__AFH00186
augaagaccaucauugcccugagccacauacucugccuuguguucgcucagaaacugcccggcaacgacaauuccacagcaacuuuguguuuagggcaucacgccgucccuaacggaacgcugguuaagaccaucacaaaugaucaaauugaggugacuaacgcgaccgaacuuguacagucuucaaguacagguagaaucugcgacagcccacauaggauucucgauggcaaaaauuguacccugaucgacgcucuacugggggauccgcacugcgacggauuucagaacaaggagugggauuuguucguggaacgguccaaagccuacucuaauuguuaucccuacgacgucccugauuaugcaucgcuccgcucacugguggccagcaguggcacucuggaguuuauaaacgaagacuucaauuggacagguguugcucaggaugggggauccuacgcaugcaagcgaggcucugugaacagcuuuuucucccgucucaauugguuacauaagcuggaguauaaauacccagcccuuaacgucaccaugcccaauaacggcaaguuugacaaauuguauaucuggggagugcaccacccuucaacggauagugaccaaacuagccuguacguaagagcuucugggaggguuaccguguccacaaagcggucacagcagacugucaccccaaauauugguagccgccccugggugagaggccagaguucuaggaucuccauuuacuggacaaucgugaaaccuggggacauacuacucauuagcucgaccggaaaccugaucgccccacggggcuauuucaagauucgcaacgguaagucuuccaucaugcgaucagaugucccgaucgggaauuguaguagcgagugcauuacgcccaacggauccauaccuaaugacaaaccauuucaaaacguuaauagaaucacuuacggcgcgugucccagguaugugaagcagaacacacuuaaacuggcaaccggcaugcggaauguaccugaaaagcagacucgugggauuuucggagccaucgcugguuuuauagagaacggcugggaagggaugguggauggaugguacggcuuccgccaucaaaauucugaggguacagggcaggccgcagacuugaaaagcacccaggcugccauugaucagaucaacggcaagcucaauagacugaucgagaaaacgaacgaaaaguuucaccaaauugagaaggaguucucagaagucgaaggaaggauccaggacuuagagaaauauguggaggauaccaagauugaccuguggaguuacaaugcggaacucauaguugcccuugagaaccagcauacaaucgaucugacugacuccgaaaugaauaaauuguucgagaagacccggaaacagcuacgagaaaacgcagaggauaugggcaacgggugcuuuaagauuuaucacaagugugacaaugcuugcaucggaagcauccgcaacgguacauacgaccacgauguguacagagacgaggcccugaauaacagguuccaaauuaaaggcgucgaacucaagucuggguauaaagauuggauacuguggaucucauuugcuauuaguugcuuccuucugugugugguauugcucggauuuaucaugugggccugccagaagggcaauauucgguguaacaucugcauauga

SEQ ID NO: 136697 - RNA, 1701 nt, Artificial Sequence
  derived and/or modified CDS sequence (opt3) from hemagglutinin__InfluenzaA__AFH00197
augaagaccaucauugcccugagcuacauacucugccuuguguucgcucagaaacugcccggcaacgacaauuccacagcaacuuuguguuuagggcaccaugccgucccuaacggaacgcugguuaagaccaucacaaaugaucaaauugaggugacuaacgcgaccgaacuuguacagucuucaaguacagguagaaucugcgacagcccacacaggauucucgauggcaaaaauuguacccugaucgacgcucuacugggggauccgcauugcgacggauuucagaacaaggagugggauuuguucguggaacgguccaaagccuauucuaauuguuaccccuaugacgucccugauuacgcaucgcuccgcucacugguggccagcaguggcacucuggaguuuauaaacgaagacuucaauuggacagguguugcucaggaugggggauccuauaccugcaagcgaggcucugugaacagcuuuuucucccgucucaauugguuacacaagcuggaguacaaauauccagcacuuaacgucacgaugcccaauaacggcaaguuugacaaauuguacaucuggggagugcaucacccuucaacugauagugaccaaaccagccuguacguaagagccucugggaggguuacaguguccacuaagauuucacagcagaccgucaucccaaauauugguagccggcccugggugcgcggccuaaguucuagaaucuccauauauuggacaauugugaaaccuggggacauccuccugauuaacagcaccggaaaccuuaucgcuccaaggggcuacuucaagauccggaaugguaagucgucuauuaugcgcuccgaugccccgauagggaacuguucaagugagugcaucacgcccaauggaagcauuccuaacgacaaaccauuucagaaugucaaccgaaucacuuauggcgcgugucccagauacguuaagcaaaauacacugaaauuggcaaccggcaugaggaacgugccugaaaagcagacucgggggauauucggagccauugcugguuuuaucgagaauggcugggaagggaugguagauggaugguauggcuuccgucaccagaacuccgaggguacagggcaggccgcagaccucaaaucuacccaagcugccaucgaucagauuaauggcaagcugaaccgcuuaaucgagaaaacgaaugaaaaguuucaucagauugagaaggaguucagcgaaguggaaggaagaauacaagaccuggagaaauacgucgaggauaccaagaucgaccucuggucauauaacgcggaacuucugguggccuuggagaaucagcacacaauugaucuaacugacagugaaaugaacaaacuguucgagaggacccggaagcagcuccgagaaaacgcagaggauaugggcaaugggugcuuuaaaaucuaccauaagugugacaacgcuugcaucggauccauucgcaaugguacauacgaccacgauguuuauagagacgaggcccugaacaauagguuccagauaaagggcguggaacuuaaaagcggguacaaggauuggauccuguggauuucuuuugcuaucucaugcuucuugcucugugucgugcuguuaggauuuauuaugugggccugccaaaaaggcaacauccgguguaauauaugcaucuga

SEQ ID NO: 136698 - RNA, 1701 nt, Artificial Sequence
  derived and/or modified CDS sequence (opt3) from hemagglutinin__InfluenzaA__AFH00208
augaagaccaucauugcccugagcuacauacucugccuuguguucgcucagaaacugcccggcaacgacaauuccacagcaacuuuguguuuagggcaccaugccgucccuaacggaacgcugguuaagaccaucacaaaugaucaaauugaggugacuaacgcgaccgaacuuguacagucuucaaguacagguagaaucugcgacagcccacacaggauucucgauggcaaaaauuguacccugaucgacgcucuacugggggauccgcauugcgacggauuucagaacaaggagugggauuuguucguggaacgguccaaagccuauucuaauuguuaccccuaugacgucccugauuacgcaucgcuccgcucacugguggccagcaguggcacucuggaguuuauaaacgaagacuucaauuggacagguguugcucagaacggggauuccuaugcaugcaagcgaggaucugucaagagcuuuuucucccgucucaauugguuacacgagucagaguacaaauauccagcccugaacgugaccaugcccaauaacgacaaguuugauaaacuuuacaucuggggcgugcaucacccuaguacggacagagaacaaacuagcuuguacauuagggcuucuggccggguaaccguuuccacaaagcgcucacagcagacugugaucccaaauauugggagcagacccugggucaggggacugaguucucggaucuccauauauuggaccauugugaaaccuggugacauccuacucauuaacagcacaggcaaccugaucgccccacgcggguacuucaagauccgaaccggaaagucgucugugaugagauccgaugcgccgauuggcacguguucaagugagugcauaacucccaaugguagcaucccuaacgacaaaccauuucagaaugucaacaggauuacauauggggcauguccccgguacguuaagcaaaauacccuuaaacuggccacuggaaugcguaacgugccugaaaagcagacacgcggcaucuucggcgcuauagccggguuuauugagaauggaugggaggguaugguagauggcugguauggguucagacaccagaacuccgaaggaaccggccaggcagcugacuugaaaucuacgcaagccgcgaucgaucagaucaaugguaagcucagcaggcugauugagaaaaccaacgaaaaguuucaucagaucgagaaggaguucucagaaguggaggggcggauucaagacuuagaaaaauacgucgaggauacaaagauagaccuguggaguuauaaugccgaacuccuuguggcacuggagaaccagcacacuaucgauuugaccgacuccgaaaugaauaaacuauucgagaagacacgaaaacagcugcgcgagaacgcugaagauaugggcaauggaugcuuuaagauuuaccauaagugugacaacgccugcaucggcagcaucagaaacgggacuuacgaccacgauguuuauagggacgaggcucucaauaaccgguuccagauuaaaggaguggaacugaagucugguuacaaagauuggauacuuuggaucucauuugccauuaguugcuuccuguugugugucgugcuccugggcuuuaucaugugggcaugccaaaaggggaauauucgcuguaacaucugcauauga

SEQ ID NO: 136699 - RNA, 1701 nt, Artificial Sequence
  derived and/or modified CDS sequence (opt3) from hemagglutinin__InfluenzaA__AFH00219
augaagaccaucauugcccugagcuacauacucugccuuguguucgcucagaaacugcccggcaacgacaauuccacagcaacuuuguguuuagggcaccaugccgucccuaacggaacgcugguuaagaccaucacaaaugaucaaauugaggugacuaacgcgaccgaacuuguacagucuucaaguacagguagaaucugcgacagcccacacaggauucucgauggcaaaaauuguacccugaucgacgcucuacugggggauccgaacugcgacggauuucagaauaaggagugggauuuguucguggaacgguccaaagccuauucuaacuguuaccccuaugacgucccugauuacgcaucgcuccgcucacugguggccagcaguggcacucuggaguuuacaaaugaagacuucaacuggaccgguguugcucaggaugggggauccuaugcaugcaagcgaggcucugugaauagcuuuuucucccgucucaacugguuacauaagcuggaguacaaauauccagcccuuaaugucacgaugcccaacaauggcaaguuugacaaauuguacauauggggagugcaccauccuucaacugauagugaccaaaccagccuguacguaagagcuucugggaggguuacaguguccacuaagcggucacagcagaccgucacaccaaacaucgguagccgccccugggugagaggccuaaguucuaggauuuccaucuauuggaccauugugaaaccuggggacauccuccugauaaacagcacgggaaaucuuauugccccacggggcuacuucaagauccgcaacgguaagucgucuauuaugcgauccgaugcgccgaucgggacuuguucaagugagugcaucacacccaauggaagcauuccuaacgacaaaccauuucagaaugucaacagaauaaccuauggcgcaugucccagguacguuaagcaaaauacucugaaauuggccacaggcaugcggaacgugccugaaaagcagacccgugggaucuucggagcuauugccgguuuuaucgagaauggcugggaagggaugguagauggaugguauggcuuccgccaccagaacuccgaggguacggggcaggcagcugaccucaaaucuacccaagccgcgauagaucagauuaauggcaagcugaacagauuaaucgacaaaacaaaugagaaguuucaccagaucgaaaaggaguucagcgaaguggagggaaggauucaagaucuggaaaaauacgucgaggacacuaagaucgaucucuggucauauaacgccgagcuucugguggcauuggaaaaucagcauaccauugaccuaacagauagugagaugaacaaacuguucgaaaagacucggaaacagcuccgagagaacgcugaagacaugggcaaugggugcuuuaagauauaccacaagugugacaacgccugcaucggauccauucgcaaugguaccuacgaucaugacguuuauagagaugaggcucugaacaauagguuccagaucaaaggcguggagcuuaagagcggguacaaagacuggauccuguggauuucuuuugccauaucaugcuucuugcucugugucgugcuguuaggauuuaucaugugggcaugccaaaagggcaacauucgguguaauaucugcauuuga

SEQ ID NO: 136700 - RNA, 1701 nt, Artificial Sequence
  derived and/or modified CDS sequence (opt3) from hemagglutinin__InfluenzaA__AFH00230
augaagaccaucauugcccugagcuacauacucugccuuguguucgcucagaaacugcccggcaacgacaauuccacagcaacuuuguguuuagggcaccaugccgucccuaacggaacgcugguuaagaccaucacaaaugaucaaauugaggugacuaacgcgaccgaacuuguacagucuucaaguacagguagaaucugcgacagcccacacaggauucucgauggcaaaaauuguacccugaucgacgcucuacugggggauccgcauugcgacggauuucagaacaaggagugggauuuguucguggaacgguccaaagccuauucuaauuguuaccccuaugacgucccugauuacgcaucgcuccgcucacugguggccagcaguggcacucuggaguuuauaaacgaagacuucaauuggacagguguugcucaggaugggaaguccuaugcaugcaagcgaggaucugugaaauccuuuuucagccgucucaacugguuacacaagcuggaguacaaauauccagcccuuaaugucaccaugcccaacaauggcaaguuugacaaauuguacaucuggggcgugcaucacccuucaacgaacagugaucaaacuagccuguacguaagagcuucugggaggguuaccguguccacaaagcggucacagcagacugucauuccaaauaucggauuccgccccugggugagaggucuaagcaguaggauuucuaucuauuggaccauagugaagccuggcgacauucuccugaucaacuccacagggaaccuuauugccccacggggauacuuuaaaauccgcaauggcaagagcucgaucaugcgaucugacgcgccgauugguaacuguuccucagagugcauaacccccaaugggaguaucccuaacgauaaaccauuccagaaugucaacagaauuacguauggagcaugucccagguacguuaagcaaaauacucugaaauuggccacaggcaugcggaacgugccugaaaagcagacccguggcaucuuuggggcuauagccggauucauugagaaugguugggaaggcaugguagacgggugguauggauuucgccaccagaacagcgagggcacuggucaggcagcugaucucaaauccacacaagccgcgaucgaccagaucaaugggaagcugaacagauuaauugagaagaccaaugaaaaauuccaucagaucgagaaggaguucucugaaguggaaggcaggauucaagaucuggagaaauacgucgaggacacgaagauagaucucuggagcuauaacgccggacuucugguggcauuggaaaaucagcacaccaucgaccuaacagauucagagaugaacaaacuguuugaacggacucgaaagcagcuccgcgagaacgcugaagacaugggcaaugggugcuucaagauuuaccauaaaugugauaacgccugcaucggaaguaucagaaaugguaccuacgaccacgacguuuauagggaugaggcucugaacaaucgguuucagauuaagggcguggagcuuaaauccggguacaaggacuggauacuguggaucagcuucgccauuucuugcuuuuugcucugugucgugcuguuaggauucaucaugugggcaugccaaaaaggcaacauucgcuguaauaucugcauauga

SEQ ID NO: 136701 - RNA, 1701 nt, Artificial Sequence; identical to SEQ ID NO: 129072
  derived and/or modified CDS sequence (opt3) from hemagglutinin__InfluenzaA__AFH00241

SEQ ID NO: 136702 - RNA, 1701 nt, Artificial Sequence
  derived and/or modified CDS sequence (opt3) from hemagglutinin__InfluenzaA__AFH00252
augaagaccaucauugcccugagcuacauacucugccuuguguucgcucagaaacugcccggcaacgacaauuccacagcaacuuuguguuuagggcaccaugccgucccuaacggaacgcugguuaagaccaucacaaaugaucaaauugaggugacuaacgcgaccgaacuuguacagucuucaaguacagguagaaucugcgacagcccacacaggauucucgauggcaaaaauuguacccugaucgacgcucuacugggggauccgcauugcgacgauuuucagaacaaggagugggacuuguucguggaacgguccaaagccuauucuaauuguuaccccuaugaugucccugacuacgcaucgcuccgcucacugguggccagcaguggaacucuggaguuuauaaacgaagauuucaauuggacaggcguugcucaguccggugacucuuaugcaugcaagcgagggagcgugaaguccuuuuucucacgucucaacugguuacacgagagugaguacaaauauccagcccugaaugucaccaugcccaacaaugauaaguuugacaaacuuuacaucuggggagugcaucacccuagcacggacagagaacaaacuucuuuguacauuagggcuuccggccggguaaccguuucaacaaagcgcagccagcagacugugaucccaaacauuggcaguagacccugggucagggggcugucuucccggaucagcauauauuggaccauugugaaaccuggagauauccuacucauuaauucgacagguaaccugaucgccccacgcggcuacuucaagauccgaaccgggaagucuuccauuaugagaucagacgcgccgauaggaacguguaguagcgagugcaucacucccaacggcuccauuccuaaugauaaaccauuucagaacgugaauaggaucacauauggugcauguccccgguacgucaagcaaaacacccuuaaacuggccacugggaugcguaauguuccugaaaagcagacacgcggaauauucggcgcuauugccggcuuuaucgagaacgggugggagggaaugguggacgguugguauggcuucagacaccaaaauucugaagggaccggacaggcagcugauuugaaaagcacgcaggccgcgaucgaccagauuaacggcaagcucaauaggcugaucgagaaaaccaacgaaaaguuucaucagauugagaaggaguucucagaaguagagggucggauacaagauuuagaaaaauacguggaggacacaaagaucgaucuguggaguuauaaugccgaacuccuugucgcacuggagaaccagcacacuauugacuugaccgauuccgaaaugaauaaacuauucgagaagacacgaaaacagcugcgcgagaacgcugaagacauggggaauggcugcuuuaagaucuaccauaagugugacaacgccugcaucggaagcauuagaaacggcacuuacgaucacgacguguauagggaugaggcucucaauaaccgguuccagauaaaagggguugaacugaagucuggauacaaagacuggauccuuuggauuucauuugccaucaguugcuuccuguugugugugguccuccuggguuuuauuaugugggcaugccaaaagggcaauauccgcuguaacauaugcaucuga

SEQ ID NO: 136703 - RNA, 1701 nt, Artificial Sequence
  derived and/or modified CDS sequence (opt3) from hemagglutinin__InfluenzaA__AFH00263
augaagaccaucauugcccugagcuacauacuccaccuuguguucgcucagaaacugcccggcaacgacaauuccacagcaacuuugugcuuagggcaucacgccgucccuaacggaacgcugguuaagaccaucacaaaugaucaaauugaggugacuaacgcgaccgaacuuguacagucuucaaguacagguagaaucugugacagcccacauaggauucucgauggcaaaaauugcacccugaucgacgcucuacugggggauccgaacugugacggauuucagaauaaggagugggauuuguucguggaacgguccaaagccuauucuaacugcuaccccuaugacgucccugauuacgcaucgcuccgcucacugguggccagcaguggcacucuggaguuuacaaaugaagacuucaacuggaccgguguugcucaggaugggggauccuaugcauguaagcgaggcucugugaauagcuuuuucucccgucucaacugguuacacaagcuggaguacaaauauccagcccuuaaugucacgaugcccaacaauggcaaguuugacaaauuguacauauggggagugcaucacccuucaacugauaguguacaaaccagccuguacguuagagcuucugggaaggugacagucuccacuaaaaggucacagcagaccgugacaccaaacaucgguagcaagcccugggugcggggccuaaguucucgcauuuccaucuauuggaccauugucaagccuggggacauccuccugauaaacagcacgggaaaucuuauugccccaagaggcuacuucaaaaucaggaacgguaagucgucuauuaugcgguccgacgcgccgaucgggacuugcucaagugaguguaucacacccaauggaagcauuccuaacgauaaaccauuucagaauguuaaccgcauaaccuauggcgcaugcccccgauacgugaagcaaaauacucugaaauuggccacaggcaugagaaacguaccugaaaagcagaccagggggaucuucggagcuauugccgguuuuaucgagaauggcugggaagggaugguggacggaugguauggcuuccggcaccagaacuccgaggguacggggcaggcagcugaucucaaaucuacccaagccgcgauagaccagauuaauggcaagcugaaccguuuaaucgagaagacaaaugaaaaauuucaucagaucgagaaggaguucagcgaagucgaaggacgcauucaagaucuggagaaauacguggaggacacuaagaucgaucucuggucauauaacgccgaacuucugguugcauuggagaaucagcacaccauugaccuaacagauagugaaaugaacaaacuguucgagaagacuagaaagcagcucagggaaaacgcugaggacaugggcaauggguguuuuaaaauauaccauaagugcgauaacgccuguaucggauccauucggaaugguaccuacgaccacgacguguaucgagaugaggcucugaacaaucgcuuccagaucaaaggcgucgaacuuaagagcggguacaaagacuggauccuguggauuucuuuugccauaucaugcuucuugcucugcgugguacuguuaggauuuaucaugugggcaugucaaaagggcaacauuagaugcaauaucuguauuuga

SEQ ID NO: 136704 - RNA, 1701 nt, Artificial Sequence
  derived and/or modified CDS sequence (opt3) from hemagglutinin__InfluenzaA__AFH00274
augaagaccaucauugcccugagcuacauacucugccuuguguucgcucagaaacugcccggcaacgacaauuccacagcaacuuuguguuuagggcaccaugccgucccuaacggaacgcugguuaagaccaucacaaaugaucaaauugaggugacuaacgcgaccgaacuuguacagucuucaaguacagguagaaucugcgacagcccacacaggauucucgauggcaaaaauuguacccugaucgacgcucuacugggggauccgcauugcgacggauuucagaacaaggagugggauuuguucguggaacgguccaaagccuauucuaauuguuaccccuaugacgucccugauuacgcaucgcuccgcucacugguggccagcaguggcacucuggaguuuauaaacgaagacuucaauuggacagguguugcucaggaugggaaguccuaugcaugcaagcgaggaucugugaacagcuuuuucucccgucucaauugguuacacaaacuggaguacaaguauccagcccuuaacgucaccaugcccaauaacggcaaauuugacaaguuguacaucuggggcgugcaucacccuucaacggauagugaccaaacuagccuguacguaagagcuucugggaggguuaccguguccacaaaacggucacagcagacugucauuccaaauaucggauuccgccccugggugagaggucuaagcaguggcauuucuaucuauuggaccauagugaagccuggggacauucuccugaucaacuccacaggaaaccuuauugccccaaggggcuacuuuaagauccggaaugguaaaagcucgaucaugcgcucugaugcgccgauugggaacuguuccucagagugcauaacccccaauggaaguaucccuaacgacaagccauuccagaaugucaaccgaauuacguauggcgcaugucccagauacguuaaacaaaauacucugaaguuggccacaggcaugaggaacgugccugaaaaacagacccgggggaucuuuggagcuauagccgguuucauugagaauggcugggaagggaugguagauggaugguauggcuuucgucaccagaacagcgaggguacugggcaggcagcugaccucaaguccacacaagccgcgaucgaucagaucaauggcaaacugaaccgcuuaauugagaagaccaaugaaaaguuccaucagaucgagaaagaguucucugaaguggaaggaaggauucaagaccuggagaaguacgucgaggauacgaaaauagaccucuggagcuauaacgccggccuucugguggcauuggaaaaucagcacaccaucgaucuaacagacucagagaugaacaagcuguuugaaagaacucggaaacagcuccgagagaacgcugaagauauggggaauggaugcuucaagauuuaccauaagugugacaacgccugcaucgguaguauccgcaauggcaccuacgaccacgauguuuauagagacgaggcucugaacaauagguuucagauuaaagggguggagcuuaaguccggauacaaagauuggauacuguggaucagcuucgccauuucuugcuuuuugcucugugucgugcuguuaggcuucaucaugugggcaugccaaaaggguaacauucgguguaauaucugcauauga

SEQ ID NO: 136705 - RNA, 1701 nt, Artificial Sequence
  derived and/or modified CDS sequence (opt3) from hemagglutinin__InfluenzaA__AFH00285
augaagaccaucauugcccugagcuacauacucugccuuguguucgcucagaaacugcccggcaacgacaauuccacagcaacuuuguguuuagggcaccaugccgucccuaacggaacgcugguuaagaccaucacaaaugaucaaauugaggugacuaacgcgaccgagcuaguacagucuucaaguacagguagaaucugcggcagcccacacaggauucucgacgggaaaaauuguacccugaucgaugcucugcugggagacccgcauugcgauggcuuucagaacaaggaaugggacuuguucguggaacgguccaaagccuauucuaauuguuaccccuaugaugucccugacuacgcaucgcuccgcucacugguggccagcagugguacucuggaguuuauaaacgaagauuucaauuggacagggguugcucaggacggaggcuccuaugcaugcaagcgaggcucugugaacagcuuuuucucccgucucaauugguuacacaagcuggaguacaaauauccagcccuuaacgucaccaugcccaauaacgggaaguuugauaaauuguacaucuggggagugcaucacccuucaacggacagugaucaaacuagccuguacguaagagcuucugguaggguuaccguguccacaaagcggucacagcagacugucaccccaaauauuggcagccgccccugggugagagggcagaguucuaggaucuccauuuauuggacaaucgugaaaccuggagacauacuacucauuaacagcaccggcaaccugaucgccccacgggguuacuucaagauucgcaaugggaagucgucuaucaugcgauccgacgcgccgaucggaaacuguucaagugagugcauuacgcccaauggcagcauaccuaacgauaaaccauuucaaaaugucaacagaaucacuuauggcgcaugucccagguacguuaagcagaauacacuuaaacuggccaccgggaugcggaacgugccugaaaagcagacucguggaauuuucggugcuaucgccggcuuuauagagaaugggugggaaggaaugguagacggcugguaugguuuccgccaccagaacuccgaggggacaggccaagcagcugauuugaaaucuacccaggccgcgauugaccagaucaauggaaagcucaacagacugaucgagaaaacgaaugaaaaguuucaucaaauugagaaggaguucagcgaaguggaaggcaggauccaggauuuagagaaauacgucgaggacaccaagauugaucuguggucauauaacgccgaacuccuuguggcacuggagaaucagcacacaauagacuugacugauagugaaaugaacaaacuauucgagaagacccggaaacagcugcgagaaaacgcugaggacauggggaauggaugcuuuaagaucuaccauaagugugauaacgccugcauugguuccauccgcaauggcacauacgaccacgacguuuauagagaugaggcucucaacaauagguuccaaaucaaagggguggaacuuaagagcggauacaaagacuggauucuuuggauaucuuuugccaucucaugcuuccuguugugugucgugcuccugggcuuuauuaugugggcaugccagaaggguaacauccgguguaauauuugcaucuga

SEQ ID NO: 136706 - RNA, 1701 nt, Artificial Sequence
  derived and/or modified CDS sequence (opt3) from hemagglutinin__InfluenzaA__AFH00296
augaagaccaucauugcccugagcuacauauucugccucguguuugcucagaaacuucccggcaacgacaauuccacagcaacucuguguuuggggcaccaugccgucccuaacggaacguuaguuaagaccaucacaaaugaucaaauugaggugacuaacgcgaccgaacugguacagucuucaaguacagguagaaucugcgacagcccacacaggauucuagauggcaaaaauuguacccucaucgacgcucugcuuggggauccgcauugcgacggauuccagaacaaggagugggaucuguuuguggaacgguccaaagccuauucuaauuguuaccccuaugacgucccugauuacgcaucguugcgcucacucguggccagcaguggcacucuggaguucauaaacgaagacuuuaauuggacagguguugcucaguccgggggaucuuaugcaugcaagcgaggcagcgugaacuccuucuuuucacgucugaauuggcuccacgagagugaguacaaguauccagccuuaaacgucaccaugcccaauaacggcaaauucgauaagcuguacaucuggggagugcaucacccuagcacggacagagaacaaacuaaucuuuacguaagggcuucugggcggguuaccguguccacaaaacgcucacagcagacugucauuccaaacaucgguagcagacccugggugaggggcuugaguucucggauuuccaucuauuggaccauagugaagccuggggauauucugcuaaucaacagcacaggaaaucucauugccccacgcggcuacuuuaaaauccgaaccgguaagucgucuaucaugagauccgacgcgccgauugggacguguucaagugagugcauaacucccaacggaagcaucccuaaugacaagccauuccagaacgucaauaggauuacauauggcgcauguccccgguacguuaaacaaaacacccugaaacuugccacuggcaugcguaaugugccugaaaagcagacacgcgggaucuuuggagcuauagccgguuucauugagaacggcugggaggggaugguagauggaugguauggcuuuagacaccaaaauuccgaagguaccgggcaggcagcugaccugaagucuacgcaggccgcgaucgaucagaucaacggcaaauugaauaggcucauugagaagaccaacgaaaaauuccaucagaucgagaaggaguucagcgaaguggagggacggauucaagaccuggaaaaguacgucgaggauacaaaaauagacuuauggucauauaaugccgaacugcucguggcacuugagaaccagcacacuaucgaucugaccgacagugaaaugaauaaguuguuugagaaaacacgaaagcagcuacgcgagaacgcugaagauaugggcaacgggugcuucaaaauuuaccauaagugugacaaugccugcaucggauccaucagaaacgguacuuacgaucacgacguuuauagggacgaggcucugaauaaccgguuucagauuaagggcguggaacucaaaagcggguacaaggauuggauacuguggaucucuuucgccaccucaugcuuucuucugugugucguguugcucggauucauuaugugggcaugccaaaaaggcaauauccgcuguaacauuugcaucuga

SEQ ID NO: 136707 - RNA, 1701 nt, Artificial Sequence
  derived and/or modified CDS sequence (opt3) from hemagglutinin__InfluenzaA__AFH00307
augaagaccaucauugcccugagcuacauacucugccuuguguucgcucagaaacugcccggcaacgacaauuccacagcaacuuuguguuuagggcaccaugccgucccuaacggaacgcugguuaagaccaucacaaaugaucaaauugaggugacuaacgcgaccgagcuaguacagucuucaaguacagguagaaucugcgacagcccacacaggauucucgauggcaaaaauuguacccugaucgacgcucugcugggggauccgcauugcgacggauuucagaacaaggaaugggauuuguucguggaacgguccaaagccuauucuaauuguuaccccuaugacgucccugauuacgcaucgcuccgcucacugguggccagcaguggcacucuggaguuuauaaacgaagacuucaauuggacagguguugcucaggaugggggauccuaugcaugcaagcgaggcucugugaacagcuuuuucucccgucucaauugguuacacaagcuggaguacaaauauccagcccuuaacgucaccaugcccaauaacggcaaguuugacaaauuguacaucuggggagugcaucacccuucaacggauagugaccaaacuagccuguacguaagagcuucugggaggguuaccguguccacaaagcggucacagcagacugucaccccaaauauugguagccgccccugggugagaggccagaguucuaggaucuccauuuauuggacaaucgugaaaccuggggacauacuacucauuaacagcaccggaaaccugaucgccccacggggcuacuucaagauucgcaaugguaagucgucuaucaugcgauccgaugcgccgaucgggaacuguucaagugagugcauuacgcccaauggaagcauaccuaacgacaaaccauuucaaaaugucaacagaaucacuuauggcgcaugucccagguacguuaagcagaauacacuuaaacuggccaccggcaugcggaacgugccugaaaagcagacucgugggauuuucggagcuaucgccgguuuuauagagaauggcugggaagggaugguagauggaugguauggcuuccgccaccagaacuccgaggguacagggcaagcagcugacuugaaaucuacccaggccgcgauugaucagaucaauggcaagcucaacagacugaucgagaaaacgaaugaaaaguuucaucaaauugagaaggaguucagcgaaguggaaggaaggauccaggacuuagagaaauacgucgaggauaccaagauugaccuguggucauauaacgccgaacuccuuguggcacuggagaaucagcacacaauagauuugacugacagugaaaugaacaaacuauucgagaagacccggaaacagcugcgagaaaacgcugaggauaugggcaaugggugcuuuaagaucuaccauaagugugacaacgccugcauuggauccauccgcaaugguacauacgaccacgauguuuauagagacgaggcucucaacaauagguuccaaaucaaaggcguggaacuuaagagcggguacaaagauuggauucuuuggauaucuuuugccaucucaugcuuccuguugugugucgugcuccugggauuuauuaugugggcaugccagaagggcaacauccgguguaauauuugcaucuga

SEQ ID NO: 136708 - RNA, 1701 nt, Artificial Sequence; identical to SEQ ID NO: 136707
  derived and/or modified CDS sequence (opt3) from hemagglutinin__InfluenzaA__AFH00318

SEQ ID NO: 136709 - RNA, 1701 nt, Artificial Sequence
  derived and/or modified CDS sequence (opt3) from hemagglutinin__InfluenzaA__AFH00329
augaagaccaucauugcccugagcuacauacucugccuuguguucgcucagaaacugcccggcaacgacaauuccacagcaacuuuguguuuagggcaccaugccgucccuaacggaacgcugguuaagaccaucacaaaugaucaaauugaggugacuaacgcgaccgaacuuguacagucuucaaguacagguagaaucugcgacagccaccauaggauucucgauggcaaaaauuguacccugaucgacgcucuacugggggauccacacugcgacggauuucagaacaaggagugggauuuguucguggaacgguccaaagccuauucuaauuguuacccguaugacguccccgauuacgcaucgcuccgcucacugguggccagcaguggcacucuggaguuuauaaacgaagacuucaauuggacagguguugcucaggaugggaaguccuaugcaugcaagcgaggaucugugaacagcuuuuucucccgucucaauugguuacauaaacuggaguacaaguauccugcccuuaacgucaccaugccaaauaacggcaaauuugacaaguuguacaucuggggcgugcaccaccccucaacggauagugaccaaacuagcauuuacguaagagcuucugggaggguuaccguguccacaaaacggucacagcagacugucaucccuaauauuggaagccgcccaugggugagagguaucaguucuaggauauccauuuauuggaccaucgugaagcccggcgacauucugcuaaucaacagcacagggaaccucaucgccccucggggauacuucaagauucgcaauggcaaaucgucuauaaugcgauccgaugcgccaaucgguaacuguaauucagagugcauuaccccgaacgggaguauccccaaugacaagccuuuucagaacgucaauagaauaacguauggagcauguccaagguacguuaaacaaaacacucugaaacuugccacaggcaugcggaaugugcccgaaaagcagacccguggcauuuucggggcuaucgccggauuuaucgagaacgguugggaaggcaugguagaugggugguauggauuccgccaucagaauagcgagggcacuggucaggcagcugaccugaaguccacacaagccgcgauugaucagaucaacgggaaauugaauagacucauugagaagaccaacgaaaaguuucaccagauagagaaagaguucucugaaguggaaggcaggauccaagaccuggagaaguacgucgaggauacgaaaauugacuuauggagcuauaaugccgaacugcucguggcacuugagaaccagcauaccaucgaucugacagacucagaaaugaacaaguuguucgagcggacucgaaaacagcuacgcgaaaaugcugaggauaugggaaacggcugcuuuaagaucuaccacaagugugacaaugccugcauugggaguauaagaaacggaaccuacgaccacgauguuuauagggacgaggcucugaauaaccgguuccagaucaaagguguggaacucaaguccggcuacaaagauuggauucuguggaucagcuuugccacaucuugcuuccuucugugugucguguugcucggguuuauuaugugggcaugccaaaagggaaauauccgcuguaacauaugcaucuga

SEQ ID NO: 136710 - RNA, 1701 nt, Artificial Sequence
  derived and/or modified CDS sequence (opt3) from hemagglutinin__InfluenzaA__AFH00340
augaagaccaucauugcccugagcuacauacucugccuuguguucgcucagaaacugcccggcaacgacaauuccacagcaacuuuguguuuagggcaccaugccgucccuaacggaacgcugguuaagaccaucacaaaugaucaaauugaggugacuaacgcgaccgaacuuguacagucuucaaguacagguagaaucugcgacagcccacacaggauucucgauggcaaaaauuguacccugaucgacgcucuacugggggauccgcauugcgacggauuucagaacaaggagugggauuuguucguggaacgguccaaagccuauucuaauuguuaccccuaugacgucccugauuacgcaucgcuccgcucacugguggccagcaguggcacucuggaguuuauaaacgaagacuucaauuggacagguguugcucaggaugggaaguccuaugcaugcaagcgaggaucugugaacagcuuuuucucccgucucaauugguuacacaaacuggaguacaaguauccagcccuuaacgucaccaugcccaauaacggcaaauuugacaaguuguacaucuggggcgugcaucacccuucaacggauagugaccaaacuagccuguacguaagagcuucugggaggguuaccguguccacaaaacggucacagcagacugucauuccaaauaucggauuccgccccugggugagaggucuaagcaguaggauuucuaucuauuggaccauagugaagccuggcgacauucuccugaucuccagcacagggaaccuuauugccccacggggauacuuuaagauccgcaacggcaaaucgucuaucaugcgauccgaugcgccgauugguaauuguucaagugagugcauaacccccaacgggagcaucccuaaugacaagccauuccagaacgucaauagaauuacguauggagcaugucccagguacguuaaacaaaacacucugaaguuggccacaggcaugcggaauaucccugaaaaacagacccguggcauauuuggggcuauugccggauucaucgagaacgguugggaaggcaugguggaugggugguauggauuucgccaccaaaauuccgagggcacuggucaggcagcugaccucaagucuacacaggccgcgaucgaucagauuaacgggaaacugaauagauuaaucgagaagaccaacgaaaaguuccaucagauugagaaagaguucagcgaaguagaaggcaggauacaagaccuggagaaguacguggaggauacgaaaaucgaccucuggucauauaaugccggacuucuggucgcauuggaaaaccagcacaccauugaucuaacagacagugagaugaauaagcuguuugaacggacucgaaaacagcuccgcgagaacgcugaagauaugggcaacgggugcuucaagaucuaccauaagugugacaaugccugcaucggauccauuagaaacgguaccuacgaccacgauguguauagggacgaggcucugaauaaccgguuucagauaaaaggcguugagcuuaagagcggguacaaagauuggauccuguggauuucuuucgccaucucaugcuuuuugcucugugugguccuguuaggauucauuaugugggcaugccaaaagggcaauauccgcuguaacauaugcaucuga

SEQ ID NO: 136711 - RNA, 1701 nt, Artificial Sequence
  derived and/or modified CDS sequence (opt3) from hemagglutinin__InfluenzaA__AFH00351
augaagaccaucauugcccugagcuacauacucugccuuguguucgcucagaaacugcccggcaacgacaauuccacagcaacuuuguguuuagggcaccaugccgucccuaacggaacgcugguuaagaccaucacaaaugaucaaauugaggugacuaacgcgaccgaacuuguacagucuucaaguacagguagaaucugcgacagcccacacaggauucucgauggcaaaaauuguacccugaucgacgcucuacugggggauccgcauugcgacggauuucagaacaaggagugggauuuguucguggaacgguccaaagccuauucuaauuguuaccccuaugacgucccugauuacgcaucgcuccgcucacugguggccagcaguggcacucuggaguuuacaaaggaagguuucaacuggaccgggguugcucaggacggaaaguccuaugcaugcaaacgaggcucugucaagagcuuuuucucccgucucaauugguuacacaaacuggaguacaaguauccagcccuuaacgugacgaugcccaauaacgauaaauuugacaaguuguacauauggggcgugcaucacccuucaacugauagugaccaaaccagccuguacguacaggcuucugggagaguuacaguguccacuaagaggucacagcagaccgucaucccaaauauuggaagccggcccugggugcgcgguaucaguucuagaauuuccaucuauuggacaauagugaaaccuggcgacauucuacucaucaacagcaccgggaaucugauugccccaaggggauacuucaagauccggaacggcaaaucgucuaucaugcgcuccgaugcgccgauugguaacuguaauucagagugcauaacgcccgacgggaguaucccuaacgauaagccauuucaaaaugucaaccgaauuacuuauggagcaugucccagauacguuaaacagaauacacuuaagcuggccaccggcaugaggaacgugccugaaaaacagacucggggcaucuucggggcuauagccggauuuauugagaaugguugggaaggcaugguagacgggugguauggauuccgucaccagaacagcgagggcacaggucaagcagcugauuugaaguccacccaggccgcgaucgaccagaucaaugggaagcucaaccgccugauugagaaaacgaauaagaaauuucaucaaaucgaaaaggaguucucugaaguggagggcaggauucaggauuuagaaaaauacgucgaggacaccaagauagaucuguggagcuauaacgccgagcuccuuguggcacuggaaaaucagcacacaaucgacuugacugauucagagaugaacaagcuauucgaaagaacccggaaacagcugcgagagaaugcugaagacaugggaaacggcugcuuuaagauuuaccauaaaugugacaacgccugcaucgggaguauccgcaauggaacauacgaucacgacguuuauagagaugaggcucucaacaauagguuccaaauuaaggguguggagcugaaauccggcuacaaggacuggauacuuuggaucagcuuugccauuucuugcuuccuguugugugucgugcuccugggguuuaucaugugggcaugccagaagggaaacauucgguguaauaucugcauauga

SEQ ID NO: 136712 - RNA, 1701 nt, Artificial Sequence
  derived and/or modified CDS sequence (opt3) from hemagglutinin__InfluenzaA__AFH00362
augaagaccaucauugcccugagcuacauacucugccuuguguucgcucagaaacugcccggcaacgacaauuccacagcaacuuuguguuuagggcaccaugccgucccuaacggaacgcugguuaagaccaucacaaaugaucaaauugaggugacuaacgcgaccgaacuuguacagucuucaaguacagguagaaucugcgacagcccacacaggauucucgauggcaaaaauuguacccugaucgacgcucuacugggggauccgcauugcgacggauuucagaacaaggagugggauuuguucguggaacgguccaaagccuauucuaauuguuaccccuaugacgucccugauuacgcaucgcuccgcucacugguggccagcaguggcacucuggaguuuacaaacgaagguuucaauuggaccgggguugcucaggacggaaaguccuaugcaugcaagcgaggcucugugaaauccuuuuucagccgucucaacugguuacacaagcuggaguacaaauauccagcccuuaaugucacgaugcccaacaaugauaaguuugacaaauuguacauauggggcgugcaucacccuucaacugauagugaccaaaccagccuguacguacaggcuucugggagaguuacaguguccacuaagaggucacagcagaccgucaucccaaacauuggaagccggcccugggugcgcgguaucaguucuagaauuuccaucuauuggacaauagugaagccuggcgacauucuacucaucaauagcaccgggaaccugauugccccaaggggauacuucaaaauccggaacggcaagucgucuaucaugcgcuccgaugcgccgauugacaauuguaacucagagugcauaacgcccaaugguaguaucccuaacgauaaaccauuucaaaaugucaaccgaauuacuuauggggcaugucccagauacguuaagcagaauacacuuaaacuggccaccggaaugaggaacgugccugaaaagcagacucggggcaucuucggcgcuauagccggguuuauugagaauggaugggaagguaugguagacggcugguauggguuccgucaccagaacagcgagggaacaggccaagcagcugauuugaaauccacccaggccgcgaucgaccagaucaaugguaagcucaaccgccugauugagaagacgaaugaaaaauuucaucaaaucgagaaggaguucucugaaguggaagggaggauucaggauuuagagaaauacgucgaggacaccaagauagaucuguggagcuauaacgccgaacuccuuguggcacuggagaaucagcacacaaucgacuugacugauucagaaaugaacaaacuauucgagagaacccggaagcagcugcgagaaaacgcugaggacaugggcaauggaugcuuuaagauuuaccauaaaugugacaacgccugcaucggcaguauccgcaaugggacauacgaucacgacguuuauagagaugaggcucucaacaauagguuccaaauuaagggaguggaacugaaauccgguuacaaggacuggauacuuuggaucagcuuugccacuucuugcuuccuguugugugucgugcuccugggcuuuauuaugugggcaugccagaaagggaacauccgguguaauauuugcaucuga

SEQ ID NO: 136713 - RNA, 1701 nt, Artificial Sequence
  derived and/or modified CDS sequence (opt3) from hemagglutinin__InfluenzaA__AFH00384
augaagaccaucauugcccugagcuacauacucugccuuguguucgcucagaaacugcccggcaacgacaauuccacagcaacuuuguguuuagggcaccaugccgucccuaacggaacgcugguuaagaccaucacaaaugaucaaauugaggugacuaacgcgaccgaacuuguacagucuucaaguacagguagaaucugcgacagcccacacaggauucucgauggcaaaaauuguacccugaucgacgcucuacugggggauccgcauugcgacggauuucagaacaaggagugggauuuguucguggaacgguccaaagccuauucuaauuguuaccccuaugacgucccugauuacgcaucgcuccgcucacugguggccagcaguggcacucuggaguuuacaaaggaagguuucaacuggaccgggguugcucaggacggaaaguccuaugcaugcaaacgaggcucugugaauagcuuuuucucccgucucaacugguuacacaagcuggaguacaaauauccagcccuuaaugucacgaugcccaacaaugauaaguuugacaaauuguacauauggggcgugcaucacccuucaacugauagugaccaaaccagccuguacguacaggcuucugggagaguuacaguguccacuaagaggucacagcagaccgucaucccaaacauuggaagccggcccugggugcgcgguaucaguucuagaauuuccaucuauuggacaauagugaagccuggcgacauucuacucaucaauagcauugggaaccugaucgccccaaggggauacuucaaaauccggaacggcaagucgucuauuaugcgcuccgaugcgccgauagguaauuguaacucagagugcaucacccccaaugggaguauuccuaacgacaaaccauuucaaaaugucaaccgaaucacguauggagcaugucccagauacguuaagcagaauacucuuaaacuggccacaggcaugaggaacgugccugaaaagcagacccggggcauauucggggcuauugccggauuuaucgagaaugguugggaaggcaugguagaugggugguauggauuccgucaccagaacagcgagggcacuggucaagcagcugacuugaaauccacacaggccgcgaucgaucagauuaaugggaagcucaaccgccugaucgagaagaccaaugaaaaauuucaucaaauugagaaggaguucucugaaguggaaggcagaauacaggacuuagagaaauacgucgaggauacgaagaucgaccuguggagcuauaacgccggacuccuuguggcacuggaaaaucagcacaccauugauuugacagacucagagaugaacaaacuauucgaaaggacucggaagcagcugcgagagaacgcugaagauaugggcaaugggugcuuuaagaucuaccauaaaugugacaacgccugcaucggaaguauucgcaaugguaccuacgaccacgauguuuauagagacgaggcucucaacaauagguuccaaauaaagggcguggagcugaaauccggguacaaggauuggauccuuuggauuagcuuugccaucucuugcuuccuguugugugucgugcuccugggauuuauuaugugggcaugccagaaaggcaacauccgguguaauauaugcaucuga

SEQ ID NO: 136714 - RNA, 1701 nt, Artificial Sequence
  derived and/or modified CDS sequence (opt3) from hemagglutinin__InfluenzaA__AFH00395
augaaggccaucauugcucugagcuacauacucugccuuguguucgcacagaaacugcccggcaacgacaauuccaccgccacauuguguuuagggcaccaugcggucccuaacggaacucugguuaagacgaucaccaaugaucaaauugaggugacaaacgcuacugaauugguacagucuucaaguaccgguagaaucugcgacagcccacacaggauucucgauggcaaaaauuguacacugaucgacgcccuucugggggauccgcauugcgacggauuucagaacaaggagugggauuuguucguggaacgguccaaagcauauucuaauuguuaccccuaugacgucccugauuacgccucgcuccgcucacugguggcuagcaguggcacccuggaguuuacuaaggaagguuucaacuggacagggguugcacaggacggaaaguccuaugccugcaaacgaggcucugugaauggcuuuuucagccgucucaacugguuacacaagcuggaguacaaauauccagcucuuaaugucaccaugcccaacaaugauaaguuugacaaauuguacauauggggagugcaucacccuuccacggauucagaccaaaccagucuguacguacaggccagcgggagaguuacugugucuacaaagaggucccagcagacugucaucccaaacauugguucacggcccugggugcgcggcaucagcaguagaauuucuaucuauuggaccauagugaagccuggggacauucuacucaucaaauccacaggaaaucugauugcgccaaggggcuacuucaagauccggaacgguaaaagcucgaucaugcgcucugaugcaccgauugggaacuguaauuccgagugcauaacccccaacggaucaaucccuaaugacaagccauuucaaaacgucaaucgaauuacguauggcgccugucccagauacguuaaacagaacacucuuaagcuggcuacaggcaugaggaaugugccugaaaaacagacccgggggaucuucggagccauagcagguuuuauugagaacggcugggaagggaugguagauggaugguauggcuuccgucaccagaauagugaggguacugggcaagcugccgaccuaaagagcacacaggcggccaucgaucagaucaacggcaagcucaaucgccugauugagaaaaccaacgaaaaguuucaucaaaucgagaaagaguucuccgaaguggaaggaaggauucaggacuuagagaaguacgucgaggauacgaaaauagaccuguggucuuauaaugcagaacuccuuguggcucuggagaaccagcacaccaucgauuugacagacagcgaaaugaauaagcuauucgagagaacucggaagcagcugcgagaaaacgccgaggauaugggcaacgggugcuuuaaaauuuaccauaagugugacaaugcuugcaucggaucaauccgcaacgguaccuacgaccacgauguuuauagagacgaggcccucaauaacagguuccaaauuaaaggcguggaacugaagaguggguacaaagauuggauacuuuggaucuccuuugcaauuagcugcuuccuguugugugucgugcuccugggauuuaucaugugggccugccagaagggcaauauucgguguaacaucugcauauga

SEQ ID NO: 136715 - RNA, 1701 nt, Artificial Sequence
  derived and/or modified CDS sequence (opt3) from hemagglutinin__InfluenzaA__AFH00417
augaagaccaucauugcccugagcuacauacucugccuuguguucgcucagaaacugcccggcaacgacaauuccacagcaacuuuguguuuagggcaccaugccgucccuaacggaacgcugguuaagaccaucacaaaugaucaaauugaggugacuaacgcgaccgaacuuguacagucuucaaguacagguagaaucugcgacagcccacacaggauucucgauggcaaaaauuguacccugaucgacgcucuacugggggauccgcauugcgacggauuucagaacaaggagugggauuuguucguggaacgguccaaagccuauucuaauuguuaccccuaugacgucccugauuacgcaucgcuccgcucacugguggccagcaguggcacucuggaguuuacaaacgaagguuucaauuggaccgggguugcucaggacggaaaguccuaugcaugcaagcgaggcucugugaaauccuuuuucagccgucucaacugguuacacaagcuggaguacaaauauccagcccuuaaugucacgaugcccaacaaugauaaguuugacaaauuguacauauggggcgugcaucacccuucaacugauagugaccaaaccagccuguacguacaggcuucugggagaguuacaguguccacuaagaggucacagcagaccgucaucccaaacauuggaagccggcccugggugcgcgguaucaguucuagaauuuccaucuauuggacaauagugaagccuggcgacauucuacucaucaauagcaccgggaaccugauugccccaaggggauacuucaaaauccggaacggcaagucgucuaucaugcgcuccgaugcgccgauugacaauuguaacucagagugcauaacgcccaaugguaguaucccuaacgauaaaccauuucaaaaugucaaccgaauuacuuauggggcaugucccagauacguuaagcagaauacacuuaaacuggccaccggaaugaggaacgugccugaaaagcagacucggggcaucuucggcgcuauagccggguuuauugagaauggaugggaagguaugguagacggcugguauggguuccgucaccagaacagcgagggaacaggccaagcagcugauuugaaauccacccaggccgcgaucgaccagaucaaugguaagcucaaccgccugauugagaagacgaaugaaaaauuucaucaaaucgagaaggaguucucugaaguggaagggaggauucaggauuuagagaaauacgucgaggacaccaagauagaucuguggagcuauaacgccgaacuccuuguggcacuggagaaucagcacacaaucgacuugacugauucagaaaugaacaaacuauucgagagaacccggaagcagcugcgagaaaacgcugaggacaugggcaauggaugcuuuaagauuuaccauaaaugugacaacgccugcaucggcaguauccgcaaugggacauacgaucacgacguuuauagagaugaggcucucaacaauagguuccaaauuaagggaguggaacugaaauccgguuacaaggacuggauacuuuggaucagcuuugccauuucuugcuuccuguugugugucgugcuccugggcuuuaucaugugggcaugccagaaagggaacauucgguguaauaucugcauauga

SEQ ID NO: 136716 - RNA, 1701 nt, Artificial Sequence; identical to SEQ ID NO: 129036
  derived and/or modified CDS sequence (opt3) from hemagglutinin__InfluenzaA__AFH00428

SEQ ID NO: 136717 - RNA, 1701 nt, Artificial Sequence
  derived and/or modified CDS sequence (opt3) from hemagglutinin__InfluenzaA__AFH00439
augaagaccaucauugcccugagcuacauacucugccuuguguucgcucagaaacugcccggcaacgacaauuccacagcaacuuuguguuuagggcaccaugccgucccuaacggaacgcugguuaagaccaucacaaaugaucaaauugaggugacuaacgcgaccgaacuuguacagucuucaaguacagguagaaucugcgacagcccacacaggauucucgauggcaaaaauuguacccugaucgacgcucuacugggggauccgcauugcgacggauuucagaacaaggagugggauuuguucguggaacgguccaaagccuauucuaauuguuaccccuaugacgucccugauuacgcaucgcuccgcucacugguggccagcaguggcacucuggaguuuacaaacgaagguuucaauuggaccgggguugcucaggacggaacguccuaugcaugcaagcgaggcucugugaaguccuuuuucucccgucucaacugguuacacaaacuggaguacaaguauccagcccuuaaugucacuaugcccaacaaugauaaauuugacaaguuguacauauggggcgugcaucacccuucaaccgauagugaccaaacaagccuguacguacaggcuucugggagaguuacuguguccaccaaaaggucacagcagacagucaucccaaacauuggaagccggcccugggugcgcggugugaguucuagaaucuccauuuauuggaccaucgucaagccuggcgacauacuacucauuaauagcacggggaaccugaucgccccaaggggauacuucaagauucggucgggcaaaucuuccaucaugcgcucagaugcgccgaucgguaacuguaauagugagugcauuacucccaacgggagcauaccuaaugacaagccauuucaaaacguuaaucgaaucacauauggagcaugucccagauacgugaaacagaacacccuuaagcuggccacuggcaugaggaauguaccugaaaaacagacacggggcauuuucggggcuaucgccggauuuauagagaacgguugggaaggcaugguggaugggugguauggauuccgucaccagaauagcgagggcaccggucaagcagcugacuugaagucuacgcaggccgcgauuaaccagaucaaugggaaacucaaccgccugaucgagaagaccaaugaaaaguuucaucaaauugagaaagaguucagcgaagucgaaggcagaauccaggauuuagagaaguacguggaggacacaaaaauugaucuguggucauauaacgccgaacuccuuguugcacuggagaaucagcacacuauagacuugaccgauagugaaauguccaagcuauucgagaggacacggaaacagcugcgagaaaacgcugaggacaugggaaacggcugcuuuaagaucuaccauaagugugauaaugccugcauugggagcauccgcaacggaacuuacgaccacgacguguauagagaugaggcucucaauaacagguuccaaaucaaaggugucgaacugaagucuggcuacaaagacuggauucuuuggauaucauuugccaucaguugcuuccuguugugugugguacuccugggguuuauuaugugggcaugccagaagggaaauauccgguguaacauuugcaucuga

SEQ ID NO: 136718 - RNA, 1701 nt, Artificial Sequence
  derived and/or modified CDS sequence (opt3) from hemagglutinin__InfluenzaA__AFH00450
augaagaccaucauugcccugagcuacauacucugccuuguguucgcucagaaacugcccggcaacgacaauuccacagcaacuuuguguuuagggcaccaugccgucccuaacggaacgcugguuaagaccaucacaaaugaucaaauugaggugacuaacgcgaccgaacugguacagucuucaaguacagguagaaucugcgacggcccacacaggauuaucgaugggaaaaauuguacccucauagacgcucugcuuggagauccgcauugcgacggcuuucagaacaaggagugggaucuguucguggaacggagcaaagccuauuccaauuguuaccccuaugacgucccugauuacgcaucuuugcgcucgcucguggccucaagcgguacucuggaguuuacaaacgaaaguuucaauuggaccgggguugcucagaacggaacguccuaugcaugcaagcgaggcucugucaagagcuuuuucucccgucugaauuggcuccacaaauuagaguacaaguauccagcccugaacgugacuaugcccaauaacgacaaauuugauaaguuguacaucuggggcgugcaucacccuucaaccgacagugaucaaacaagccuuuacguacagucuuccgggagaguuacugugucaaccaaaaggagccagcagacagucauuccaaauaucggaagucggcccugggugcgcggugugucuuccagaauuagcaucuauuggaccauagucaagccuggcgacauucugcuaaucaacucgacggggaaccucauugcuccaaggggauacuucaagauccggucuggcaaauccucaaucaugcgcagugacgccccgauugauaauuguaacagcgagugcauaacucccaaugguuccaucccuaacgacaagccauuucaaaauguuaaccgaauuacauauggggcgugucccagauacgugaaacagaauacccugaaacuugcaacuggaaugaggaacguaccugaaaagcagacacggggcaucuucggcgccauagcuggguuuauugagaauggaugggaagguaugaucgauggcugguauggguuccgucaccagaacucugagggaaccggccaagccgcagaccuaaagagcacgcaggcugccaucaaucagauuaacgguaaauugaaucgccucaucgagaagaccaacgaaaaguuucaucaaauugagaaagaguucucagaaguggaagggagaauacaggaucuggagaaguacgucgaggacacaaaaaucgauuuauggaguuauaaugcggaacugcucguggcccuugagaaccagcacacuauugaccugaccgauuccgaaaugaacaaguuguucgagaggacacggaaacagcuacgagaaaaugcagaggacaugggcaacggaugcuuuaagaucuaccauaagugugauaaugcuugcaucggcagcauucgcaacgggacuuacgaccacgacguuuauagagaugaggcccugaauaacagguuccaaauaaaaggaguggaacucaagucugguuacaaagacuggauccuguggauuucauuugcuaucaguugcuuccuucugugugucguguugcucggcuuuauuaugugggccugccagaaggggaauauccgguguaacauaugcaucuga

SEQ ID NO: 136719 - RNA, 1701 nt, Artificial Sequence
  derived and/or modified CDS sequence (opt3) from hemagglutinin__InfluenzaA__AFH00461
augaagaccaucauugcccugagcuacauacucugccuuguguucgcucagaaacugcccggcaacgacaauuccacagcaacuuuguguuuagggcaccaugccgucccuaacggaacgcugguuaagaccaucacaaaugaucaaauugaggugacuaacgcgaccgaacuuguacagucuucaccaacagguagaaucugcgacaguccgcacaggauucucgauggcaaaaauuguacccugaucgacgcucuacugggggauccccauugcgacggauuucagaacaaggagugggauuuguucguggaacggagcaaagccuauuccaauuguuacccuuaugacgucccagauuacgcaucucuccgcucgcugguggccucaagcggcacucuggaguuuauaaacgaaaauuucaacuggacagguguugcucaggacgggaagaguuaugcaugcaagcgaggauccgugaauagcuuuuucagccgucucaacugguuacacaaacuggauuacaaguaucccgcccuuaaugucaccaugccuaacaauggcaaauuugacaaguuguacaucuggggcgugcaucacccauccacggauucagaccaaauuagucuguacguaagaagcucugggaggguuacuguguccaccaaacggucacagcagacagucauccccgacauuggauaucgcccuugggugagaggucuaagcaguaggaucucuauauacuggacuauugugaagccaggcgauauccuccugauuaacuccaccgggaaccuuaucgcuccgcggggauauuucaagcugcgcaauggcaaaagcucgaucaugcgaucugacgcccccauugguaacuguuccucagggugcauaacaccuaauggaaguaucccaaacgauaagcccuuucagaaugucaacagaauuaccuacggcgcguguccuagguauguuaaacaaaauacguugaagcucgcaacuggcaugcggaacgugccagagaaacagacacgugggaucuucggagccauagcugguuuuauugagaauggcugggaagggaugguagacggaugguacggcuuccgccaccagaacagcgaggguaccgggcaggccgcagaucugaaguccacucaagcugccaucgaccagaucaauggcaaauuaaacagacugguggaaaagacaaaugagaaguuucaucagauugagaaagaguucucugaagucgaaggaaggauccaagaucucgagaaguauguggaagacaccaaaauugaucuuuggagcuacaacgcggagcuguugguugcccuagagaaucagcacacgauagaccugaccgauucagaaaugaacaaacucuucgagcggacacgaaagcagcugcgcgaaaacgcagaggacaugggcaaugggugcuuuaagaucuaccauaagugugacaacgcuugcauuggaaguaucagaaaugguacuuaugaucacgacguguacagggaugaagcccuuaacaaucgguuccagaucaaaggcgucgagcugaaguccggguauaaagacuggauuuuguggauaucuuuugcuaucucuugcuuccuccugugugugguauuacugggauuuauuaugugggccugccaaaagggcaacauccgcuguaauauuugcaucuga

SEQ ID NO: 136720 - RNA, 1701 nt, Artificial Sequence
  derived and/or modified CDS sequence (opt3) from hemagglutinin__InfluenzaA__AFH00472
augaagaccaucauugcccugagcuacauacucugccuuguguucgcucagaaacugcccggcaacgacaauuccacagcaacuuuguguuuagggcaccaugccgucccuaacggaacgcugguuaagaccaucacaaaugaucaaauugaggugacuaacgcgaccgaacuuguacagucuucaaguacagguagaaucugcgacagcccacacaggauucucgauggcaaaaauuguacccugaucgacgcucuacugggggauccgcauugcgacggauuucagaacaaggagugggauuuguucguggaacgguccaaagccuauucuaauuguuaccccuaugacgucucggauuacgcaucacuccgcagccugguggccaguuccggcacucuggaguuuaacaaugaaucuuucaacuggacagguguugcucagaaugggaccagcuaugcaugcaagcgacguuccgugaagucauuuuucaguagacucaacugguuacacaaacuggaguacaaguauccugcccuuaaugucacgaugccaaacaaugacaaauuugauaaguuguacauauggggagugcaucaccccagcacugacucugaucaaaccucccuguacguacaggcuucaggcaggguuacagugagcacuaaacggagucagcagaccgucaucccuaacauuggcucucgcccaugggugagagggguguccagcaggaucucgauuuauuggacaaucgucaagcccggagacauacuacucauuaacucuaccgguaaucugaucgccccucggggcuacuucaagauucgcuccgggaaaucaaguaucaugcgaagcgacgcgccaaucggaaacuguaauuccgagugcauuacgccgaacggcucuauacccaaugauaagccuuuucaaaacguuaauagaaucacuuauggugcauguccaagguacgugaaacagaacacacuuaagcuggccaccgggaugcggaauguacccgaaaaacagacucguggaauuuucggcgcuaucgccggcuuuauagagaacgggugggaaggaaugguggacgguugguauggcuuccgccaccagaauagcgaggggacaggacaagcagcugauuugaagucaacccaggccgcgauuaaccagaucaauggcaaacucaacagacugaucgagaagacgaaugaaaaguuucaucaaauugagaaagaguucagugaagucgaagguaggauccaggacuuagagaaguacguggaggauaccaaaauugaccugugguccuauaacgccgaacuccuuguugcacuggagaaccagcacacaauagauuugacugacagcgaaaugaauaagcuauucgagcggacccgaaaacagcugcgcgaaaacgcugaggauauggggaauggcugcuuuaagaucuaccauaagugugacaacgccugcauuggaucuaucagaaauggcacauacgaucacgacguguauagggacgaggcucucaacaaucgguuccaaaucaaaggggucgaacugaagucaggauacaaagauuggauucuuuggauaaguuuugccaucagcugcuuccuguugugugugguacuccuggguuuuauuaugugggcaugccagaagggcaacauccgcuguaauauuugcaucuga

SEQ ID NO: 136721 - RNA, 1701 nt, Artificial Sequence
  derived and/or modified CDS sequence (opt3) from hemagglutinin__InfluenzaA__AFH00483
augaagaccaucauugcccugagcuacauacucugcaugguguucgcucagaaacuucccggcaacgacaauuccacagcaacucuguguuuggggcaccaugccgucccuaacggaacguuaguuaagaccaucacaaaugaucaaauugaggugacuaacgcgaccgaacugguacagucuucaaguacagguaaaaucugcgacagcccacacaggauucuagauggcaagaauuguacccucaucgacgcucugcuuggggauccgcauugcgacggauuucagaacaaagagugggaucuguucguggaaagauccaaggccuauucuaauuguuaccccuaugacgucccugauuacgcaucguugcggucacucguggccagcaguggcacucuggaguuuaacaaugaauccuucaacuggacagguguugcucagaaugggaccucuuaugcaugcaagcgcggaagcgugaaauccuuuuucucacgacugaacuggcuccacaaguuagaguacaaauauccagcccugaaugucacgaugcccaacaaugacaaguuugauaaacuuuacauauggggcgugcaucacccuaguacugacagcgaucaaaccucuuuguacguacaggcuuccggccguguuacagugucaacuaagagaagccagcagaccgucaucccaaacauugggaguaggcccugggugcggggagugucuucccgcaucagcauuuauuggacaaucgucaagccuggugacauacugcuaauuaacucgaccggcaaucucaucgccccaagaggguacuucaaaauuaggucuggaaaguccucaaucaugcggagugacgcgccgaucggcaacuguaauagcgagugcauuacgcccaacgguuccauaccuaaugauaaaccauuucaaaacguuaaucgcaucacuuauggggcauguccccgauacgugaagcagaacacacugaaacuugccaccggaaugagaaauguaccugaaaagcagacuaggggcauuuucggcgcuaucgccggguuuauagagaacggaugggaagguaugguggacggcugguauggguuccggcaccaaaauucugagggaacaggccaggcagcugaucugaaaagcacccaggccgcgauuaaccagaucaaugguaaguugaaccgucucaucgagaagacgaaugaaaaauuucaucaaauugagaaggaguucucagaagucgaagggcgcauccaggaccuggagaaauacguggaggauaccaagauugacuuauggaguuauaacgccgaacugcucguugcacuugagaaccagcacacaauagaucugacugacuccgaaaugaauaaauuguucgagagaaccaggaagcagcuacgggaaaacgcugaggauaugggcaauggaugcuuuaagaucuaccauaaaugugacaacgccugcauuggcagcauccgaaaugggacauacgaucacgacguguaucgcgacgaggcucugaacaauagauuccaaaucaagggagucgaacucaaaucugguuacaaggauuggauucuguggauaucauuugccaucaguugcuuccuucugugugugguauugcucggcuuuauuaugugggcaugccagaaagggaacaucagguguaauauuugcaucuga

SEQ ID NO: 136722 - RNA, 1701 nt, Artificial Sequence
  derived and/or modified CDS sequence (opt3) from hemagglutinin__InfluenzaA__AFH00494
augaagaccaucauugcccugagcuacauacucugccuuguguucgcucagaaacugcccggcaacgacaauuccacagcaacuuuguguuuagggcaccaugccgucccuaacggaacgcugguuaagaccaucacaaaugaucaaauugaggugacuaacgcgaccgaacuuguacagucuucaccaacagguagaaucugcgacaguccgcacaggauucucgauggcaaaaauuguacccugaucgacgcucuacugggggauccccauugcgacggauuucagaacaaggagugggauuuguucguggaacggagcaaagccuauuccaauuguuacccuuaugacgucccagauuacgcaucucuccgcucgcugguggccucaagcggcacucuggaguuuauaaacgaaaauuucaacuggacagguguugcucaggacgggaagaguuaugcaugcaagcgaggauccgugaauaguuucuucagccgucucaacugguuacacaaacuggaguacaaguaucccgcccuuaaugucaccaugccuaacaauggcaaauuugauaaguuguacaucuggggcgugcaucacccauccacggacucagaucaaacuucucuguacguaagagcuagcgggaggguuaccgugucuacaaaacggucccagcagacugucauucccgacaucggauaucgcccuugggugagaggucagucaagcaggauuggcaucuacuggaccauagugaagccaggggacauucuacucaucaacaguacaggaaaccugauugccccgcggggcuauuucaagauccgcaaugguaaaucuuccaucaugcgaagcgaugcgcccauugggaacuguucgucugagugcauaaccccuaauggauccaucccaaacgacaagcccuuucaaaaugucaacagaauuacguacggcgcauguccuagguauguuaaacagaauacucuuaagcuggccacaggcaugcggaacgugccagaaaaacagacccgugggaucuucggagcuauagccgguuuuauugagaauggcugggaagggaugguagauggaugguacggcuuccgccaccagaacucagaggguacugggcaagcagcugacuugaagaguacacaggccgcgaucgaucagaucaauggcaaacucaacagacugguggagaagaccaaugaaaaguuucaucaaauugagaaagaauuuagcgaggucgaaggaaggauccaggacuuagagaaguauguggaggauacgaaaauugaccugugguccuacaacgccgaacuccuuguugcacuggagaaucagcacaccauagauuugacagacucugaaaugaacaagcuauucgagcggacucgaaaacagcugcgcgaaaacgcugaggauaugggcaaugggugcuuuaagaucuaccauaagugugacaacgccugcauuggaagcaucagaaaugguaccuauaaccacgacguguacagggaugaggcucucaauaaccgguuccaaaucaaaggcgucgaacugaagucaggguauaaagacuggauucuuuggauaaguuuugccaucuccugcuuccuguugugugugguacuccugggauuuauuaugugggcaugccagaagggcaauauccgcuguaacauuugcaucuga

SEQ ID NO: 136723 - RNA, 1701 nt, Artificial Sequence
  derived and/or modified CDS sequence (opt3) from hemagglutinin__InfluenzaA__AFH00505
augaagaccaucauugcccugagcuacauacucugccuuguguucgcucagaaacugcccggcaacgacaauuccacagcaacuuuguguuuagggcaccaugccgucccuaacggaacgcugguuaagaccaucacaaaugaucaaauugaggugacuaacgcgaccgagcuaguacagucuucaaguacagguagaaucugcgacagcccacacaggauucucgauggcaaaaauuguacccugaucgacgcucugcugggggauccgcauugcgacggauuucagaacaaggaaugggauuuguucguggaacgguccaaagccuauucuaauuguuaccccuaugacgucccugauuacgcaucgcuccgcucacugguggccagcaguggcacucuggaguuuacaaacgaagguuucaauuggaccgggguugcucaggacggaacguccuaugcaugcaagcgaggcucugugaaguccuuuuucucccgucucaacugguuacacaaacuggaguacaaguauccagcccuuaaugucacuaugcccaacaaugauaaauuugacaaguuguacauauggggcgugcaucacccuucaaccgauagugaccaaaucagccuguacguacaggcuucugggagaguuacaguguccacuaaaaggucacagcagaccgucauuccaaacaucggaagccggcccugggugcgcggugugaguucuauuaucuccauauauuggacaauugucaagccuggcgacauccuacucauuaauagcaccgggaaccugaucgccccaagaggauacuucaagaucaggucgggcaaaucuuccauuaugcggucagaugcgccgauagacaacuguaauagugagugcaucacgcccaacgguagcauuccuaaugauaagccauuucaaaacguuaaucgcaucacuuauggggcauguccccgauacgugaaacagaacacacuuaagcuggccaccggaaugagaaauguaccugaaaaacagacuaggggcauauucggcgcuauugccggguuuaucgagaacggaugggaagguaugguggacggcugguauggguuccggcaccagaauagcgagggaacaggccaagcagcugauuugaagucuacccaggccgcgaucaaccagauuaaugguaaacucaaccgucugaucgagaagacgaaugaaaaguuucaucaaauugagaaagaguucagcgaagucgaagggcgcauacaggacuuagagaaguacguggaggauaccaaaaucgaccuguggucauauaacgccgaacuccuuguugcacuggagaaucagcacacaauugauuugacugacagugaaaugaacaagcuauucgagagaaccaggaaacagcugcgggaaaacgcugaggauaugggcaauggaugcuuuaagaucuaccauaagugugacaacgccugcaucggcuccauucgaaaugggacauacgaccacgauguguaucgcgacgaggcucucaacaauagauuccaaauaaaaggagucgaacuuaagagcgguuacaaagauuggauccuuuggauuucuuuugccaucucaugcuuccuguugugugugguacuccugggcuuuauuaugugggcaugccagaaggggaacaucagguguaauauaugcaucuga

SEQ ID NO: 136724 - RNA, 1701 nt, Artificial Sequence
  derived and/or modified CDS sequence (opt3) from hemagglutinin__InfluenzaA__AFH00516
augaagaccaucauugcccugagcuacauacucugccagguguucgcucaaaaacuucccggcaacgacaauuccacagcaacucuguguuuggggcaccaugccgucccuaacggaacguuaguuaagaccaucacaaaugaucagauugaggugacuaacgcgaccgaacugguacagucuucaaguacagguagaaucugcgacagcccacacaggauucuagauggcaaaaauuguacccucaucgacgcucugcuuggggauccgcauugcgacggauuucagaacaaggagugggaucuguucguggaacgguccaaagccuauucuaauuguuaccccuaugacgucccugauuacgcaucguugcgcucacucguggccagcaguggcacucuggaguuuacaaacgaagguuucaauuggaccgggguugcucaagacggaaaguccuaugcaugcaagcgaggcucugugaacagcuuuuucucccgucugaauuggcuccacaaauuagaguacaaguauccagcccugaacgucacgaugcccaauaacgauaaauuugacaaacuuuacauauggggcgugcaucacccuucaacugauagugaccagaccagcuuguacguacaggcuucugggagaguuacaguguccacuaagaggucacagcaaaccgucaucccaaauauuggaagccggcccugggugcgcgguaucaguucuagaauuuccaucuauuggacaauagugaagccuggcgacauucugcuaaucaagagcaccgggaaccucauugccccaaggggauacuucaaaauccggaacggcaagucgucuaucaugcgcuccgaugcgccgauugacaauuguaacucagagugcauaacgcccaaugguaguaucccuaacgauaaaccauuucagaaugucaaccgaauuacuuauggggcaugucccagauacguuaagcagaauacacugaaacuugccaccggaaugaggaacgugccugaaaagcagacucggggcaucuucggcgcuauagccggguuuauugagaauggaugggaagguaugguagacggcugguauggguuccgucaccaaaacagcgagggaacaggccaggcagcugaucugaaauccacccaggccgcgaucgaccaaaucaaugguaaguugaaccgccucauugagaagacgaaugaaaaauuucaucagaucgagaaggaguucucugaaguggaagggaggauucaggaucuggagaaauacgucgaggacaccaagauagauuuauggagcuauaacgccgaacugcucguggcacuugagaaucagcacacaaucgaccugacugauucagaaaugaacaaauuguucgagagaacccggaagcaacuacgagaaaacgcugaggacaugggcaauggaugcuuuaagauuuaccauaaaugugacaacgccugcaucggcaguauccgcaaugggacauacgaucacgacguuuauagagaugaggcucugaacaauagguuccagauuaagggaguggaacucaaauccgguuacaaggacuggauacuguggaucagcuuugccauuucuugcuuccuucugugugucguguugcucggcuuuaucaugugggcaugccagaaagggaacauucgguguaauaucugcauauga

SEQ ID NO: 136725 - RNA, 1701 nt, Artificial Sequence
  derived and/or modified CDS sequence (opt3) from hemagglutinin__InfluenzaA__AFH00527
augaagaccaucauugcccugagcuacauacucugccuuguguucgcucagaaaauccccggcaacgacaauuccacagcaacucuguguuuggggcaccaugccgucccuaacggaacguuaguuaagaccauuacaaaugaucaaaucgaggugacuaacgcgaccgaacugguacagucuucaaguacagguagaauuugcgacagcccacacaggauccuagauggcgagaauuguacccucauagacgcucugcuuggggauccgcauugcgacggauuucagaacaaagaaugggaucuguucguggagcgguccaaggccuauucuaauuguuaccccuaugacgucccugauuacgcaucguugcgcucacucguggccagcaguggcacucuggaauuuaacaaugaguccuucaacuggacagguguugcucagaaugggaccucuuaugcaugcaaacgacguagcaucaaguccuuuuucucaagacugaacuggcuccaccaauuaaaguacaaauauccagcccugaaugugacgaugcccaacaaugacaaguuugauaaacuuuacauuuggggaguccaucacccuaguacugacagcgaucagaccucuuuguacgcucaggccuccggcagggugacaguaucaacuaagcggagccagcaaaccguuaucccaaacauuggcagucgccccugggugagaggggucucuuccaggaucagcauacacuggacaauugugaaaccuggagacauccugcuaauuaacucgaccgguaaucucaucgcgccacggggcuauuucaagauccgcucugggaaguccucaauuaugcgaagugacgcaccgauaggaaaauguaacagcgagugcaucacgcccaauggcuccauuccuaacgauaagccauuucagaaugugaacagaaucacuuacggugccugucccagguaugucaaacagaauacacugaagcuggcuaccgggaugcggaacguuccugaaaaacagacucguggaauauucggcgccauugcaggcuuuaucgagaaugggugggaaggaaugguggacgguugguacggcuuccgccaucaaaacucugaggggacaggacaggcugccgaucuuaagagcacccaggcggccaucaaucaaauuaacggcaaauugaauagacucaucgagaagacgaacgaaaaguuucaccagauugagaaagaguucucagaaguagaagguaggauacaggaccuggagaaguauguggaggauaccaaaaucgacuuauggaguuacaaugcagaacugcucgucgcucuugagaaccagcauacaauugaucugacugacuccgaaaugaacaaguuguucgagcggacccgaaaacaacuacgcgaaaaugccgaggauauggggaacggcugcuuuaagaucuaucacaagugugacaaugcuugcaucggaagcauuagaaacggcacauacgaucacgacguguacagggacgaggcccugaauaaccgguuccagauaaaagggguugaacucaagucuggauauaaagauuggauccuguggauuucauuugcaaucaguugcuuccuucuguguguggucuugcucgguuuuauuaugugggccugccagaagggcaauauccgcuguaacauaugcaucuga

SEQ ID NO: 136726 - RNA, 1701 nt, Artificial Sequence
  derived and/or modified CDS sequence (opt3) from hemagglutinin__InfluenzaA__AFH00538
augaagaccaucauugcccugagcuacauacucugccuuguguucgcucagaaaauccccggcaacgacaauuccacagcaacucuguguuuggggcaccaugccgucccuaacggaacguuaguuaagaccauuacaaaugaucaaaucgaggugacuaacgcgaccgaacugguacagagaucuucaacagguaggauuugcgacaguccacaccggauccuagauggcgagaauuguacccucauagacgcucugcuuggggauccgcauugcgacggauuucagaacaaagaaugggaucuguucguggagcgcagcaaggccuauuccaauuguuaccccuaugacgucccugauuacgcaucuuugcgaucgcucguggccucaagcggcacucuggaauuuaacaaugagaguuucaacuggacagguguugcucagaaugggaccuccuaugcaugcaaacguagaucuaucaagagcuuuuucuccaggcugaacuggcuccaccaauuaaaguacaaauauccagcccugaaugugacgaugcccaacaaugacaaguuugauaaacuuuacauuuggggaguccaucacccuucaacugacagugaucagaccagcuuguacgcucaggccucuggccgggugacaguauccacuaagcgcucacagcaaaccguuaucccaaacauuggcagcagacccugggugaggggagucaguucucggaucuccauauauuggacaauugugaaaccuggggacauccugcuaauuaacagcaccgguaaucucaucgcgccacgcggcuacuucaagauccgaucggggaagucuuccauuaugagaucagacgcaccgauaggaaaauguaacagugagugcaucacgcccaauggcagcauuccuaacgauaagccauuucagaaugugaacaggaucacuuauggugccuguccccgguacgucaaacagaauacacugaaacuugcuaccgggaugcguaacguuccugaaaagcagacucgcggaauauucggcgccauugcaggcuuuaucgagaaugggugggaaggaaugguggacgguugguauggcuucagacaccaaaacuccgaggggacaggacaggcugccgaucugaagucuacccaggcggccaucaaucaaauuaacggcaaauugaauaggcucaucgagaagacgaacgaaaaguuucaucagauugagaaagaguucagcgaaguagaaggucggauacaggaccuggagaaguacguggaggauaccaaaaucgacuuauggucauauaaugcagaacugcucgucgcucuugagaaccagcacacaauugaucugacugacagugaaaugaacaaguuguucgagcgaacccgcaaacaacuaagagaaaaugccgaggauauggggaacggcugcuuuaagaucuaccauaagugugacaaugcuugcaucggauccauuaggaacggcacauacgaucacgacguguaucgggacgaggcccugaauaaccgcuuccagauaaaagggguugaacucaagagcggauacaaagauuggauccuguggauuucuuuugcaaucucaugcuuccuucuguguguggucuugcucgguuuuauuaugugggccugccagaagggcaauaucagauguaacauaugcaucuga

SEQ ID NO: 136727 - RNA, 1701 nt, Artificial Sequence
  derived and/or modified CDS sequence (opt3) from hemagglutinin__InfluenzaA__AFH00549
augaagaccaucauugcccugagcuacauacucugccuuguguucgcucagaaacugcccggcaacgacaauuccacagcaacuuuguguuuagggcaccaugccgucccuaacggaacgcugguuaagaccaucacaaaugaucaaauugaggugacuaacgcgaccgaacuuguacagucuucaaguacagguagaaucugcgacagcccacacaggauucucgauggcgagaauuguacccugaucgacgcucuacugggggauccgcauugcgacggauuucagaacaaagaaugggauuuguucguggagcgguccaaggccuauucuaauuguuaccccuaugacgucccugauuacgcaucgcuccgcucacugguggccagcaguggcacucuggaauuuaacaaugaguccuucaacuggacagguguugcucagaaugggaccucuagcgcaugcaaacgacguuccauaaagucauuuuucaguagacucaacugguuacaccaacugaaguauaaauacccagcccuuaaugugacgaugcccaacaaugacaaguuugauaaauuguauaucuggggaguccaucacccuagcacugacucugaucagaccucccuguacgcucaggccccaggcagggugacaguaucaacucggcgcagccagcaaaccguuauucccaacaucggcaguagaccuugggugaggggagucucuuccauuaucagcauauacuggacaauugugaagccaggggacauccuacucauuaacucgaccgguaaucugaucgcgccgcggggcuauuucaaaauccgcucugggaaguccucaauuaugcgaagugacgcacccauaagcaaguguaacuccgagugcaucacgccuaauggaucuauuccaaacgauaaacccuuucagaaugugaacagaaucacuuacggcgccuguccuagguaugucaagcagaauacacuuaaacuggcuaccgguaugcggaacguuccagaaaagcagacucgugggauauucggagccauugcaggcuuuaucgagaauggcugggaagggaugguggacggaugguacgguuuccgccaccaaaacagcgagggcacagggcaggcugccgauuugaaaucaacccaggcggccaucaaucaaauuaacggaaagcucaauagacugaucgagaaaacgaacgaaaaguuucaucagauugagaaggaguucagugaaguagaaggcaggauacaggacuuagagaaauauguggaggauaccaagaucgaccugugguccuacaaugcagaacuccuugucgcucuggagaaccagcacacaauugauuugacugacagcgaaaugaacaaacuauucgagcggacccgaaagcaacugcgcgaaaaugccgaggauauggguaacgggugcuuuaaaaucuaucauaagugugacaaugcuugcaucggcucuauuagaaacggaacauacgaucacgacguguacagggacgaggcccucaauaaccgguuccagauaaagggcguugaacugaaaucaggguauaaggauuggauccuuuggauuaguuuugcaaucagcugcuuccuguugugugugguccuccugggauuuauuaugugggccugccagaaagguaauauccgcuguaacauaugcaucuga

SEQ ID NO: 136728 - RNA, 1701 nt, Artificial Sequence
  derived and/or modified CDS sequence (opt3) from hemagglutinin__InfluenzaA__AFH00560
augaagaccaucauugcccugagcuacauacucugccuuguguucgcucagaaacugcccgucaacgacaauuccacagcaacuuuguguuuaggccaccaugccguuccuaacgggacgcuggugaagaccaucacaaaugaucacauugagguaacuaacgcgaccgaacuugugcaaucuucaaguacaggaagaaucugcgacauuccacaucagauccucgauggugagaauuguacccugauagacgcucuacugggcgauccgcacugcgacggguuucagaacaaagaaugggauuuguucgucgagaggagcacugccuauuccaauuguuaccccuaugacgugccugauuacgcaucucuccggucgcugguugccucaagcggaacacuggaauuuaacaaugagaguuucaacuggaccggcguggcucagaaugguacguccucugcaugcaagcgccgaagcaucaaauccuuuuucucacgucucaacugguuacaucaacugaaguauaaguacccagcccuuaaugucacuaugcccaacaaugagaaauuugacaaguuguauauuuggggagugcaccacccuaguaccgauagcgaccagaucucucuguacgcucaggccccagggagaguaacaguuuccacuaaaaggucacagcaaaccgugauucccaacaucggcagccggccuuggguccgcggcgugaguucuagaauauccauuuacuggacaaucgugaagccaggggauauucuacucaucaacagcaccggaaaucugaucgcgccgagggguuauuucaaaauucggucgggcaagucuuccauaaugcgcucagacgcacccaucgggaaguguaacagugaaugcauuacgccuaauggaagcaucccaaacgacaaacccuuucagaaugucaaccgaauaacuuacggcgccuguccuagauauguuaagcagaauacacuuaaacuggcuaccgguaugaggaacgugccagagaagcagacucgggggauuuucggagccaucgcaggcuuuaucgaaaauggcugggaggggaugguagauggaugguacgguuuccgucaucaaaacuccgagggcacagggcaggcugccgacuugaaaucuacccaggcggccauuaaucaaaucaacggaaagcucaaucgccugauugagaaaacgaacgaaaaguuucaccagauagaaaaggaguucagcgaagcagagggcagaauccaggauuuagagaaauauguggaagacaccaagauugaucuguggucauacaaugcugagcuccuugucgcccuggaaaaccagcauacaaucgacuugacugauagugagaugaacaaacuauucgaaaggacccggaagcaacugcgagagaaugcugaggacauggguaacgggugcuuuaaaaucuaucacaagugugauaaugccugcauuggcuccauacgcaacggaacauacgaccacgauguguacagagacgaagcacucaauaacagguuccagaucaagggcguugagcugaaaagcggguauaaggacuggauucuuuggaucucuuuugccauuucaugcuuccuguuguguaucgugcuccugggauuuauaaugugggcuugccagaaagguaauauccgguguaacauuugcaucuga

SEQ ID NO: 136729 - RNA, 1701 nt, Artificial Sequence
  derived and/or modified CDS sequence (opt3) from hemagglutinin__InfluenzaA__AFH00571
augaagaccaucauugcccugagcuacauacucugccuuguguucgcucagaaacugcccgucaacgacaauuccacagcaacuuuguguuuaggccaccaugccguuccuaacgggacgcuggugaagaccaucacaaaugauaacauugagguaacuaaugcgaccgaacuugugcaaucuucaaguacaggaagaaucugcgacagcccacaccagauucucgauggugagaacuguacccugaucgacgcucuacugggcgauccgcauugcgacggguuucagaauaaagaaugggauuuguucgucgagagguccacugccuauucuaacuguuaccccuaugacgugccugauuacgcaucgcuccggucacugguugccagcaguggaacacuggaauuuaauaacgaguccuucaauuggaccggcguggaccagaacgguacgucuagcgcuugcaagcgccgauccaauaaaucauuuuucagucgucucaacugguuacaccaacugaaguauaaguacccagcacuuaaugucacuaugcccaacaacgagaaauuugauaaguuguauauauggggagugcaucacccuagcaccgacucugaucagaucucccuguacgcccaggcuucagggagaguaacaguuagcacuaaaaggagucagcaaaccgugauuccaaauaucggcucucggcccuggguccgcggcguguccagcagaauuucgaucuacuggacaauagugaagccuggggacauucuacucaucaacucuaccggaaaucugauugccccaagggguuauuucaaaauccgguccggcaagucaaguaucaugcgcagcaacgcgccgauugggaaguguaauuccgaaugcauaacgcccaacggaucuaucccuaaugacaaaccauuucagaacgucaaucgaauuacuuacggcgcaugucccagauauguuaagcagaacacacuuaaacuggccaccgguaugaggaaugugccugagaagcagacucgggggaucuucggagcuauagccggcuuuauugaaaacggcugggaggggaugguagauggaugguacgguuuccgucaccaaaauagcgagggcacagggcaggcagcugacuugaaaucaacccaggccgcgaucaaccaaaucaauggaaagcucaaccgccugauugagaaaacgaacgaaaaguuucaucagaucgaaaaggaguucagugaaguggagggcaggauucaggauuuagagaaauaugucgaagacaccaagauagaucugugguccuacaaugccgagcuccuuguggcacuggaaaaccagcacacaaucgacuugacugauagcgagaugaauaaacuauucgaaagaacccggaagcaacugcgagagaacgcugaggacauggguaaugggugcuuuaaaauuuaucauaagugugauaacgccugcaucggcucuauccgcaauggaacauacgaccacgauguuuacagagacgaagcucucaacaauagguuccagauuaagggcguggagcugaaaucaggguauaaggacuggauacuuuggaucaguuuugccauuagcugcuuccuguugugugucgugcuccugggauuuaucaugugggcaugccagaaagguaacauucgguguaauaucugcauauga

SEQ ID NO: 136730 - RNA, 1701 nt, Artificial Sequence
  derived and/or modified CDS sequence (opt3) from hemagglutinin__InfluenzaA__AFH00582
augaagaccaucauugcccugagcuacauacucugccuuguguucgcucagaaacugcccggcaacgacaauuccacagcaacuuuguguuuagggcaccaugccgucccuaacggaacgcugguuaagaccaucacaaaugaucaaauugaggugacuaacgcgaccgaacuuguacagucuucaaguacagguggcaucugcgacagcccacaccagauucucgauggggagaauuguacccugaucgacgcucuacugggagauccgcauugcgacggcuuucagaacaaagaaugggauuuguucguggagagauccaaggccuauucuaauuguuaccccuaugacgucccugauuacgcaucgcucaggucacugguggccagcagugguacucuggaauuuaacaaugaguccuucaacuggacagggguugcucaaaauggaaccucuagcgcaugcaaacggcgcuccaacaagucauuuuucagucgacucaauugguuacaccagcugaaguauaaauacccagcccuuaacgugacgaugcccaauaacgagaaguuugacaaauuguauauauggggcguccaucacccuagcacugauucugaccagaucucccuguacgcucaggccccaggccgugugaccguaucaacaaagagaagccaacagacuguuauucccaacaucgggaguaggccuugggugcggggagucucuucccgcauuagcaucuacuggaccauagugaaaccaggugauauucuacucaucaauuguacaggcaaccugauugcgccgagaggguauuucaagaucaggucgggaaagucuuccaucaugcggucagacgcaaguauuggcaaaugcaauagcgaauguauaacccccaacgguuccaucccuaaugacaagccauuucagaacgugaaucgcauuacguacggggccugcccccgauaugucaaacagaacacucuuaagcuggcuacaggaaugagaaauguuccugagaaacaaaccaggggcaucuucggcgccauagcaggguuuauugaaaacggaugggaggguaugguggauggcugguacggguuccggcaccagaauagcgagggaacuggccaggcugccgacuugaagucuacacaagcggccaucaaccagaucaaugguaaacucaaccgucugauugaaaagaccaaugagaaguuucaucagaucgaaaaagaguucucagaaguagaggggcgcauucaggauuuagagaaguauguggaagacacgaaaauagaucuguggaguuacaacgcagagcuccuugucgcucuggaaaaccaacacaccaucgacuugacagauuccgagaugaauaagcuauucgaaagaacuaaaaagcagcugagggagaacgccgaggacaugggcaauggauguuuuaagauuuaucauaaaugcgauaacgcuugcaucggcagcauccggaaugggaccuacgaccacgauguguaccgagacgaagcccucaacaaucgcuuccagauuaagggaguugagcugaaaucugguuauaaggacuggauacuuuggaucucauuugcaacaaguuguuuccuguugugcgugguccuccugggcuuuauuaugugggccugucagaaagggaacaucagaugcaauauuuguaucuga

SEQ ID NO: 136731 - RNA, 1701 nt, Artificial Sequence; identical to SEQ ID NO: 129353
  derived and/or modified CDS sequence (opt3) from hemagglutinin__InfluenzaA__AFH00593

SEQ ID NO: 136732 - RNA, 1701 nt, Artificial Sequence; identical to SEQ ID NO: 129353
  derived and/or modified CDS sequence (opt3) from hemagglutinin__InfluenzaA__AFH00604

SEQ ID NO: 136733 - RNA, 1701 nt, Artificial Sequence
  derived and/or modified CDS sequence (opt3) from hemagglutinin__InfluenzaA__AFH00615
augaagaccaucauugcccugagcuacauacucugccuuguguucgcucagaaacugcccggcaacgacaauuccacagcaacuuuguguuuagggcaccaugccgucccuaacggaacgaucguuaagaccauuacaaaugaucaaaucgaggugacuaacgcgaccgaacugguacagucuucaaguacagguggcauuugcaauagcccacaccagauccuagacggggagaacuguacccucauagaugcucugcuuggagacccgcagugcgauggcuuucaaaauaaaaagugggaccuguucguggaaagauccaaagccuauucuaacuguuaccccuaugaugucccugacuacgcaucguugaggucacucguggccagcagugguacucuggaguuuaauaacgaauccuucaauuggacagggguuacccagaacggaacgucuagcgcuugcaagcggcgcuccaauaagucauuuuucagucgacugaacuggcucacucauuuaaaauauaaguacccagcacugaaugugaccaugcccaacaacgagaaauuugauaaacuuuauaucuggggcguccaccauccuggcacagacagcgaucagauuucuuuguacgcccaggcuuccgggcguaucacugugucaaccaagagaagccaacagacaguaauuccaaauaucggaaguaggccccggguucgcgacauaucuuccagaauuagcaucuacuggaccauugugaagccuggugauauccugcuaaucaacucgacgggcaaucucauugccccaaggggguauuucaagauacggucuggaaaauccucaaucaugcgcagugacgcgccgauuggcaaguguaacagcgagugcaucacucccaaugguuccauaccuaacgacaaaccauuucagaaugucaaccgaauuacauacggggcaugucccagauaugugaagcagaauacccugaaacuugccacuggaaugaggaacgugccugaaaagcaaacacggggcaucuucggcgcuaucgccggguuuauugagaauggaugggaagguauggucgauggcugguacggguuccgucaccagaacucugagggaaccggccaggcagcugaccugaaaagcacgcaagccgcgaucaaucagauuaacgguaaguugaaucgccucauagggaagaccaacgagaaauuucaccagaucgaaaaggaguucucagaaguugagggcaggauucaggauaucgaaaaauauguggaggacacaaagaucgaucuguggaguuacaacgccgaguuacugguagcacucgaaaaucaacauacuauugaccuuaccgauuccgagaugaacaaacuguucgaaagaacaaagaagcaguugcgggagaaugcugaagacaugggaaacggcugcuuuaaaauauaucacaagugugauaaugccugcaucgagagcauucgaaacgggacuuacgaccaugauguguaccgcgacgaggcucuaaauaacagauuccagaucaaaggagucgaacugaagucugguuauaaagacuggauucucuggaucucauuugccauaaguugcuuccugcuuuguguggcacuguugggcuuuaucaugugggccugccagaaggggaauauuagguguaacaucugcauuuga

SEQ ID NO: 136734 - RNA, 1701 nt, Artificial Sequence; identical to SEQ ID NO: 136325
  derived and/or modified CDS sequence (opt3) from hemagglutinin__InfluenzaA__AFH00626

SEQ ID NO: 136735 - RNA, 1701 nt, Artificial Sequence
  derived and/or modified CDS sequence (opt3) from hemagglutinin__InfluenzaA__AFH00637
augaagaccaucauugcccugagcuacauacucugccuuguguucgcucagaaacugcccggcaacgacaauuccacagcaacuuuguguuuagggcaccaugccgucccuaacggaacgaucguuaagaccauuacaaaugaucaaaucgaggugacuaacgcgaccgaacugguacagucuucaaguacagguggcauuugcgacagcccacaccagauccuagauggggagaauuguacccucauagacgcucugcuuggagauccgcagugcgacggcuuucaaaacaaaaagugggaucuguucguggaaagauccaaagccuauucuaauuguuaccccuaugacgucccugauuacgcaucguugaggucacucguggccagcagugguacucuggaguuuaacaaugaauccuucaacuggacagggguuacccagaauggaacgucuagcuccugcaagcggcgcucaaacaauagcuuuuucagucgacugaacuggcucacucauuuaaaguuuaaauauccagcucugaaugugaccaugcccaacaacgagaaguucgacaaacuuuacaucuggggcguccaccauccuggcacaaauaacgaucagauuucuuuguauacucaggcauccgggcguaucaccgugucaacaaagagaagccaacagaccguaauuccaaauaucggaaguaggccccggguucgcgacauaccuucuagaauuuccaucuacuggacgauugugaaaccaggugauauccugcuaaucaacagcacuggcaaucucauugccccgaggggguacuuuaagauacggucgggaaagucuuccaucaugcgcucagacgcucccauuggcaaauguaacagugagugcaucacaccuaaugguagcauaccaaacgacaagcccuuccagaaugucaaccgaauuaccuauggggccuguccuagauacgugaaacagaauacucugaaacuugcgacaggaaugaggaacgugccagaaaaacaaacccggggcaucuuuggcgcaaucgccggguucauugagaauggaugggaagguauggucgauggcugguauggguuucgucaccagaacuccgagggaaucggccaggcugccgaccugaagucuacgcaagcagcuauuaaucagauaaacgguaaauugaaccgccucaucgggaagaccaaugagaaguuccaccagauugaaaaagaguucagcgaaguugagggcagaauccaggaucuggaaaaguacguggaggacacaaaaaucgauuuauggucauauaacgccgagcugcucguagcgcuugaaaaucaacauacuauugaccugaccgauagugagaugaacaaguuguuugaaaggacaaagaagcagcuacgggagaaugccgaagacaugggaaacggcugcuucaagauauaccacaaaugugauaaugcaugcaucggguccauucgaaacggaacuuaugaccaugauguguaccgcgacgaggcucugaauaacagauuucagaucaagggugucgagcucaaaagcggcuacaaggacuggauucuguggaucucuuucgccauaucaugcuuucuucuguguguggcuuugcucggguucaucaugugggccugccagaaaggaaauauuagguguaacaucugcauuuga

SEQ ID NO: 136736 - RNA, 1701 nt, Artificial Sequence
  derived and/or modified CDS sequence (opt3) from hemagglutinin__InfluenzaA__AFH00648
augaagaccaucauugcccugagcuacauacucugccuuguguucgcucagaaacugcccggcaacgacgauuccacagcaacuuuguguuuagggcaccaugccgucccuaauggaacgaucguuaagaccauuacaaacgaccaaaucgaggugacuaaugcgaccgaacugguacagucuucaaguacagguggcauuugcgauagcccacaccagauccuagacggggagaacuguacccucauagaugcucugcuuggagacccgcagugcgauggcuuucaaaauaaaaagugggaccuguucguggaaagauccaaagccuauucuaacuguuaccccuaugaugucccugacuacgcaucguugaggucacucguggccagcagugguacucuggaguuuaaugaugaauccuucaacuggacagggguuacccagaauggaacgucuagcuccugcaagcggcgcucaaacaauagcuuuuucagccgacugaacuggcucacucauuuaaaguuuaaauauccagcucugaaugugaccaugcccaacaaugagaaguucgacaaacuuuacaucuggggcguccaccauccugugacagauaacgaccagauuuuucuuuaugcacaggccucuggccguaucacuguauccaccaagagaucacaacagacaguuauuccaaacaucgggagcaggccccggauacgcaauauuccuaguagaaucucuauuuacuggaccaucgugaaaccaggagacauccugcuaauuaacuccacggguaaucucauagcuccgaggggcuacuucaagauccggagcgggaagucgucuauuaugcgcuccgaugcccccaucggaaaauguaacucagagugcauaacuccuaauggcaguauuccaaacgacaagcccuuucagaaugucaaccgaaucacauauggugcguguccuagauacgugaaacagaauacccugaaguuggcaacugggaugaggaacgugccagaaaaacaaacacggggaaucuucggcgccauugcuggcuuuaucgagaaugggugggaaggaauggucgaugguugguauggcuuccgucaccagaacagcgaggggauuggacaggccgcagaccugaaguccacccaagcugccauaaaucagaucaacggcaaauugaaucgccucauugguaagacgaacgagaaguuccaccagaucgaaaaagaguuuucugaaguugaggggagaauccaggaucuggaaaaguacguggaggacaccaaaauugauuuauggagcuauaacgcggagcugcucguagcccuugaaaaucaacauacaauagaccugacugauucagagaugaacaaguuguucgaaaggaccaaaaagcagcuacgggagaaugcagaagacaugggcaacggaugcuuuaagaucuaccacaaaugugauaaugcuugcauuggcaguauccgaaacgggacauaugaccaugacguguaccgcgaugaggcccugaauaacagauuccagauuaagggagucgagcucaaauccgguuacaaggacuggauccuguggauaaguuuugcuaucucuugcuuccuucuguguguggccuugcucggcuuuauuaugugggcaugccagaaagggaauaucagguguaacauuugcaucuga

SEQ ID NO: 136737 - RNA, 1701 nt, Artificial Sequence
  derived and/or modified CDS sequence (opt3) from hemagglutinin__InfluenzaA__AFH00659
augaagaccaucauugcccugagcuacauacucugccuuguguucacacagaaacugcccggcaacgacaauuccacugcuacguuguguuuagggcaccaugcagucccuaacggaaccaugguuaagacaaucacuaaugaucaaauugaggugaccaacgccacagaacugguacagucuucaaguaccggugagaucugcgacagcccacaccagauucuagauggcgaaaauuguacucucaucgacgcgcugcuuggggauccgcagugcgacggauuucaaaacaaaaagugggaucuguucguggagagauccaaagcucauucuaauuguuaucccuacgacgucccugauuaugccucguugaggucacucauagcaagcaguggcacacuggaauuuaacaaugaguccuucaacuggaccggugugacgcagaaugggacuucuagcgccugcaagcggcgcuccgacaacucauuuuucagucgacugaauuggcucacccacuuaaaguuuaaauacccagcucugaacguuacaaugcccaauaacgaggaguucgauaaacuuuauaucuggggagugcaucacccuggcacugacaacgaucagauuagcuuguacgcacaggccucuggccguaucaccgucuccacaaagagaucacaacagaccgugauuccaaauaucgggagcaggccccggguacgcgacauaccuaguagaauuucuaucuauuggacgauuguuaagccaggagacauccugcuaaucaacuccacugguaaucucauugcuccgaggggcuacuuuaaaauacggagcgggaagucgucuaucaugcgcuccgaugcccccauuggaaaguguaacucaggcugcaucacaccuaaugguaguauaccaaacgacaaacccuuccagaaugugaaccgaauuaccuacggggcguguccuagauaugucaagcagaauacucugaaacuugcaacaggaaugaggaacgugccagaaaagcaaacccggggcaucuuuggcgccaucgcuggguucauugaaaauggaugggaggguaugguggauggcugguacggguuucgucaccagaacagcgagggaaucggccaggccgcagaccugaaauccacgcaagcugccauugaucagauaaaugguaaguugaaccgccucaucgggaaaaccaaugaaaaguuccaucagauugagaaggaguucucugaagucgaaggcagaauccaggaccuggagaaauauguugaggauacaaagaucgacuuauggagcuacaacgcggaacugcucguggcccuugagaaccaacacacuauugaucugaccgacucagaaaugaauaaauuguuugagaggacaaagaaacagcuacgggaaaacgcagaggauaugggaaauggcugcuucaagauauaucauaagugugacaacgcuugcaucgggaguauucgaaauggaacuuacgaccacgauguauaucgcgacgaggcccugaacaauagauuucagaucaaagguguggaacucaaguccggcuacaaagauuggauucuguggaucagcuucgcuauaucuugcuuucuucugugugucgccuugcucggguucaucaugugggcaugccagaagggaaacauuagguguaauaucugcauuuga

SEQ ID NO: 136738 - RNA, 1701 nt, Artificial Sequence
  derived and/or modified CDS sequence (opt3) from hemagglutinin__InfluenzaA__AFH00670
augaagaccaucauugcccugagcuacauacucugccuuguguucgcucagaaacugcccggcaucgacaacuccacagcaacuuuguguuuagggcaccaugccgucccuaauggaacgauuguuaagaccaucacaaacgaucaaauugaggugacuaaugcgaccgaacugguacagaacucuucaacagguggcaucugcgacaguccacaccagauacuagauggggagaauuguacccucaucgacgcucugcuuggagauccgcagugcgacggcuuucaaaacaaaaagugggaucuguucguggaaagaagcaaagccuauuccaauuguuaccccuaugacgucccugauuacgcaucuuugaggucgcucguggccucaagcgguacucuggaguuuaacaaugaaaguuucaacuggacagggguuacccagaauggaacguccucugcuugcaagcggggcagcaacaauuccuuuuucucacgccugaacuggcucacucauaguaaguuuaaauauccagcauuaaaugugaccaugcccaacaacgaggaguucgacaagcuguacauuuggggcguccuucacccugggacagauaaugaccagaucuuuuuguaugcccaggcuagcggacgaauuacugugucuaccaaacguucccaacagacaguaaucccaaacauagguucaagacccaggguucggaauauuccuagccgcaucaguauuuacuggaccaucgugaagccaggcgauauccugcuaauuaacucuacggggaaucucauagccccgagaggauacuucaaaaucagguccggcaagagcucgauuaugcggucugacgcgcccaucgguaaguguaacuccgaaugcauaacuccuaaugggucaauuccaaacgacaaacccuuucagaaugucaaccgcaucacauauggagcauguccucgauacgugaagcagaauacccugaaacuugccacuggcaugagaaacgugccagagaagcaaacaaggggcaucuucggggcuauugccggauuuaucgaaaaugguugggagggcauggucgaugggugguauggauuccggcaucagaacagugagggcauuggucaggcagcugaccugaaaagcacccaagccgcgauagaucagaucaaugggaaguugaaccgucucauuggcaaaacgaacgaaaaguuccaccagaucgagaaggaauuuuccgagguugaaggacgcauccaggaccuggagaaauacguggaggauaccaagauugacuuauggucuuauaaugccgaacugcucguagcacuugagaaccaacacacaauagaucugacugacagcgaaaugaauaaauuguucgagaagaccaaaaagcagcuaagagaaaacgcugaggauaugggcaaugggugcuuuaagaucuaccauaaaugugacaacgccugcauuggaucaaucaggaaugguacauaugaucacgacguguaccgggacgaggcucugaacaaucgauuccagauuaagggcgucgaacucaaaaguggguacaaggauuggauccuguggauauccuuugccaucagcugcuuccuucuguguguggcauugcucggauuuauuaugugggccugccagaaaggcaacauccgcuguaauauuugcaucuga

SEQ ID NO: 136739 - RNA, 1701 nt, Artificial Sequence
  derived and/or modified CDS sequence (opt3) from hemagglutinin__InfluenzaA__AFH00681
augaagaccaucauugcccugagcuacauacucugccuuguguucgcucagaaacugcccggcaacgacaauuccacagcaacuuuguguuuagggcaccaugccgucccuaacggaacgaucguuaagaccauuacaaaugaucaaaucgaggugacuaacgcgaccgaacugguacagucuucaaguacaggugagauuugcgacagcccacaccagauccuagauggcgaaaauuguacccucauagacgcucugcuuggggauccgcagugcgacggauuucaaaacaaaaagugggaucuguucaucgagagauccaaagccuauucuaauuguuaccccuaugacgugccugauuacgcaucguugaggucacucgucgccagcaguggcacucuggaauuuaacaaugaguccuucaacuggacaggugugacccagaaugggacgucuagcgcuugcauucggcgcuccaacaauucauuuuucagucgacugaacuggcucacucauuuaaaguuuaaguauccagcacugaauguuaccaugcccaacaaagagaaguucgacaaacuuuacaucuggggagugcaccauccuggcacagauaacgaccagaucuuuuuguaugcccaggcuagcggccguauuacugucucuaccaagagaucccaacagacagugauaccaaauauugggucaaggccccggguacgcaacaucccuagcagaauuaguaucuacuggaccaucguuaaaccaggagauauucugcuaauaaauucuacggguaaccucaucgccccgaggggcuacuucaagauucgguccggaaagagcucgaucaugcgcucugacgcgcccauagggaaauguaauuccgaaugcauuacuccuaacggcucaaucccaaaugacaagcccuuucagaacgugaaucgaaucacauauggugcauguccuagauacgucaaacagaacacccugaagcuggccacugggaugaggaaugugccagagaaacaaacacggggaauuuucggcgcuaucgccggcuuuauugaaaacgggugggagggaaugguggaugguugguauggcuuccgucaccagaauagugaggggauaggacaggcagcugaccuuaagagcacccaagccgcgaucgaucagauuaacggcaaauugaaucgccucaucgguaagacgaacgaaaaguuccaccagaucgagaaagaauuuuccgaggucgaagggaggauucaggaccuggagaaguacguugaggauaccaaaauagacuuauggucuuauaacgccgaacugcucguggcacuugagaaucaacauacaaucgaucugacugacagcgaaaugaacaaguuguucgagaaaaccaagaagcagcuaagagaaaaugcugaggauaugggcaacggaugcuuuaaaauuuaccacaagugugacaaugccugcaucggcucaauucggaacgggacauaugaucaugacguauaccgagacgaggcucugaauaaccgcuuccagaucaaaggaguggaacucaagagugguuacaaagauuggauacuguggaucuccuuugccauuagcugcuuccuucugugugucgcauugcucggcuuuaucaugugggccugccagaaggggaauauuagauguaacaucugcauauga

SEQ ID NO: 136740 - RNA, 1701 nt, Artificial Sequence; identical to SEQ ID NO: 129976
  derived and/or modified CDS sequence (opt3) from hemagglutinin__InfluenzaA__AFH00692

SEQ ID NO: 136741 - RNA, 1701 nt, Artificial Sequence
  derived and/or modified CDS sequence (opt3) from hemagglutinin__InfluenzaA__AFH00703
augaagaccaucauugcccugagcuacauacucugccuuguguucgcucagaaacugcccggcaacgacaauuccacagcaacuuuguguuuagggcaccaugccgucccuaacggaacgaucguuaagaccauuacaaaugaucaaaucgaggugacuaacgcgaccgaacugguacagucuucaaguacagguaaaauuugcgacagcccacaccagauccuagauggcaagaauuguacccucauagacgcucugcuuggggauccgcagugcgacggauuucaaaacaaaaagugggaucuguucguggagagauccaaggccuauucuaauuguuaccccuaugacgucccugauuacgcaucguugaggucacucguggccagcaguggcacucuggaauuuaacaaugaguccuucaacuggacagguguuacccagaaugggacgucuagcgcuugcauccggcgcuccaaaaacucauuuuucagucgacugaauuggcucacucauuuaaacuuuaaguauagcgcacugaaugugaccaugccaaacaacgaacaguucgacaaacuuuacauuuggggaguccaccaucccggcacagauaaggaccagaucuuuuuguaugcccaggcuucuggccguauuacuguguccaccaaaagaucacaacagacaguaaucccuaauauagggagcaggccacggguucgcaacauucccaguagaaucucuauuuacuggaccaucgugaagccuggagauauccugcuaauuaauuccacggguaaccucauagccccaaggggcuacuucaagaugcagagcgggaaaucgucuaucaugcgguccgacgcgccgauuggaaaguguaauucagagugcaucacucccaacggcaguauaccuaaugacaaaccauuucaaaacgucaaucgcauuacauauggugcauguccccgauacgugaagcagaacacccugaaacuugccacugggaugagaaaugugccugagaagcagacaaggggaaucuucggcgcuaucgccggcuuuauugaaaacgggugggagggaauggucgaugguugguauggcuuccggcaccaaaauagcgaagggcguggacaggcagcugaccugaaauccacccaggccgcgaucgaucagauuaacggcaaguugaaucgccucauagguaagacgaacgagaaauuccaccaaaucgagaaggaauuuucugagguugaagggaggauucaggaccuggagaaauacguggaagauaccaagaucgacuuauggagcuauaacgccgagcugcucguagcacuugagaaucagcauacaaucgaucugacugacucagaaaugaacaaauuguucgagaagaccaagaaacagcuaagagaaaaugcugaggauaugggcaacggaugcuuuaagauuuaccacaaaugugacaaugccugcauaggcaguauccggaacgggacauaugaucaugacguguaccgagacgaagcucugaauaaccgcuuccaaauuaagggagucgagcucaaauccgguuacaaggauuggauccuguggauuagcuuugccaucucuugcuuccuucuguguguggcauugcucggcuuuauaaugugggccugccagaaggggaauaucagauguaacauuugcaucuga

SEQ ID NO: 136742 - RNA, 1701 nt, Artificial Sequence
  derived and/or modified CDS sequence (opt3) from hemagglutinin__InfluenzaA__AFH00714
augaagaccaucauugcccugagcuacauauucugccucguguuugcucagaaccuucccggcaaugacaacuccacagcaacucuguguuuggggcaccaugccgucccuaauggaacguuaguuaaaaccaucacaaacgaucaaauugaggugacuaaugcgaccgaacugguacagucuucaaguacagguagaaucugcgacagcccacacaggauucuagauggcaagaacuguacccucaucgacgcucugcuuggggauccgcauugcgacggauuccagaaugagaaaugggaucuguuuguggaacgguccaaggccuucucuaacuguuaucccuacgacgucccugauuaugcaucguugcgcucacucguggccagcaguggcacucuggaguuuauaaaugaagguuucaacuggacagggguuacccaguccggaggcucuuacgcuugcaaacgaggcagcgacaaguccuuuuucucacgucugaauuggcucuaugagagugagagcaaguacccaguguuaaacgucacgaugcccaauaacgggaauuuugauaaacuguauaucuggggagugcaccauccuucuacugacaaggaacaaaccaaccuuuacguaagagcauccgguaggguuacagugucaacuaaacggagccagcagaccauuaucccaaacauuggcagucgccccugggucagaggguugucuuccggaaucagcauauacuggacaauugugaagccuggcgauauccugcuaauuaauucgaacgguaaucucaucgccccaaggggguauuucaaaauccggaccggaaagucuuccauuaugcgcucagacgcuccgauaggcacguguaguagcgagugcaucacucccaacggcuccauuccuaaugacaagccauuucagaacgugaauaaaaucacauacggggccugucccaaguaugucaaacaaaacacccugaagcuggcgacuggaaugcgaaauguuccugaaaaacagacaagagguauauucggcgcaauugccggguuuaucgagaacggaugggagggcaugguggaugguugguacggguucaggcaccaaaauucugaaggcaccggacaggcugccgaccuuaagagcacgcaggcagcuaucgaucagauuaacggcaaauugaaucggguaaucgagaagaccaacgaaaaguuccaccagauugagaaagaauuuucagagguggaggggcguauacaagaccucgaaaaguaugucgaggauacaaaaaucgaccuguggaguuacaaugccgaauuacugguggcgcucgagaaccagcauacuauugaucuuaccgacuccgaaaugaacaagcuguucgagaaaacacgcagacaguugagggagaaugccgaagauaugggaaacgguugcuuuaagaucuaucacaagugugacaaugcaugcaucggcagcauucggaacgggacuuacgaucaugacguuuaccgagacgaggcucuaaauaaccgcuuccagauaaaaggaguggaacugaagucuggcuauaaagauuggauccucuggauuucauuugccaucaguugcuuccugcuuugugucgugcuguuggguuuuauuaugugggcuugccaaaaggggaauaucagauguaacauaugcaucuga

SEQ ID NO: 136743 - RNA, 1701 nt, Artificial Sequence
  derived and/or modified CDS sequence (opt3) from hemagglutinin__InfluenzaA__AFH00725
augaagaccaucauugcccugagcuacauauucugccucaucuuugcucagaaccuucccggcaaugacaacuccacagcaacucuguguuuggggcaccaugccgugccuaauggaacguuagucaaaaccauuacaaacgaucaaaucgagguuacuaaugcgaccgaacuggugcagucuucaaguacagguagaauuugcgacagcccacacaggauccuagauggcaagaacuguacccucauagacgcucugcuuggggauccgcauugcgacggauuccagaaugagaaaugggaucuguuuguagaacgguccaaggccuucucuaacuguuaucccuacgacgugccugauuaugcaucguugcgcucacucgucgccagcaguggcacucuggaguuuaucaaugaagguuucaacuggacaggggugacccaguccggaggcucuuacgcuugcaaacgaggcagcgacaauuccuuuuucucacgucugaacuggcucuaugagagugagagcaaguacccaguuuuaaaugugacgaugcccaacaaugggaaguuugauaaacuguauauuuggggaguccaccauccuucuacugacaaggaacaaaccaaacuuuacgugagagcauccgguaggguaacaguuucaacuaagcggagccagcagaccgugaucccaaacauuggcagucgccccugggucagaggguugucuuccaggaucagcauauacuggacaauugugaaaccuggagauauccugcuaauuaacucgaccggcaaucucaucgccccacgggguuauuucaagauccgcacggggaagucuuccauuaugcgaucagacgcuccgauaggaacuuguaguagcgagugcaucacacccaacggcuccauuccuaaugacaaaccauuucagaacgugaauaagaucaccuacggcgccugucccagauaugucaaacaaaacacucugaagcuggcgacagggaugaggaauguuccugaaaaacagacccggggaauauucggugcaauugccggcuuuaucgagaacgggugggagggaaugguggauggcugguacgguuuccgucaccaaaauucugaagggacgggccaggcugccgaccuuaagagcacccaggcagcuaucgaucagauuaacggaaaauugaaucgcguaaucgagaagacaaacgaaaaguuccaccagauugagaaagaauuuucagagguggagggcagaauacaagaccucgaaaaguaugucgaggauacuaaaaucgaccuguggaguuacaaugccgaauuacugguggcgcucgagaaccagcauaccauugaucuuacagacuccgaaaugaauaagcuguucgagaaaacuaggaagcaguugcgggagaacgccgaagauauggggaacggaugcuuuaagaucuaucacaaaugugacaaugcaugcaucgguagcauucgaaacggcaccuacgaucaugacguuuaccgcgacgaggcucuaaauaacagauuccagauaaaggggguggaacugaaaucuggauauaaggauuggauccucuggauuucauuugccaucaguugcuuccugcuuugugucgugcuguugggcuuuauuaugugggcuugccaaaaagguaauaucagguguaacauaugcaucuga

SEQ ID NO: 136744 - RNA, 1701 nt, Artificial Sequence; identical to SEQ ID NO: 135114
  derived and/or modified CDS sequence (opt3) from hemagglutinin__InfluenzaA__AFH00736

SEQ ID NO: 136745 - RNA, 1701 nt, Artificial Sequence
  derived and/or modified CDS sequence (opt3) from hemagglutinin__InfluenzaA__AFH00747
augaagaccaucauugcccugagcuacauauucugccucguguuugcucagaaacuucccggcaacgacaauuccacagcaacucuguguuuggggcacuaugccgucccuaacggaacguuaguuaagaccaucacaaaugaucaaauugaggugacuaacgcgaccgaacugguacagucuucaaguacagguagaaucugcgacagcccacauaggauucuagauggcaaaaauuguacccucaucgacgcucugcuuggggauccgcacugcgacggauuccagaacgagaagugggaucuguuuguggaacgguccaaagccuacucuaauuguuaucccuacgacgucccugauuaugcaucguugcgcucacucguggccagcaguggcacucuggaguucauaaacgaagacuuuaauuggacagguguuacccaguccgggggaucuuacgcuugcaagcgaggcagcgugaaguccuucuuuucacgucugaacuggcuccaugagagugaguauaaauacccagcauuaaaugucacgaugcccaacaauggcaaguucgauaaacuguacaucuggggagugcaccauccuagcacugacagagaacaaaccaaccuuuauguaagggccucugggcggguuacaguguccacuaagcgcucacagcagaccgucauuccaaauaucgguagcagacccugggugaggggcuugaguucucggauuuccaucuacuggacaauagugaaaccuggggauauucugcuaaucaacagcaccggaaaccucauugcuccacgcggcuauuuuaagauccgaacggguaagucgucuaucaugagauccgacgccccgauugggacuuguucaagugagugcauaacacccaauggaagcaucccuaacgacaaaccauuccagaaugucaacaagauuaccuacggcgcgugucccagguauguuaaacaaaauacucugaaacuugcaacaggcaugcggaacgugccugaaaagcagacccgugggaucuuuggagccauagcugguuucauugagaauggcugggaggggaugguagauggaugguacggcuuucgccaccagaacuccgaagguacggggcaggccgcagaccugaagucuacccaagcugccaucgaucagaucaauggcaaauugaacagacucauugagaagacaaaugaaaaguuccaccagaucgagaaagaguucagcgaaguggagggaaggauucaagaccuggaaaaguaugucgaggauacuaaaauagacuuauggucauacaacgcggaacugcucguggcccuugagaaucagcauaccaucgaucugacagacagugaaaugaacaaguuguuugagaaaacucggaagcagcuacgagagaaugcagaagauaugggcaacgggugcuucaagauuuaccacaaaugugacaacgcuugcaucggauccauccgcaaugguaccuaugaucaugacguuuacagagacgaggcccugaacaauagguuucagauuaagggcguggaacucaaaagcggguauaaggauuggauacuguggaucucuuucgcuauuucaugcuuucuucugugugucguguugcucggauucaucaugugggccugccaaaaaggcaacauucgguguaauaucugcauauga

SEQ ID NO: 136746 - RNA, 1701 nt, Artificial Sequence
  derived and/or modified CDS sequence (opt3) from hemagglutinin__InfluenzaA__AFH00758
augaagaccaucauugcccugagcuacauacucugccuuguguucgcucagaaacugcccggcaacgacaauuccacagcaacuuuguguuuagggcaccaugccgucccuaacggaacgcugguuaagaccaucacaaaugaucaaauugaggugacuaacgcgaccgaacuuguacagucuucaaguacagguagaaucugcgacagcccacacaggauucucgauggcaaaaauuguacccugaucgacgcucuacugggggauccgcauugcgacggauuucagaacaaggagugggauuuguucguggaacgguccaaagccuauucuaauuguuaccccuaugacgucccugauuacgcaucgcuccgcucacugguggccagcaguggcacucuggaguuuauaaacgaagacuucaauuggacagguguugcucaguccggggagucuuaugcaugcaagcgaggaagcgugaaguccuuuuucucacgucucaacugguuacacgagagugaauacaaauauccagcccugaaugucaccaugcccaacaauggcaaguuugauaaacuuuacaucuggggcgugcaucacccuagcacggacagagagcaaacuaaguuguacguaagggcuucugggcggguuaccguguccacaaaacgcucacagcagacugucauuccaaacaucggaagcagacccugggugaggggucugaguucucggauuuccaucuauuggaccauagugaagccuggcgauauucuacucaucaauagcacagggaaccugauugccccacgcggauacuucaagauccgaaccggcaaaucgucuaucaugagauccgacgcgccgauugguacguguucaagugaaugcauaacucccaacgggagcaucccuaaugacaagccauuucagaacgucaauaggauuacauauggagcauguccccgguacguuaaacaaaacacccuuaagcuggccacuggcaugcguaaugugccugagaaacagacacgcggcaucuucggggcuauagccggauuuauugagaacgguugggaaggcaugguagaugggugguauggauucagacaccaaaauuccgagggcaccggucaggcagcugacuugaagucuacgcaggccgcgaucgaucagaucaacgggaaacucaauaggcugauugaaaagaccaacgagaaguuucaucagaucgaaaaagaguucagcgagguggaaggccggauucaagacuuagagaaguacgucgaagauacaaaaauagaccuguggucauauaaugccgagcuccuuguggcacuggaaaaccagcacacuaucgauuugaccgacagugagaugaauaagcuauucgagaaaacacgaaagcagcugcgcgaaaacgcugaggauaugggaaauggcugcuuuaagauuuaccauaaaugugacaacgccugcaucggguccaucagaaacggaacuuacgaucacgacguuuauagggacgaagcucucaauaaccgguuccagauuaaggguguggagcugaaaagcggcuacaaggauuggauacuuuggaucucuuuugccauuucaugcuuccuguugugugucgugcuccugggguuuaucaugugggcaugccaaaaaggaaauauucgcuguaacaucugcauauga

SEQ ID NO: 136747 - RNA, 1701 nt, Artificial Sequence
  derived and/or modified CDS sequence (opt3) from hemagglutinin__InfluenzaA__AFH00769
augaagaccaucauugcccugagcuacauacucugccuuguguucgcucagaaacugcccggcaacgacaauuccacagcaacuuuguguuuagggcaccaugccgucccuaacggaacgcugguuaagaccaucacaaaugaucaaauugaggugacuaacgcgaccgaacuuguacagucuucaaguacagguagaaucugcgacagcccacacaggauucucgauggcaaaaauuguacccugaucgacgcucuacugggggauccgcauugcgacggauuucagaacaaggagugggauuuguucguggaacgguccaaagccuauucuaauuguuaccccuaugacgucccugauuacgcaucgcuccgcucacugguggccagcaguggcacucuggaguuuauaaacgaagacuucaauuggacagguguugcucaguccggggagucuuauaccugcaagcgaggaagcgugaaguccuuuuucucacgucucaacugguuacacgagagugaauacaaauauccagcacugaaugucacgaugcccaacaaugauaaguuugacaaacuuuacaucuggggcgugcaucacccuagcacugauagagagcaaaccucuuuguacauuagggccuccggccggguaacaguuucaacuaagcgcagccagcagaccgugaucccaaacauugggaguagacccugggucaggggacugucuucccggaucagcauauauuggacaauugugaaaccuggugacauccuacucauuaauucgaccggcaaccugaucgcuccacgcggguacuucaagauccgaacgggaaagucuuccauuaugagaucagacgccccgauaggcacuuguaguagcgaaugcaucacacccaacgguuccauuccuaaugauaaaccauuucagaacgugaauaggaucaccuauggggcguguccccgguacgucaagcaaaacacucuuaaacuggcaacaggaaugcguaauguuccugagaagcagacccgcggcauauucggcgccauugcuggguuuaucgagaacggaugggaagguaugguggacggcugguauggguucagacaccaaaauucugagggaacgggccaggccgcagauuugaaaagcacccaggcugccaucgaccagauuaacgguaagcucaauaggcugaucgagaaaacaaacgaaaaguuucaucagauugaaaaggaguucucagagguagaagggcggauacaagauuuagagaaauacguggaagacacuaagaucgaucuguggaguuauaaugcggagcuccuugucgcccuggaaaaccagcacaccauugacuugacagauuccgagaugaauaaacuauucgagaagacucgaaaacagcugcgcgaaaacgcagaggacaugggcaauggaugcuuuaagaucuaccauaagugugauaacgcuugcaucggcagcauuagaaacgggaccuacgaccacgacguguauagggaugaagcccucaauaaccgguuccagauaaaaggaguugagcugaagucugguuacaaagacuggauccuuuggauuucauuugcuaucaguugcuuccuguugugugugguccuccugggcuuuauuaugugggccugccaaaaggggaauauccgcuguaacauaugcaucuga

SEQ ID NO: 136748 - RNA, 1701 nt, Artificial Sequence
  derived and/or modified CDS sequence (opt3) from hemagglutinin__InfluenzaA__AFH00780
augagagccaucauugcucugagcuacauacucugccuuguguucgcacagaagcugcccggcaacgacaauuccaccgccacauuguguuuagggcaccaugcggucccuaacggaacucugguuaaaacgaucaccaaugaucaaauugaggugacaaacgcuacugagcuaguacagucuucaaguaccgguaggaucugcgacagcccacaccggauucucgauggcaagaauuguacacugaucgacgcccuucugggggauccgcauugcgacggauuucagaacaaagaaugggauuuguucguggaacgcuccaaggcauauucugacuguuaccccuaugaugucccugacuacgccucgcuccgaucacugguggcuagcaguggcacccuggaguuuacuaaugaagguuucaacuggacagggguugcacaggauggaaccuccuaugccugcaaacguggcucugucaagagcuuuuucuccagacucaauugguuacacaagcuggaguacaaauauccagcucuuaacgugacgaugcccaauaacgacaaguuugauaaauuguacauauggggcgugcaucacccuucaacugacagugaccaaaccagccuguacguacaggccucugggaggguuacaguguccacuaagcggucacagcagaccgucaucccaaauauuggaagccgccccugggugagaggugugaguucuaggaucuccauuuauuggacaaucgucaaaccuggcgauauacuacucauuaacagcaccgggaaucugaucgcgccacggggauacuucaagauucgcucgggcaagucuuccaucaugcgaucagacgcaccgaucgguaacuguaacagugagugcauuacgcccaaugggagcauaccuaacgauaaaccauuucaaaauguuaacagaaucacuuauggagccugucccagguacgugaagcagaauacacuuaaacuggcuaccggcaugcggaacguaccugaaaagcagacucguggcauuuucggggccaucgcaggauuuauagagaaugguugggaaggcaugguggacgggugguauggauuccgccaccagaacuccgagggcacaggucaagcugccgauuugaaaucuacccaggcggccauuaaucagaucaacgggaagcucaauagacugaucgagaaaacgaacgaaaaguuucaucaaauugagaaggaguucagcgaagucgaaggcaggauccaggacuuagagaaauacguggaggauaccaagauugaccuguggucauauaaugcagaacuccuuguugcucuggagaaccagcacacaauagauuugacugacagugaaaugaauaaacuauucgagcggacccgaaagcagcugcgcgaaaacgccgaggauaugggaaacggcugcuuuaaaaucuaccauaagugugacaaugcuugcauuggguccaucagaaacggaacauacgaccacgauguguauagggacgaggcccucaauaaccgguuccaaaucaagggugucgaacugaaaagcggcuacaaggauuggauucuuuggauaucuuuugcaaucucaugcuuccuguugugugugguacuccugggguuuauuaugugggccugccagaaaggaaauauccgcuguaacauuugcaucuga

SEQ ID NO: 136749 - RNA, 1701 nt, Artificial Sequence
  derived and/or modified CDS sequence (opt3) from hemagglutinin__InfluenzaA__AFH00791
augaagaccaucauugcccugagcuacauacucugccuuguguucgcucagaaacugcccggcaacgacaauuccacagcaacuuuguguuuagggcaccaugccgucccuaacggaacgcugguuaagaccaucacaaaugaucaaauugaggugacuaacgcgaccgaacuuguacaggguucuucaacaggcagaaucugcgacaguccacaccagauucucgaugggaaaaauuguacccugaucgacgcucuacugggagauccgcauugcgacggcuuucagaacaaggagugggauuuguucguggaaaggagcacugccuauuccaauuguuaccccuaugacgucccugauuacgcaucucuccggucgcugguggccucaagcgguacacuggaguuuaccaaagaaggguucaacuggacgggaguugcucaagacggcacuagcuauaccugcaagcgcggcuccgugaagucuuucuucagccgacucaauugguuacacaaacuggaguacaaguauccagcacuuaacgucacaaugcccaauaacgauaaauuugacaaguuguacauauggggagugcaucacccuuccacugauucagaccagaccagucuguacguacaggccagcgggcguguuacagugucuaccaaaagaucccagcaaacggucaucccaaauauugguucaaggcccugggugcggggcgugagcagucgcaucucuauuuauuggacuaucgucaagccuggggacauacuacucauuaacuccacaggaaaucugaucgcuccaagaggcuacuucaagauuaggagcgguaaaucgucuaucaugcgguccgaugccccgaucgacaacuguaacucagagugcauuacccccaaugggaguauaccuaacgauaagccauuucagaauguuaaccgcaucacuuauggagcguguccccgauacgugaaacagaauacacuuaagcuggcaaccggcaugagaaacguaccugaaaaacagacgaggggcauuuucggggccaucgcuggauuuauagagaaugguugggaaggcaugguggacgggugguauggauuccggcaccaaaacagcgagggcaccggucaggccgcagauuugaaguccacacaggcugccauuaaucaaaucaacgggaaacucaaucgucugaucgagaagacuaacgaaaaguuucaucagauugagaaagaauuuucugaggucgaaggccgcauccaggacuuagagaaguacguggaggauaccaaaauugaccuguggagcuauaaugcggaacuccuuguugcccuggagaaccagcacacaauagauuugacugacucagaaaugaauaagcuauucgagagaaccaggaaacaacugcgggaaaacgcagaggauaugggaaacggcugcuuuaagaucuaccauaagugugacaaugcuugcauugggaguauccgaaacggaacauacgaccacgauguguaucgcgacgaggcccucaauaacagauuccagaucaaaggugucgaacugaaguccggcuacaaagauuggauucuuuggauaaguuuugcuaucucuugcuuccuguugugugugguacuccugggguuuauuaugugggccugccagaagggaaauaucagguguaacauuugcaucuga

SEQ ID NO: 136750 - RNA, 1701 nt, Artificial Sequence; identical to SEQ ID NO: 129390
  derived and/or modified CDS sequence (opt3) from hemagglutinin__InfluenzaA__AFH00802

SEQ ID NO: 136751 - RNA, 1701 nt, Artificial Sequence
  derived and/or modified CDS sequence (opt3) from hemagglutinin__InfluenzaA__AFH00813
augaagaccaucauugcccugagcuacauacucugccuuguguucgcucagaaacugcccggcaacgacaauuccacagcaacuuuguguuuagggcaccaugccgucccuaacggaacgaucguuaagaccauuacaaaugaucaaaucgaggugacuaacgcgaccgaacugguacagucuucaaguacaggugagauuugcaauagcccacaccagauccuagacggcgaaaacuguacccucauagaugcucugcuuggggacccgcagugcgauggauuucaaaauaaaaagugggaccuguucguggagagauccaaagcccauucuaacuguuaucccuacgaugucccugacuaugcaucguugaggucacucguggccagcaguggcacucuggaauuuaauaacgaguccuucaauuggacagguguuacccagaacgggacgucuagcgcuugcauccggcgcuccaauaacucauuuuucagucgacugaauuggcucacucacuuaaacuuuaaguacccagcacugaacgugaccaugcccaauaacgagcaguucgauaagcuguauauuuggggaguccaucacccuggcacagacaaagaucagaucuuuuuguacgcccaagcuagcggccguauuacugugucuaccaagagaucccagcaggccguaaucccaaauauagggucaaggccccggguucgcgacauuccuagcagagugaguaucuauuggacaauugucaaaccaggagauauccugcuaaucaacucuaccgguaaucucauugcgccgaggggcuacuucaagauacgguccgggaaaagcucgaucaugcgcucugacgcacccauuggaaaguguaacuccgccugcaucacgccuaauggcucaauaccaaacgacaagcccuuucagaaugugaaccgaauuacuuacggugcuuguccuagauaugugaaacaaaauacacugaaacuugccaccgggaugaggaacgucccagaaaaacagacucggggaaucuucggcgcaaucgcuggcuuuauugagaaugggugggaaggaaugguugaugguugguacggcuuccgucaccagaacagugaggggcgcggacaagccgcggaccuuaagagcacacaggccgcaaucgaucagauuaauggcaaauugaacagacucauagguaagaccaacgagaaauuccaucagaucgaaaaggaguuuuccgaaguggaggggaggauucaagaccuggaaaaguauguagaggauacgaaaaucgacuuauggucuuacaaugcugagcugcucguggcccuugaaaaccagcacaccaucgaucugacagacagcgagaugaauaaguuguucgaaaagacuaagaaacagcuacgggagaacgcugaagauaugggcaauggaugcuuuaagauuuaucauaagugugacaacgccugcauaggcucaauccgaaaugggaccuacgaucacgacgucuaucgcgacgaggcacugaacaauagauuccagauuaaaggaguggagcucaagagugguuacaaagauuggauccuguggauuuccuuugccaucagcugcuuccuucuguguguugcuuugcucggcuuuauaaugugggcgugccaaaaggggaacaucagguguaauauuugcaucuga

SEQ ID NO: 136752 - RNA, 1701 nt, Artificial Sequence
  derived and/or modified CDS sequence (opt3) from hemagglutinin__InfluenzaA__AFH00824
augaagaccaucauugcccugagcuacauacucagacuuguguucgcucagaaacugcccggcaacgacaauuccacagcaacuuugugcuuagggcaccaugccgucccuaacggaacgaucguuaagaccauuacaaaugaucaaaucgaggugacuaacgcgaccgaacugguacaaaauucuucaauuggugagaucuguaacaguccacaccagauacuagacggcgaaaauugcacacucaucgaugcucugcuuggggacccgcagugugauggauuucagaacaaaaagugggaccuguucguggagaggagcaaagccuauuccaauugcuaccccuaugaugucccugacuacgcaucuuugcggucgcucguggccucaagcggcacccuggaauuuaacaaugagaguuucaacuggacugguguuacacagaaugggaccuccucugcuuguauucgccgaagcaacaauuccuuuuucucacgucugaacuggcucacgcauuuaaacuuuaaguauccagcacugaaugugacuaugcccaacaaugagcaguucgauaaguuguacaucuggggaguccaccauccuggcaccgacaaagaucagauuuuucuuuaugcccaaaguagcggcagaaucacagugucuacuaagaggucccagcaggcuguaauaccaaacauugggucacggccccgcaucagagacauuccuagcaggaucaguaucuacuggaccauuguuaaaccaggagauauacugcuaaucaauucuacagguaaccucauugccccgcggggcuacuucaagauccgcuccgggaaaagcucgauaaugcgaucugacgcgcccauuggaaagugcaauuccgaauguaucaccccuaacggcucaaucccaaaugacaagcccuuucagaacgugaauagaauuacguauggugcaugcccuagguacgucaaacaaaguacucugaaacuugccacagggaugcggaacgugccagagaagcagacccguggaaucuucggcgcuauugccggcuuuauagaaaaugggugggagggaaugguggaugguugguauggcuuccgccaccagaacagcgaggggagaggacaagcagcugaccugaaguccacucaggccgcgaucgaucagauuaauggcaaauugaacaggcucaucgguaagacaaacgaaaaauuccaccagaucgagaaggaauuuucugaggucgaagggcggauucaagaccuggagaaguacguugaggauaccaaaauagacuuauggagcuauaaugccgaacugcucguggcacuugagaaccagcauacgaucgaucugaccgacucagaaaugaauaaguuguucgagaaaacaaagaaacagcuacgagaaaacgcugaggauaugggcaauggauguuuuaagauuuaccacaagugcgacaacgccuguaucggcaguauucgcaaugggacuuaugaucaugacguauacagagacgaggcucugaacaauagguuccagaucaaaggaguggaacucaaguccgguuacaaagauuggauacuguggaucagcuuugccauuucuugcuuccuucugugcgucgcauugcucggcuuuaucaugugggccugucaaaaggggaacauucggugcaauaucuguauauga

SEQ ID NO: 136753 - RNA, 1701 nt, Artificial Sequence
  derived and/or modified CDS sequence (opt3) from hemagglutinin__InfluenzaA__AFH01407
augaagaccaucauugcccugagcuacauacucugccuuguguucgcucagaaacugcccggcaacgacaauuccacagcaacuuuguguuuagggcaccaugccgucccuaacggaacgaucguuaagaccauuacaaaugaucaaaucgaggugacuaacgcgaccgaacugguacagucuucaaguacagguggcauuugcaauagcccacaccagauccuagacggggagaacuguacccucauagaugcucugcuuggagacccgcagugcgauggcuuucaaaauaaaaagugggaccuguucguggaaagauccaaagccuauucuaacuguuaccccuaugaugucccugacuacgcaucguugaggucacucguggccagcagugguacucuggaguuuaauaacgaauccuucaauuggacagggguuacccagaacggaacgucuagcgcuugcaagcggcgcuccaauaagucauuuuucagucgacugaacuggcucacucauuuaaaauauaaguacccagcacugaaugugaccaugcccaacaacgagaaauuugauaaacuuuauaucuggggcguccaccauccuggcacagacagcgaucagauuucuuuguacgcccaggcuuccgggcguaucacugugucaaccaagagaagccaacagacaguaauuccaaauaucggaaguaggccccggguucgcgacauaucuuccagaauuagcaucuacuggaccauugugaagccuggugauauccugcuaaucaacucgacgggcaaucucauugccccaaggggguauuucaagauacggucuggaaaauccucaaucaugcgcagugacgcgccgauuggcaaguguaacagcgagugcaucacucccaaugguuccauaccuaacgacaaaccauuucagaaugucaaccgaauuacauacggggcaugucccagauaugugaagcagaauacccugaaacuugccacuggaaugaggaacgugccugaaaagcaaacacggggcaucuucggcgcuaucgccggguuuauugagaauggaugggaagguauggucgauggcugguacggguuccgucaccagaacucugagggaaccggccaggcagcugaccugaaaagcacgcaagccgcgaucaaucagauuaacgguaaguugaaucgccucauagggaagaccaacgagaaauuucaccagaucgaaaaggaguucucagaaguugagggcaggauucaggaucuggaaaaauauguggaggacacaaagaucgauuuauggaguuacaacgccgagcugcucguagcacuugaaaaucaacauacuaucgaccugaccgauuccgagaugaacaaauuguucgaaagaacaaagaagcagcuacgggagaaugcugaagacaugggaaacggcugcuuuaaaauuuaucacaagugugauaaugccugcauagagagcauccgaaacgggacuuacgaccaugauguguaccgcgacgaggcucugaauaacagauuccagauuaaaggagucgaacucaagucugguuauaaagacuggauccuguggauuucauuugccaucaguugcuuccuucuguguguggcauugcucggcuuuauaaugugggccugccagaaggggaauaucagguguaacauuugcaucuga

SEQ ID NO: 136754 - RNA, 1701 nt, Artificial Sequence
  derived and/or modified CDS sequence (opt3) from hemagglutinin__InfluenzaA__AFH34940
augaagaccaucauugcccugagcuacauacucugccuuguguucgcucagaaacugcccggcaacgacaauuccacagcaacuuuguguuuagggcaccaugccgucccuaacggaacgaucguuaagaccauuacaaaugaucaaaucgaggugacuaacgcgaccgaacugguacagucuucaaguacaggugagauuugcgacagcccacaccagauccuagauggcgaaaauuguacccucauagacgcucugcuuggggauccgcagugcgacggauuucaaaacaaaaagugggaucuguucguggagagauccaaagccuauucuaauuguuaccccuaugacgucccugauuacgcaucguugaggucacucguggccagcaguggcacucuggaauuuaacaaugaguccuucaacuggacagguguuacccagaaugggacgucuagcgcuugcauccggcgcuccaacucaaguuucuuuagccgacugaauuggcucacucauuuaaacuuuaaguauccagcacugaaugugaccaugcccaacaacgagcaguucgacaagcuguacauuuggggaguccaccauccuggcacagauaaagaccagaucuuuuuguaugcccaaucuuccggccguauuacugugucaaccaagagaagccagcaggcuguaaucccaaauauagggaguaggccccggauucgcaacaucccuucuagaauuuccaucuacuggacaaucguuaaaccaggagauauucugcuaauaaauagcaccgguaaccucaucgccccgaggggcuacuucaagauucggucggggaaaucuuccaucaugcgcucagacgcgcccauaggaaaguguaauagugaaugcauuacgccuaacggcagcaucccaaaugacaagcccuuucagaacgugaaucgaaucacuuauggugcauguccuagauacgucaaacaauccacacugaaacuugccaccgggaugaggaacgugccagagaagcagacucggggaauuuucggcgcuaucgccggcuuuauugaaaaugggugggagggaaugguggaugguugguauggcuuccgucaccagaacucugaggggcgcggacaagcagcugaccuuaagagcacacaggccgcgauagaucagaucaauggcaaauugaacagacucauugguaagaccaaugaaaaauuccaccagaucgagaaggaauuuucagaggucgaagggaggauccaagaccuggagaaguacguugaggauacgaaaauugacuuauggaguuauaacgccgaacugcucguggcacuugagaaccagcauaccauagaucugacaggcuccgaaaugaauaaguuguucgagaaaacuaagaaacagcuacgggaaaacgcugaggacaugggaaauggcugcuuuaagaucuaccacaagugugauaacgccugcauugggagcauccgaaauggaaccuauaaccaugacguauaccgcgaugaggcucugaauaacagauuccagauuaaagguguggaacucaagucuggcuacaaagacuggauccuguggauaucauuugccaucaguugcuuccuucugugugucgcauugcucggguuuauuaugugggccugccaaaagggaaauaucagguguaacauuugcaucuga

SEQ ID NO: 136755 - RNA, 1701 nt, Artificial Sequence
  derived and/or modified CDS sequence (opt3) from hemagglutinin__InfluenzaA__AFH34961
augaagaccaucauugcccugagcuacauacucugccuuguguucgcucagaaacugcccggcaacgacaauuccacagcaacuuuguguuuagggcaccaugccgucccuaacggaacgaucguuaagaccauuacaaaugaucaaaucgaggugacuaacgcgaccgaacugguacagucuucaaguacaggugagauuugcgacagcccacaccagauccuagauggcgaaaauuguacccucauagacgcucugcuuggggauccgcagugcgacggauuucaaaacaaaaagugggaucuguucguggagagauccaaagccuauucuaauuguuaccccuaugacgucccugauuacgcaucguugaggucacucguggccgcuagcggcacucuggaauuuaacaaugagaguuucaacuggacagguguuacccagaaugggacguccucugcaugcauccggcgcagcaacuccucauuuuucagucgacugaauuggcucacucauuuaaacuuuaaguauccagcccugaaugugaccaugcccaacaacgagcaguucgacaaacuuuacauuuggggaguccaccauccuggcacagauaaggaccagaucuuuuuguaugcucaaagcucuggccguauuacuguguccaccaagagaucacagcaggccguaaucccaaauauagggagcaggccccggauucgcaacaucccuaguagaauuucuaucuacuggacaaucguuaaaccaggagauauucugcuaauaaauuccaccgguaaccucaucgcgccgaggggcuacuucaagauucggagcgggaaaucgucuaucaugcgcuccgacgcacccauaggaaaguguaauucagaaugcauuacgccuaacggcaguaucccaaaugacaagcccuuucagaacgugaaucgaaucacuuauggugccuguccuagauacgucaaacaaagcacacugaaacuugcuaccgggaugaggaacgugccagagaagcagacucggggaauuuucggcgccaucgcaggcuuuauugaaaaugggugggagggaaugguggaugguugguauggcuuccgucaccagaacuccgaggggcgcggacaagcugccgaccugaagucuacacaggcggccauagaucagaucaauggcaaauugaacagacucauugguaagaccaaugaaaaauuccaccagaucgagaaggaauuuagcgaggucgaagggaggauccaagaccuggagaaguacguugaggauacgaaaauugacuuauggucauauaacgcagaacugcucguggcucuugagaaccagcauaccauagaucugacagacagugaaaugaauaaguuguucgagaaaacuaagaaacagcuacgggaaaacgccgaggauaugggcaauggaugcuuuaagaucuaccacaagugugacaacgcuugcauuggcuccauccgaaaugggaccuauaaccaugauguauaccgcgacgaggcccugaauaacagauuccagauuaaaggaguggaacucaagagcgguuacaaagacuggauccuguggauaucuuuugcaaucucaugcuuccuucugugugucgccuugcucggcuuuauuaugugggcuugccaaaaggggaauaucagguguaacauuugcaucuga

SEQ ID NO: 136756 - RNA, 1701 nt, Artificial Sequence
  derived and/or modified CDS sequence (opt3) from hemagglutinin__InfluenzaA__AFH34968
augaagaccaucauugcccugagcuacauacucugccuuguguucgcucagaaacugcccggcaacgacaauuccacagcaacuuuguguuuagggcaccaugccgucccuaacggaacgaucguuaagaccauuacaaaugaucaaaucgaggugacuaacgcgaccgaacugguacagucuucaaguacaggugagauuugcgacagcccacaccagauccuagauggcgaaaauuguacccucauagacgcucugcuuggggauccgcagugcgacggauuucaaaacaaaaagugggaucuguucguggagagauccaaagccuauucuaauuguuaccccuaugacgucccugauuacgcaucguugaggucacucguggccgcuagcggcacucuggaauuuaacaaugagaguuucaacuggacagguguuacccagaaugggacguccucugcaugcauccggcgcagcaacuccucauuuuucagucgacugaauuggcucacucauuuaaacuuuaaguauccagcccugaaugugaccaugcccaacaacgagcaguucgacaaacuuuacauuuggggaguccaccauccuggcacagauaaagaccagaucuuuuuguaugcucaaagcucuggccguauuacuguguccaccaagagaucacagcaggccguaaucccaaauauagggagcaggccccggauucgcgauaucccuaguagaauuucuaucuacuggacaaucguuaaaccaggagacauucugcuaauaaacuccaccgguaaucucaucgcgccgaggggcuacuucaagauucggagcgggaaaucgucuaucaugcgcuccgacgcacccauaggaaaguguaacucagccugcauuacgccuaauggcaguaucccaaacgauaagcccuuucagaaugugaaccgaaucacuuauggugcuuguccuagauacgucaaacaaagcacacugaaacuugccaccgggaugaggaaugugccagaaaagcagacucggggaauuuucggcgcaaucgcuggcuuuauugagaacgggugggaaggaaugguggacgguugguauggcuuccgucaccaaaauuccgaggggcgcggacaggccgcggaucugaagucuacacaggccgcaauagaccagaucaacggcaaauugaauagacucauugguaagaccaacgagaaauuccaccagaucgaaaaggaguuuagcgaagucgaggggaggauccaagaucuggaaaaguacguugaggacacgaaaauugauuuauggucauauaaugcugagcugcucguggcccuugaaaaccagcauaccauagaccugacagauagugagaugaacaaguuguucgaaaagacuaagaaacagcuacgggagaaugcugaagacaugggcaacggaugcuuuaagaucuaccacaagugugauaaugccugcauuggcuccauccgaaacgggaccuauaaucaugacguauaccgcgacgaggcacugaacaauagauuccagauuaaaggaguggagcucaagagcgguuacaaagauuggauccuguggauaucuuuugccaucucaugcuuccuucugugugucgcuuugcucggcuuuauuaugugggcgugccaaaaggggaacaucagguguaauauuugcaucuga

SEQ ID NO: 136757 - RNA, 1701 nt, Artificial Sequence
  derived and/or modified CDS sequence (opt3) from hemagglutinin__InfluenzaA__AFH34975
augaagaccaucauugcccugagcuacauacucugccuuguguucgcucagaaacugcccggcaacgacaauuccacagcaacuuuguguuuagggcaccaugccgucccuaacggaacgaucguuaagaccauuacaaaugauagaaucgaggugacuaacgcgaccgaacugguacaaaauucuucaauuggugagaucugcgacaguccacaccagauacuagauggcgaaaacuguacacucaucgacgcucugcuuggggauccgcagugcgacggauuucagaauaaaaagugggaucuguucguggagaggagcaaagccuauuccaacuguuaccccuaugacgucccugauuacgcaucuuugcggucgcucguggccucaagcggcacccuggaauuuaauaacgagaguuucaauuggaacgguguuacucaaaaugggacauccucugcuugcauucgccgaagcaacaauuccuuuuucucacgucugaacuggcucacccauuuaaacuuuaaguauccagcacugaaugugacgaugcccaacaaugagcaguucgacaaguuguacaucuggggaguccaccauccuggcacugauaaagaccagauuuuucuuuaugcccagccaaguggcagaaucaccgugagcacaaagaggucucaacaggcuguaauacccaacauugggucccggccucgcaucagaaauauuccaucaaggaucagcaucuacuggacuauuguuaaaccgggagauauacugcuaaucaacaguaccgguaaucucauugcgccccggggcuacuucaagauccgcucugggaaauccagcauaaugcgaucggacgccccuauuggaaaguguaagucugaaugcaucacaccaaacggcuccauccccaaugacaaaccuuuucagaacgugaauagaauuaccuauggugcauguccaagguacgucaagcagucaacgcugaaacuugccacugggaugcggaacgugcccgagaagcaaacacguggaaucuucggcgcuauugccggcuuuauagaaaaugggugggagggaaugguggaugguugguauggcuuccgccaccagaacagugaggggagaggacaggcagcugaccugaaaagcacccaagccgcgaucgaucagauuaauggcaaguugaacaggcucaucgguaaaacuaacgaaaaguuccaccagaucgagaaggaauuuuccgaggucgaagggcggauucaggaccuggagaaauacguugaggauacaaagauagacuuauggucuuauaaugccgaacugcucguggcacuugagaaccaacauaccaucgaucugacggacagcgaaaugaauaaauuguucgagaagaccaaaaagcagcuacgagaaaacgcugaggauaugggcaauggaugcuuuaagauuuaccacaaaugugacaacgccugcaucggcucaauucgcaaugggacauaugaucaugacguauacagagacgaggcucugaacaauagguuccagaucaagggaguggaacucaaaagugguuacaaggauuggauacuguggaucuccuuugccauuagcugcuuccuucugugugucgcauugcucggcuuuaucaugugggccugccagaaagggaacauucgguguaauaucugcauauga

SEQ ID NO: 136758 - RNA, 1701 nt, Artificial Sequence; identical to SEQ ID NO: 131459
  derived and/or modified CDS sequence (opt3) from hemagglutinin__InfluenzaA__AFH74464

SEQ ID NO: 136759 - RNA, 1701 nt, Artificial Sequence; identical to SEQ ID NO: 130717
  derived and/or modified CDS sequence (opt3) from hemagglutinin__InfluenzaA__AFH74465

SEQ ID NO: 136760 - RNA, 1701 nt, Artificial Sequence; identical to SEQ ID NO: 131478
  derived and/or modified CDS sequence (opt3) from hemagglutinin__InfluenzaA__AFH74477

SEQ ID NO: 136761 - RNA, 1701 nt, Artificial Sequence
  derived and/or modified CDS sequence (opt3) from hemagglutinin__InfluenzaA__AFH74488
augaagaccaucauugcccugagcuacauacucugccuuguguucgcucagaaacugcccggcaacgacaauuccacagcaacuuuguguuuagggcaccaugccgucccuaacggaacgaucguuaagaccauuacaaaugaucaaaucgaggugacuaacgcgaccgaacugguacagucuucaaguacaggugagauuugcgacaauccacaccagauccuagauggcaaaaacuguacccucauagacgcucugcuuggggauccgcagugcgacggauuucaaaauaagaaaugggaucuguucguggaaagaagcaaggccuauuccaacuguuaccccuaugacgucccugauuacgcaucuuugaggucgcucguggccucaagcggcacucuggaguuuaauaacgaaaguuucaauuggacagguguuacccagaacgggacguccucugcuugcauccggcgcagcaaaaauuccuuuuucucacgacugaacuggcucacucauuuaaauuuuaaguauccagcacugaacgugaccaugcccaacaaugagcaguucgacaaacuuuacauuuggggaguccaccauccuggcacagauaaggaccagaucuuuuuguaugcccaagcuaguggccguauuacugugagcaccaagagaucucagcagacaguaaucccaaacauaggguccaggccccggguucgcaauauuccuucaagaaucagcauuuacuggaccaucgugaaaccaggagauauccugcuaauuaacaguacggguaaucucauagccccgaggggcuacuucaagauccggucugggaaguccagcauuaugcgcucggacgcgcccaucggaaaauguaacucugagugcauaacuccuaauggcuccauuccaaacgacaagcccuuucagaaugucaaccgaaucacauauggugcauguccuagauacgugaaacaaaauacccugaaacuugccacugggaugaggaacgugccagaaaagcagacacggggaaucuucggcgcuauugccggcuuuaucgagaaugggugggaaggaauggucgaugguugguauggcuuccgucaccagaacucagaggggcgcggacaagcagcugaccugaagaguacccaggccgcgauugaucagauaaauggcaaauugaacagacucaucgguaagacgaacgagaaguuccaccagauugaaaaagaguuuagcgaaguugaggggaggauccaagaccuggaaaaguacguggaggauaccaaaaucgacuuaugguccuauaaugccgagcugcucguagcacuugaaaaccagcauacaauugaucugacugacucugagaugaauaaguuguucgaacggaccaaaaagcagcuacgagagaacgcugaagauaugggcaauggaugcuuuaagauauaccacaaaugugacaacgccugcaucggcagcauucgcaaugggacauaugaucaugacguguacagagacgaggcucugaacaauagguuccagaucaagggagucgagcucaaaucagguuacaaggauuggauucuguggaucaguuuugccauauccugcuuccuucuguguguggcauugcucggcuuuaucaugugggccugccaaaaagggaacauucgguguaauaucugcauuuga

SEQ ID NO: 136762 - RNA, 1701 nt, Artificial Sequence; identical to SEQ ID NO: 131459
  derived and/or modified CDS sequence (opt3) from hemagglutinin__InfluenzaA__AFH74499

SEQ ID NO: 136763 - RNA, 1701 nt, Artificial Sequence; identical to SEQ ID NO: 131661
  derived and/or modified CDS sequence (opt3) from hemagglutinin__InfluenzaA__AFH74510

SEQ ID NO: 136764 - RNA, 1701 nt, Artificial Sequence
  derived and/or modified CDS sequence (opt3) from hemagglutinin__InfluenzaA__AFH74521
augaagaccaucauugcccugagcuacauacucugccuuguguucgcucagaaaauccccggcaacgacaauuccacagcaacucuguguuuggggcaccaugccgucccuaacggaacgauuguuaagaccaucacaaaugaucaaauugaggugacuaacgcgaccgaauuaguacagucuucaaguacaggugagaucugcaauagcccacaccagauacuggacggcgaaaacuguacccuaaucgaugcucuccugggggacccgcagugcgauggauuucaaaauaaaaagugggaccuuuucguggagagauccaaagccuauucuaacuguuaccccuaugaugucccugacuacgcaucgcugaggucauugguggccagcaguggcacucucgaauuuaauaacgaguccuucaauuggacagguguuacccagaacgggacgucuagcgcuugcauucggcgcuccaauaacucauuuuucagucgacugaauuggcugacucauagcaagucuaaguauccagcacucaacgugaccaugcccaacaaugagcaguuugauaaauuauacaucuggggaguccaccauccuggcacagacaacgaucagauuuuccuguaugcccaggcuuccggccguaucacugugucaaccaagagaagccaacagacaguaauaccaaauauugggaguaggccccggauccgcgacauuccuucuagaaucuccaucuacuggaccauuguuaaaccaggagauauacuuuugaucaacagcacggguaaucugauugccccgaggggcuacuuuaagauccggucggggaaaucuuccauaaugaagucagacgcgcccauuggaaaguguaacagugaaugcaucacuccuaauggcagcaucccaaacgacaaacccuuccagaaugugaaccgcauuacauauggugcauguccucgauacgucaagcaaaauacccuaaaacucgccacugggaugagaaacgugccagagaagcagacaaggggaaucuuuggcgcuauugccggcuucauagaaaaugggugggagggaaugguggaugguugguauggcuuucggcaccagaacuccgaggggcguggacaagcagcugaccugaaaucuacccaggccgcgaucgaucagauuaauggcaaacuuaaccgccugaucgguaagacgaacgaaaaguuccaccagaucgagaaggaguucagcgaagucgaagggaggauucaagacuuggagaaauacguugaggauaccaagguggaccucuggucauauaaugccgaacuguuaguagcacuggagaaccagcauacaauagaucucacugacagugaaaugaauaaacuuuuugagaagaccaaaaagcagcugagagaaaacgcugaggauaugggcaauggaugcuucaagaucuaccacaaaugugacaacgccugcauuggcuccauccggaaugggacauaugaucaugacguguaccgagacgaggcuuugaacaaucgcuuucagauuaagggagucgaacuaaaaagcgguuacaaggauuggauccuguggauaucuuucgccaucucaugcuuucuccuguguguggcacuucugggcuucauuaugugggccugccaaaaagggaacaucagauguaauauuugcaucuga

SEQ ID NO: 136765 - RNA, 1701 nt, Artificial Sequence; identical to SEQ ID NO: 135036
  derived and/or modified CDS sequence (opt3) from hemagglutinin__InfluenzaA__AFH74532

SEQ ID NO: 136766 - RNA, 1701 nt, Artificial Sequence; identical to SEQ ID NO: 131661
  derived and/or modified CDS sequence (opt3) from hemagglutinin__InfluenzaA__AFH74543

SEQ ID NO: 136767 - RNA, 1701 nt, Artificial Sequence; identical to SEQ ID NO: 131661
  derived and/or modified CDS sequence (opt3) from hemagglutinin__InfluenzaA__AFH74554

SEQ ID NO: 136768 - RNA, 1701 nt, Artificial Sequence; identical to SEQ ID NO: 131661
  derived and/or modified CDS sequence (opt3) from hemagglutinin__InfluenzaA__AFH74565

SEQ ID NO: 136769 - RNA, 1701 nt, Artificial Sequence; identical to SEQ ID NO: 131661
  derived and/or modified CDS sequence (opt3) from hemagglutinin__InfluenzaA__AFH74576

SEQ ID NO: 136770 - RNA, 1701 nt, Artificial Sequence; identical to SEQ ID NO: 131661
  derived and/or modified CDS sequence (opt3) from hemagglutinin__InfluenzaA__AFH74587

SEQ ID NO: 136771 - RNA, 1701 nt, Artificial Sequence
  derived and/or modified CDS sequence (opt3) from hemagglutinin__InfluenzaA__AFH74598
augaagaccaucauugcccugagcuacauacucugccuuguguucgcucagaaacugcccgagaacgacaauuccacagcaacuuuguguuuaggccaccaugccgucccuaacgggacgaucguuaagaccauuacaaaugaucaaaucgaagugacuaacgcgaccgagcugguacagucuucaaguacaggagaaauuugcgacagcccacaccagauccuagaugguaaaaauuguacccucauagacgcucugcuuggcgauccgcagugcgacggguuucaaaacaagaaaugggaucuguucguggagagauccaaggccuauucuaauuguuaccccuaugacgucccugauuacgcaucguugaggucacucguggccagcaguggaacucuggaauuuaacaaugaguccuucaacuggacaggcguuacccagaaugguacgucuagcgcuugcauccggcgcuccaagaacucauuuuucagucgacugaauuggcucacucauuuaaacuuuaaauauccagcacugaaugugaccaugcccaacaacgagcaguucgacaagcuguacauuuggggaguccaccauccugggacagauaaagaccagaucuuuuuguaugcccaagcuagcggccguauuacugugucuaccaagagaucccagcagacagccaucccaaauauaggcucaaggccccggguacgcaacauuccuagcagaaucaguauuuacuggaccaucguuaaaccaggggauauccugcuaauuaauucuacgggaaaccucauagcgccgagggguuacuucaagauccgguccggcaagagcucgauuaugcgcucugacgcacccaucgggaaauguaauuccgaaugcauaacuccuaacggaucaauuccaaaugacaagcccuuucagaacgugaaucgaaucacauauggcgccuguccuagauacgucaaacaaaacacccugaaacuugcuacugguaugaggaaugugccagagaagcagacacgggggaucuucggagccauugcaggcuuuaucgaaaacggcugggaggggaugguggauggaugguaugguuuccgucaccagaauagugagggccgcgggcaagcugccgaccuuaagagcacccaggcggccauugaucagauaaacggaaaauugaauagacucaucggcaagacgaacgaaaaguuccaccagauugagaaagaauuuuccgaggucgaagguaggauccaagaccuggagaaguacguugaggauaccaaaaucgacuuauggucuuauaacgcagaacugcucguggcucuugagaaucagcauacaauugaucugacugacagcgaaaugaacaaguuguucgagaaaaccaagaagcagcuacgggaaaaugccgaggauauggggaacggcugcuuuaaaauauaccacaagugugacaaugcuugcaucggaucaauucgaaacggcacauaugaucaugacguauaccgcgacgaggcccugaauaacagauuccagaucaaagggguggaacucaagaguggauacaaagauuggauucuguggaucuccuuugcaauaagcugcuuccuucugugugucgccuugcucgguuuuaucaugugggcuugccaaaagggcaauauuagguguaacaucugcauuuga

SEQ ID NO: 136772 - RNA, 1701 nt, Artificial Sequence; identical to SEQ ID NO: 131459
  derived and/or modified CDS sequence (opt3) from hemagglutinin__InfluenzaA__AFH74609

SEQ ID NO: 136773 - RNA, 1701 nt, Artificial Sequence; identical to SEQ ID NO: 131661
  derived and/or modified CDS sequence (opt3) from hemagglutinin__InfluenzaA__AFH74620

SEQ ID NO: 136774 - RNA, 1701 nt, Artificial Sequence
  derived and/or modified CDS sequence (opt3) from hemagglutinin__InfluenzaA__AFH74631
augaagaccaucauugcccugagcuacauacucugccuuguguucgcucagaaacugcccggcaacgacaauuccacagcaacuuuguguuuagggcaccaugccgucccuaacggaacgaucguuaagaccauuacaaaugaucaaaucgaggugacuaacgcgaccgaacugguacagucuucaaguacaggugagauuugcgacagcccacaccagauccuagauggcaccaauuguacucucauagacgcucugcuuggggauccgcagugcgacggauuucaaaacaaaaagugggaucuguucguggaaagauccaaagccuauucuaauuguuaccccuaugacgucccugauuacgcaucguugaggucacucguggccagcaguggcacacuggaguuuaacaaugaauccuucaacuggaccgguguuacgcagaaugggacuucuagcgcuugcauccggcgcuccaagaacucauuuuucagucgacugaauuggcucacccauuuaaacuuuaaguauccagcacugaaugugacaaugcccaacaacgagcaguucgacaaacuuuacauuuggggaguccaccauccuggcacugauaaggaccagaucuuuuuguaugcccaagcuagcggccguauuaccgugucuacaaaaagaucccagcagaccgccaucccaaauauagggucaaggccccggguacgcaacauuccuagcagaaucaguauuuacuggacgaucguuaagccaggagauauccugcuaauuaauucuacugguaaccucauagcgccgaggggcuacuucaaaauccgguccgggaaaagcucgauuaugcgcucugacgcacccaucggaaaguguaauuccgagugcauaacaccuaacggcucaauuccaaaugacaaacccuuucagaacgugaaucgaaucaccuauggugccuguccuagauacgucaagcaaaacacucugaaacuugcuacagggaugaggaaugugccagaaaagcagacccggggaaucuucggcgccauugcaggcuuuaucgagaacgggugggaaggaaugguggaugguugguauggcuuccgucaccagaauagugaggggcgcggacaagcugccgaccugaaaagcacgcaggcggccauugaucagauaaacggcaaguugaauagacucaucgguaaaaccaacgagaaguuccaccagauugaaaaggaguuuuccgaagucgaggggaggauccaagaccuggaaaaauacguugaggauacaaagaucgacuuauggucuuauaacgcagagcugcucguggcucuugaaaaucagcauacuauugaucugaccgacagcgagaugaacaaauuguucgaaaagacaaagaagcagcuacgggagaaugccgaagauaugggcaacggaugcuuuaagauauaccacaaaugugacaaugcuugcaucggcucaauucgaaacgggacuuaugaucaugacguauaccgcgacgaggcccugaauaacagauuccagaucaagggaguggagcucaaaagugguuacaaggauuggauucuguggaucuccuuugcaauaagcugcuuccuucugugugucgccuugcucggcuuuaucaugugggcuugccaaaaagggaauauuagguguaacaucugcauuuga

SEQ ID NO: 136775 - RNA, 1701 nt, Artificial Sequence; identical to SEQ ID NO: 131459
  derived and/or modified CDS sequence (opt3) from hemagglutinin__InfluenzaA__AFH74642

SEQ ID NO: 136776 - RNA, 1701 nt, Artificial Sequence; identical to SEQ ID NO: 131459
  derived and/or modified CDS sequence (opt3) from hemagglutinin__InfluenzaA__AFH74653

SEQ ID NO: 136777 - RNA, 1701 nt, Artificial Sequence; identical to SEQ ID NO: 131459
  derived and/or modified CDS sequence (opt3) from hemagglutinin__InfluenzaA__AFH74664

SEQ ID NO: 136778 - RNA, 1701 nt, Artificial Sequence; identical to SEQ ID NO: 131459
  derived and/or modified CDS sequence (opt3) from hemagglutinin__InfluenzaA__AFH74675

SEQ ID NO: 136779 - RNA, 1701 nt, Artificial Sequence; identical to SEQ ID NO: 136207
  derived and/or modified CDS sequence (opt3) from hemagglutinin__InfluenzaA__AFH74686

SEQ ID NO: 136780 - RNA, 1701 nt, Artificial Sequence; identical to SEQ ID NO: 136207
  derived and/or modified CDS sequence (opt3) from hemagglutinin__InfluenzaA__AFH74697

SEQ ID NO: 136781 - RNA, 1701 nt, Artificial Sequence; identical to SEQ ID NO: 131661
  derived and/or modified CDS sequence (opt3) from hemagglutinin__InfluenzaA__AFH74708

SEQ ID NO: 136782 - RNA, 1701 nt, Artificial Sequence; identical to SEQ ID NO: 131661
  derived and/or modified CDS sequence (opt3) from hemagglutinin__InfluenzaA__AFH74719

SEQ ID NO: 136783 - RNA, 1701 nt, Artificial Sequence; identical to SEQ ID NO: 131661
  derived and/or modified CDS sequence (opt3) from hemagglutinin__InfluenzaA__AFH74730

SEQ ID NO: 136784 - RNA, 1701 nt, Artificial Sequence
  derived and/or modified CDS sequence (opt3) from hemagglutinin__InfluenzaA__AFH74741
augaagaccaucauugcccugagcuacauacucugccuuguguucgcucagaaacugcccggcaacgacaauuccacagcaacuuuguguuuagggcaccaugccgucccuaacggaacgaucguuaagaccauuacaaaugaucaaaucgaggugacuaacgcgaccgaacugguacaaaauucuucaacaggugagauuugcgacaguccacaccagauccuagauggcaaaaacuguacccucauagacgcucugcuuggggauccgcagugcgacggauuucagaauaagaaaugggaucuguucguggaaagaagcaaggccuauuccaacuguuaccccuaugacgucccugauuacgcaucuuugaggucgcucguggccucaagcggcacucuggaguuuaauaacgaaaguuucaauuggacagguguuacccagaacgggacguccucugcuugcauccggcgcagcaaaaauuccuuuuucucacgacugaacuggcucacucauuuaaauuuuaaauauccagcacugaacgugaccaugcccaacaaugagcaguucgacaaacuuuacauuuggggaguccaccauccuggcacagauaaggaccagaucuuuuuguaugcccaagcuaguggccguauuacugugagcaccaagagaucucagcagacagccaucccaaacauaggguccaggccccggguacgcaauauuccuucaagaaucagcauuuacuggaccaucguuaaaccaggagauauccugcuaauuaacaguacggguaaucucauagcgccgaggggcuacuucaagauccggucugggaaguccagcauuaugcgcucggacgcacccaucggaaaauguaacucugagugcauaacuccuaauggcuccauuccaaacgacaagcccuuucagaaugugaaccgaaucacauauggugccuguccuagauacgucaaacaaaauacccugaaacuugcuacugggaugaggaacgugccagaaaagcagacacggggaaucuucggcgccauugcaggcuuuaucgagaaugggugggaaggaaugguggaugguugguauggcuuccgucaccagaacucagaggggcgcggacaagcugccgaccugaagaguacccaggcggccauugaucagauaaauggcaaauugaacagacucaucgguaagacgaacgagaaguuccaccagauugaaaaagaguuuagcgaagucgaggggaggauccaagaccuggaaaaguacguugaggauaccaaaaucgacuuaugguccuauaaugcagagcugcucguggcucuugaaaaccagcauacaauugaucugacugacucugagaugaauaaguuguucgaaaagaccaagaagcagcuacgggagaacgccgaagauaugggcaauggaugcuuuaaaauauaccacaagugugacaacgcuugcaucggcagcauucgaaaugggacauaugaucaugacguauaccgcgacgaggcccugaacaauagauuccagaucaaaggaguggagcucaagucagguuacaaagauuggauucuguggaucaguuuugcaauauccugcuuccuucugugugucgccuugcucggcuuuaucaugugggcuugccaaaaggggaacauuagguguaauaucugcauuuga

SEQ ID NO: 136785 - RNA, 1701 nt, Artificial Sequence; identical to SEQ ID NO: 131661
  derived and/or modified CDS sequence (opt3) from hemagglutinin__InfluenzaA__AFH74752

SEQ ID NO: 136786 - RNA, 1701 nt, Artificial Sequence; identical to SEQ ID NO: 131661
  derived and/or modified CDS sequence (opt3) from hemagglutinin__InfluenzaA__AFH74763

SEQ ID NO: 136787 - RNA, 1701 nt, Artificial Sequence; identical to SEQ ID NO: 131661
  derived and/or modified CDS sequence (opt3) from hemagglutinin__InfluenzaA__AFH74774

SEQ ID NO: 136788 - RNA, 1701 nt, Artificial Sequence; identical to SEQ ID NO: 135036
  derived and/or modified CDS sequence (opt3) from hemagglutinin__InfluenzaA__AFH74785

SEQ ID NO: 136789 - RNA, 1701 nt, Artificial Sequence; identical to SEQ ID NO: 131661
  derived and/or modified CDS sequence (opt3) from hemagglutinin__InfluenzaA__AFH74796

SEQ ID NO: 136790 - RNA, 1701 nt, Artificial Sequence; identical to SEQ ID NO: 136217
  derived and/or modified CDS sequence (opt3) from hemagglutinin__InfluenzaA__AFH74807

SEQ ID NO: 136791 - RNA, 1701 nt, Artificial Sequence; identical to SEQ ID NO: 136217
  derived and/or modified CDS sequence (opt3) from hemagglutinin__InfluenzaA__AFH74818

SEQ ID NO: 136792 - RNA, 1701 nt, Artificial Sequence; identical to SEQ ID NO: 136217
  derived and/or modified CDS sequence (opt3) from hemagglutinin__InfluenzaA__AFH74829

SEQ ID NO: 136793 - RNA, 1701 nt, Artificial Sequence; identical to SEQ ID NO: 136217
  derived and/or modified CDS sequence (opt3) from hemagglutinin__InfluenzaA__AFH74840

SEQ ID NO: 136794 - RNA, 1701 nt, Artificial Sequence
  derived and/or modified CDS sequence (opt3) from hemagglutinin__InfluenzaA__AFH74851
augaagaccaucauugcccugagcuacauacucugccuuguguucgcucagaaacugcccggcaacgacaauuccacagcaacuuuguguuuagggcaccaugccgucccuaacggaacgaucguuaagaccauuacaaaugaucaaaucgaggugacuaacgcgaccgaacugguacagucuucaaguacaggugagauuugcgacagcccacaccagauccuagauggcaaaaauuguacccucauagacgcucugcuuggggauccgcagugcgacggauuucaaaacaagaaaugggaucuguucguggaaagauccaaggccuauggcaauuguuaccccuaugacgucccugauuacgcaucuuugaggucgcucguggccucaagcgguacucuggaguuuaacaaugaaaguuucaacuggacagggguuacccagaauggaacguccucugcuugcauccggcgcagcaagaacuccuuuuucucacgacugaauuggcucacucauuuaaacuuuaaauauccagcacugaaugugaccaugcccaacaacgagcaguucgacaaacuuuacauuuggggcguccaccauccuggcacagauaaggaccagaucuuuuuguaugcccaagcuagugggcguauuacugugagcaccaagagaucucagcagacagccaucccaaauauaggauccaggccccggguacgcaacauuccuucaagaaucagcauuuacuggaccaucguuaaaccaggugauauccugcuaauuaauaguacgggcaaccucauagcgccgaggggguacuucaagauccggucuggaaaguccagcauuaugcgcucggacgcacccaucggcaaauguaauucugagugcauaacuccuaacgguuccauuccaaaugacaagcccuuucagaacgugaaucgaaucacauauggggccuguccuagauacgucaaacaaaacacccugaggcuugcuacuggaaugcggaaugugccagaaaagcagacacguggcaucuucggcgccauugcaggguuuaucgagaacggaugggaagguaugguggauggcugguauggguuccgccaccaaaauucagagggaagaggccaggcugccgaccugaaaaguacccaggcggccauugaucagauaaacgguaaguugaauaggcucaucgggaaaacgaacgagaaguuccaccagauugaaaaggaguuuagcgaagucgagggccggauccaagaccuggaaaaauacguugaggauaccaagaucgacuuaugguccuauaacgcagagcugcucguggcucuugaaaaucagcauacaauugaucugacugacucugagaugaacaaauuguucgaaaagaccaaaaagcagcuacgagagaaugccgaagauaugggaaacggcugcuuuaagauauaccacaaaugugacaaugcuugcaucgggagcauucgcaacggaacauaugaucaugacguauacagagacgaggcccugaauaacagguuccagaucaaggguguggagcucaaaucaggcuacaaggauuggauucuguggaucaguuuugcaauauccugcuuccuucugugugucgccuugcucggguuuaucaugugggcuugccaaaaaggaaauauucgguguaacaucugcauuuga

SEQ ID NO: 136795 - RNA, 1701 nt, Artificial Sequence; identical to SEQ ID NO: 136220
  derived and/or modified CDS sequence (opt3) from hemagglutinin__InfluenzaA__AFH74862

SEQ ID NO: 136796 - RNA, 1701 nt, Artificial Sequence; identical to SEQ ID NO: 136220
  derived and/or modified CDS sequence (opt3) from hemagglutinin__InfluenzaA__AFH74873

SEQ ID NO: 136797 - RNA, 1701 nt, Artificial Sequence; identical to SEQ ID NO: 131661
  derived and/or modified CDS sequence (opt3) from hemagglutinin__InfluenzaA__AFH74884

SEQ ID NO: 136798 - RNA, 1701 nt, Artificial Sequence; identical to SEQ ID NO: 131661
  derived and/or modified CDS sequence (opt3) from hemagglutinin__InfluenzaA__AFH74895

SEQ ID NO: 136799 - RNA, 1701 nt, Artificial Sequence; identical to SEQ ID NO: 131661
  derived and/or modified CDS sequence (opt3) from hemagglutinin__InfluenzaA__AFH74906

SEQ ID NO: 136800 - RNA, 1701 nt, Artificial Sequence; identical to SEQ ID NO: 131459
  derived and/or modified CDS sequence (opt3) from hemagglutinin__InfluenzaA__AFH74917

SEQ ID NO: 136801 - RNA, 1701 nt, Artificial Sequence; identical to SEQ ID NO: 131661
  derived and/or modified CDS sequence (opt3) from hemagglutinin__InfluenzaA__AFH74928

SEQ ID NO: 136802 - RNA, 1701 nt, Artificial Sequence; identical to SEQ ID NO: 131661
  derived and/or modified CDS sequence (opt3) from hemagglutinin__InfluenzaA__AFH74939

SEQ ID NO: 136803 - RNA, 1701 nt, Artificial Sequence
  derived and/or modified CDS sequence (opt3) from hemagglutinin__InfluenzaA__AFH74950
augaagaccaucauugcccugagcuacauacucugccuuguguucgcucagaaacugcccggcaacgacaauuccacagcaacuuuguguuuagggcaccaugccgucccuaacggaacgaucguuaagaccauuacaaaugaucaaaucgaggugacuaacgcgaccgaacugguacagucuucaaguacaggugagauuugcgacagcccacaccagauccuagauggcaaaaauuguacccucauagacgcucugcuuggggauccgcagugcgacggauuucaaaacaagaaaugggaucuguucguggaaagauccaaggccuauggcaauuguuaccccuaugacgucccugauuacgcaucuuugaggucgcucguggccucaagcgguacucuggaguuuaacaaugaaaguuucaacuggacagggguuacccagaauggaacguccucugcuugcauccggcgcagcaagaacuccuuuuucucacgacugaauuggcucacucauuuaaacuuuaaauauccagcacugaaugugaccaugcccaacaacgagcaguucgacaaacuuuacauuuggggcguccaccauccuggcacagauaaagaccagaucuuuuuguaugcccaagcuagugggcguauuacugugagcaccaagagaucucagcagacagccaucccaaauauaggauccaggccccggguacgcaacauuccuucaagaaucagcauuuacuggaccaucguuaaaccaggugauauccugcuaauuaauaguacgggcaaccucauagcgccgaggggguacuucaagauccggucuggaaaguccagcauuaugcgcucggacgcacccaucggcaaauguaauucugagugcauaacuccuaacgguuccauuccaaaugacaagcccuuucagaacgugaaucgaaucacauauggggccuguccuagauacgucaaacaaaacacccugaaacuugcuacuggaaugaggaaugugccagaaaagcagacacggggcaucuucggcgccauugcaggguuuaucgagaacggaugggaagguaugguggauggcugguauggguuccgucaccaaaauucagagggacgcggccaggcugccgaccugaagaguacccaggcggccauugaucagauaaacgguaaauugaauagacucaucgggaagacgaacgagaaguuccaccagauugaaaaagaguuuagcgaagucgagggcaggauccaagaccuggaaaaguacguugaggauaccaaaaucgacuuaugguccuauaacgcagagcugcucguggcucuugaaaaucagcauacaauugaucugacugacucugagaugaacaaguuguucgaaaagaccaagaagcagcuacgggagaaugccgaagauaugggaaacggcugcuuuaaaauauaccacaagugugacaaugcuugcaucgggagcauucgaaacggaacauaugaucaugacguauaccgcgacgaggcccugaauaacagauuccagaucaaagguguggagcucaagucaggcuacaaagauuggauucuguggaucaguuuugcaauauccugcuuccuucugugugucgccuugcucggguuuaucaugugggcuugccaaaagggaaauauuagguguaacaucugcauuuga

SEQ ID NO: 136804 - RNA, 1701 nt, Artificial Sequence; identical to SEQ ID NO: 136220
  derived and/or modified CDS sequence (opt3) from hemagglutinin__InfluenzaA__AFH74961

SEQ ID NO: 136805 - RNA, 1701 nt, Artificial Sequence; identical to SEQ ID NO: 131661
  derived and/or modified CDS sequence (opt3) from hemagglutinin__InfluenzaA__AFH75388

SEQ ID NO: 136806 - RNA, 1701 nt, Artificial Sequence
  derived and/or modified CDS sequence (opt3) from hemagglutinin__InfluenzaA__AFH97140
augaaggccauccuggugguccuccuuuacauuuucgcuaccgcaaacgccgacacacugugcauaggcuaucacgcgaauaacagcacugauacgguugacaccguguuggagaaaaauguaacagugacucauuccgucaacuuacuggaagauaagcacaaugggaaacuauguaagcucagaggaguggcuccccugcaucuugguaaaugcaacaucgccggcuggauucuggggaauccugagugugaaucuuugucaaccgcaaguagcugguccuacaucguugagacaucuucgucagacaacggaaccugcuauccaggcgauuuuauugacuacgaggagcucagggagcagcugagcaguguguccucuuucgaacgguuugagaucuucccgaagacuagcuccuggcccaaucacgauucaaacaagggugucacagccgcuuguccucaugcaggggccaaaaguuuuuauaagaaucugauauggcucgugaaaaagggaaacagcuacccaaaauuaucuaaguccuauaucaaugacaagggcaaagaaguacugguucuuuggggcauucaccaccccucaaccagcgcugaucaacagaguuuguaccagaacgccgacgcguacguguucgucgggacgucucgcuauuccaagaaauuuaagccugagaucgcaauucgaccaaaagugcgugaucaggagggaagaaugaauuacuauuggacucugguggaacccggugacaagaucaccuucgaggccacaggcaaccuagucguuccuagguacgcuuuugccauggaacggaacgcagggagcggaauaauuaucucggauacuccagugcaugacugcaauaccacaugucaaaccccgaaaggcgcuauuaacacgucucuccccuuccagaauauccacccuaucacuauugguaagugcccaaaguauguaaaauccacaaagcugcgccuugccaccgggcugagaaacgugcccucaauacagaguaggggauuguuuggcgcgaucgccggcuucauugaagggggauggacugguauggucgacggcugguacggguaucaucaccagaaugaacaaggaagcggcuacgcagcugaucucaaauccacacagaacgccaucgacgagauaaccaauaaggugaacucuguuauugagaaaaugaauacgcaguuuaccgcuguggguaaggaguucaaccaccuggaaaagcggaucgaaaauuuaaacaaaaaggucgaugacggguuccuggauaucuggacauacaaugccgagcuccuugugcuguuggaaaacgagcgcacucuagacuaucaugauagcaauguaaagaaccuguacgagaagguucgaucacagcucaaaaacaaugcaaaggaaauuggcaacggauguuuugaguucuaucacaagugcgacaauaccuguauggaaagugugaaaaacggcacauacgauuauccuaaguacuccgaggaagccaaacugaauagagaggagaucgacggggucaaacuugaaagcacuaggauuuaucaaauacuggcuaucuacucuaccguggcgucaaguuugguccucgugguuagccugggagcaauuuccuuuuggaugugcucuaacgguucguuacagugccggaucuguaucuga

SEQ ID NO: 136807 - RNA, 1701 nt, Artificial Sequence
  derived and/or modified CDS sequence (opt3) from hemagglutinin__InfluenzaA__AFJ05142
augaagaccaucauugcccugagcuacauacucugccuuguguucgcucagaaaauccccggcaacgacaauuccacagcaacucuguguuuggggcaccaugccgucccuaacggaacgauuguuaagaccaucacaaaugaucaaauugaggugacuaacgcgaccgaauuaguacagucuucaaguacaggugagaucugcgacagcccacaccagauacuggauggcgaaaauuguacccuaaucgacgcucuccugggggauccgcagugcgacggauuucaaaacaaaaagugggaucuuuucguggagagauccaaagccuauucuaauuguuaccccuaugacgucccugauuacgcaucgcugaggucauugguggccagcaguggcacucucgaauuuaacaaugagugcuucaacuggacagguguuacccagaaugggacguccucugcuuguauucggcgcagcaacuccucauuuuucagucgacugaauuggcugacucaucucaacuuuaaguauccagcauuaaaugugaccaugcccaacaacgagcaguucgacaagcuguacaucuggggaguccaccauccuggcacagauaaagaccagauuuuucuuuaugcccaaagcucuggccguaucacuguguccaccaagagaucacagcaggcuguaauaccaaauauugggagcaggccccggauccgcaacauuccuaguagaaucucuaucuacuggacaauuguuaaaccaggagauauauugcugaucaauuccaccgguaaccuaauugccccgaggggcuacuucaagauccggagcgggaaaucgucuauaaugcgcuccgacgcgcccauuggaaagugcaauucaggcuguaucacgccuaacgguaguaucccaaaugacaagcccuuucagaacgugaaucgaauuacuuauggggcaugcccuagauacgucaaacaaagcacacucaagcuggccaccggaaugaggaacgugccagaaaaacagacucggggcaucuucggcgcuauugccggguuuauagagaauggaugggaagguaugguggauggcugguauggguuccgucaccagaacuccgagggacgcggccaagcagcugaccuuaagucuacacaggccgcgaucgaucagauuaaugguaaacugaacagauugaucgggaagaccaaugagaaauuccaccagaucgaaaaggaguuuagcgaagucgagggcaggauucaagaccucgaaaaguacguugaggauacgaaaauagaccuguggucauauaacgccgaguuacugguggcacucgaaaaccagcauaccaucgaucuuacagacagugagaugaauaagcuguucgaaaagacuaagaaacaguugcgggagaacgcugaagauaugggaaauggcuguuuuaagauuuaccacaagugcgacaacgccugcaucggguccauucgaaauggaaccuauaaccaugauguauaccgcgacgaggcucuaaauaacagauuccagaucaaagguguggagcugaaaagcggcuacaaagacuggauacucuggaucucuuuugccauuucauguuuccugcuuugcgucgcacuguugggguuuaucaugugggccugucaaaagggaaauauuaggugcaacaucuguauauga

SEQ ID NO: 136808 - RNA, 1701 nt, Artificial Sequence
  derived and/or modified CDS sequence (opt3) from hemagglutinin__InfluenzaA__AFJ05144
augaagaccaucauugcccugagcuacauacucugccuuguguucgcucagaaacugcccggcaacgacaauuccacagcaacuuuguguuuagggcaccaugccgucccuaacggaacgaucguuaagaccauuacaaaugaucaaaucgaggugacuaacgcgaccgaacugguacagucuucaaguacaggugagauuugcgacagcccacaccagauccuagauggcgaaaauuguacccucauagacgcucugcuuggggauccgcagugcgacggauuucaaaacaaaaagugggaucuguucguggagagauccaaagccuauucuaauuguuaccccuaugacgucccugauuacgcaucguugaggucacucguggccagcaguggcacucuggaauuuaacaaugaguccuucaacuggacagguguuacccagaaugggacgucuagcgcuugcauccggcgcuccaacucaaguuucuuuagccgacugaauuggcucacucauuuaaacuuuaaguauccagcacugaaugugaccaugcccaacaacgagcaguucgacaagcuguacauuuggggaguccaccauccuggcacagauaaagaccagaucuuuuuguaugcccaaucuuccggccguauuacugugucaaccaagagaagccagcaggcuguaaucccaaauauagggaguaggccccggguucgcaacauuccuucuagaaucuccauuuacuggacaaucgugaaaccaggagauauccugcuaauuaauagcaccgguaaccucauagccccgaggggcuacuucaagauccggucggggaaaucuuccauuaugcgcucagacgcgcccaucggaaaguguaauagugaaugcauaacgccuaacggcagcauuccaaaugacaagcccuuucagaacgucaaucgaaucacuuauggugcauguccuagauacgugaaacaauccacacugaaacuugccaccgggaugaggaacgugccagagaagcagacucggggaaucuucggcgcuauugccggcuuuaucgaaaaugggugggagggaauggucgaugguugguauggcuuccgucaccagaacucugaggggcgcggacaagcagcugaccuuaagagcacacaggccgcgauugaucagauaaauggcaaauugaacagacucaucgguaagaccaaugaaaaauuccaccagauugagaaggaauuuucagagguugaagggaggauccaagaccuggagaaguacguggaggauacgaaaaucgacuuauggaguuauaacgccgaacugcucguagcacuugagaaccagcauaccauugaucugacagacuccgaaaugaauaaguuguucgagaaaacuaagaaacagcuacgggaaaacgcugaggauaugggcaauggaugcuuuaagauauaccacaagugugacaacgccugcaucggcagcauucgaaaugggaccuauaaccaugauguguaccgcgacgaggcucugaauaacagauuccagaucaaaggagucgaacucaagucugguuacaaagacuggauucuguggaucucauuugccauaaguugcuuccuucuguguguggcauugcucggcuuuaucaugugggccugccaaaaggggaauauuagguguaacaucugcauuuga

SEQ ID NO: 136809 - RNA, 1701 nt, Artificial Sequence
  derived and/or modified CDS sequence (opt3) from hemagglutinin__InfluenzaA__AFJ11706
augaagaccaucauugcccugagcuacauacucugccuuguguucgcucagaaacugcccggcaacgacaauuccacagcaacuuuguguuuagggcaccaugccgucccuaacggaacgaucguuaagaccauuacaaaugaucaaaucgaggugacuaacgcgaccgaacugguacagucuucaaguacaggugagauuugcgacagcccacaccagauccuagauggcgaaaauuguacccucauagacgcucugcuuggggauccgcagugcgacggauuucaaaacaaaaagugggaucuguucguggagagauccaaagccuauucuaauuguuaccccuaugacgucccugauuacgcaucguugaggucacucguggccagcaguggcacucuggaauuuaacaaugaguccuucaacuggacagguguuacccagaaugggacgucuagcgcuugcauccgguccucaaacaauagcuuuuucagucgccugaacuggcucacucauuuaaauuuuaaguauccagcacugaacgugaccaugcccaacaaugagcaguucgacaaacuuuacauuuggggaguccaccauccuggcacagauaaggaccagaucuuuuuguaugcccaggcuucuggccgaauuacuguguccaccaagcguucacagcaggccguaaucccaaacauagggagcagacccaggguucggaauauuccuagucgcaucucuauuuacuggacaaucgugaaaccaggagauauccugcuaauuaacuccaccgguaaucucauagcgccgagaggcuacuucaagaucaggagcgggaaaucgucuauuaugcgguccgacgcacccaucggaaaguguaacucagaaugcauaacgccuaauggcaguauuccaaacgacaagcccuuucagaaugucaaccgcaucacuuauggugccuguccucgauacgugaaacaaagcacacugaaacuugcuaccgggaugagaaaugugccagagaagcagacuaggggaaucuucggcgccauugcaggcuuuaucgaaaacgggugggagggaauggucgaugguugguauggcuuccggcaccaaaauuccgaggggcguggacaagcugccgaccugaagucuacacaggcggccauugaucagauaaacggcaaauugaaucgccucaucgguaagaccaacgaaaaauuccaccagauugagaaggaauuuagcgagguugaagggagaauccaagaccuggagaaguacguggaggauacgaaaaucgacuuauggucauauaacgcagaacugcucguagcucuugagaaucagcauaccauugaucugacagacagugaaaugaacaaguuguucgagaaaacuaagaaacagcuaagggaaaaugccgaggauaugggcaacggaugcuuuaccauauaccacaagugugacaaugcuugcaucggcuccauucggaacgggacauaugaucauaauguguaccgagacgaggcccugaacaaucgcuuccagaucaagggagucgaacucaaaagcgguuacaaggacuggauucuguggaucucuuuugcaauaucaugcuuccuucuguguguggccuugcucggcuuuaucaugugggcuugccaaaaagggaacauuagauguaauaucugcauuuga

SEQ ID NO: 136810 - RNA, 1701 nt, Artificial Sequence; identical to SEQ ID NO: 135030
  derived and/or modified CDS sequence (opt3) from hemagglutinin__InfluenzaA__AFJ11728

SEQ ID NO: 136811 - RNA, 1701 nt, Artificial Sequence
  derived and/or modified CDS sequence (opt3) from hemagglutinin__InfluenzaA__AFJ19842
augaagaccaucauugcccugagcuacauacucugccuuguguucgcucagaaacugcccggcaacgacaauuccacagcaacuuuguguuuagggcaccaugccgucccuaacggaacgaucguuaagaccauuacaaaugaucaaaucgaggugacuaacgcgaccgaacugguacagucuucaagugcuggugagauuugcgacagcccacaccauauccuagauggcgaaaauuguacacucauagacgcccugcuuggggauccgcagugcgacggauuucagaacaaaaagugggaucuguucguggagagauccagggcauauucuaauuguuaccccuaugacgucccugauuacgccucguugcggucacucguggcuagcaguggcacccuggaauuuaacaaugaguccuucaacuggacugguguuacacaaaaugggaccucuagcgcaugcauccgccgauccaacaauucauuuuucagucgucugaacuggcucacgcacuuaaauuuuaaauauccagcccugaacgugacuaugcccaacaaugagcaguucgacaaacuuuacauuuggggaguccaucacccuggcaccgauaaggaccagaucuuuuuguaugcucaggccagcggcagaauuacagugucuacuaaaaggucccaacaggcgguaaucccaaacauagggucacggccccgcguuagaaauauuccuagcaggaucaguauuuacuggaccaucgugaagccaggagauauccugcuaauuaacucuacagguaaucucauagcaccgcggggcuacuucaaaauccgcuccggaaagagcucgauuaugcgaucugacgcccccaucgggaaauguaacuccgaaugcauaaccccuaauggcucaauuccaaacgacaagcccuuucagaaugucaacagaaucacguauggugcuuguccuagguacgugaagcagaguacucugaaacuugccacagggaugcggaaugugccagagaagcaaacccguggaaucuucggcgcaauugcuggcuuuaucgaaaacgggugggagggaaugauggaugguugguauggcuuccgccaccagaauagcgaggggagaggacaggccgcggaccugaaauccacucaagccgcaauugaucagauaaacggcaaguugaauaggcucaucgguaaaacaaacgaaaaguuccaucagauugagaaagaauuuucugaggucgaagggcggauccaggaccuggagaaguacguugaggauaccaagaucgacuuauggagcuauaacgcugaacugcucguggcccuugagaaucaacacacgauugaucugaccgacucagaaaugaacaaauuguucgagaagacaaagaagcagcuacgagaaaaugcugaggauaugggcaacggaugcuuuaaaauauaccauaagugugacaaugccugcaucggcaguauucgcaacgggacuuaugaucacgacguauacagagacgaggcacugaauaacagguuccagaucaagggaauugaacucaaauccgguuacaaggauuggauccuguggaucagcuuugccauaucuugcuuccuucuguguguggcuuugcucggcuuuauuaugugggcgugccagaaagggaauauccgguguaacauuugcaucuga

SEQ ID NO: 136812 - RNA, 1701 nt, Artificial Sequence; identical to SEQ ID NO: 136409
  derived and/or modified CDS sequence (opt3) from hemagglutinin__InfluenzaA__AFJ20171

SEQ ID NO: 136813 - RNA, 1701 nt, Artificial Sequence; identical to SEQ ID NO: 135030
  derived and/or modified CDS sequence (opt3) from hemagglutinin__InfluenzaA__AFJ20182

SEQ ID NO: 136814 - RNA, 1701 nt, Artificial Sequence
  derived and/or modified CDS sequence (opt3) from hemagglutinin__InfluenzaA__AFJ74386
augaaggccaaacugcucgugcuucugugcgcuuucaccgcaacauacgccgacacuaucuguauuggcuaucacgcgaacaauagcacggauaccgucgacacaguuuuggagaagaacgugacuguaacccauuccgugaauuuacuggaagauucucacaacgggaaacuaugcagacucaagggaacagcuccccugcagcuugguaauuguucagucgccggcuggauacuggggaacccugagugcgaaaguuuguuuagcaaagaguccuggucuuacaucgcagaaaccccaaauccggagaacggaacuuguuaucccggcuacuucgccgacuaugaggaacucagggagcaacugucgucagugagcaguuuugaacgguucgagauuuuuccuaaggaguccucuuggccaaaucauacaguuaccaagggugugacggcuagcugcucccacaacgggaaaucaaguuucuacaagaaucugcucugguuaacugaaaagaacggacuguaucccaaucuuagcaagucuuacgucaacaauaaagagaaggaaguguugguacuguggggcguucaucacccuuccaacaucggcgaucagcgcgcaauuuaccacaccgagaacgccuaugugucagucaugagcagucauuacucucgacguuuuacaccagaaaucgcuaagagacccaaagugagggaccaggaggggcggauaaauuauuacuggacucuacucgagccuggagauaccaucauuuucgaagccaacgguaaucugaucgcgccaugguaugcauuugcccuuucccgcggcuucgggagcggaauuaucacaucgaacgcuucuaugggcgagugugacgccaagugccagaccccgcaaggugcaauaaauuccucacugcccuuucagaacgugcacccugucacgauuggggaauguccaaaauacguuagaaguacuaaguugaggauggugacaggacuccggaauauccccagcauucagucccgcggccuguucggcgcuaucgccggguuuaucgagggagguuggaccggcaugauugaugggugguauggauaccaucaccagaacgaacaaggcucugguuacgcggccgaccagaaaagcacucagaaugcaauagaugggaucacaaacaagguaaauucagugauugagaaaaugaacacccaguucacggcugucggcaaggaguucaauaaguuagaacgaagaauggagaaccugaauaaaaagguggacgauggauuucucgacaucuggaccuauaacgccgaacuucugguuuugcuagagaacgaaaggacacuggacuuccacgauaguaaugugaaaaaccucuacgagaaggucaaaaaucaacugaagaacaaugcuaaggagauaggcaacgggugcuuugaguucuaucauaaauguaauaacgaaugcauggaauccgugaagaauggaacuuacgacuauccuaaauacagcggugagucuaaacuuaaccgggagaaaauugauggcguaaagcuggaaucaauggggguuuaucagaucuuggccaucuacaguaccguggcaagcucccucguccuguuagugucucugggagccauuucguuuuggaugugcagcaauggcucccuacagugucguaucugcauuuga

SEQ ID NO: 136815 - RNA, 1701 nt, Artificial Sequence
  derived and/or modified CDS sequence (opt3) from hemagglutinin__InfluenzaA__AFJ74407
augaagaccaucauugcccugagcuacauacucugccuuguguucgcucagaaacugcccggcaacgacaauuccacagcaacuuuguguuuagggcaccaugccgucccuaacggaacgcugguuaagaccaucacaaaugaucaaauugaggugacuaacgcgaccgagcuaguacagucuucaaguacagguagaaucugcgacagcccacacaggauucucgauggcaaaaauuguacccugaucgacgcuuugcugggggauccgcauugcgacggauuucagaacaaggaaugggauuuguucguggaacgguccaaagccuauucuaauuguuaccccuaugacgucccugauuacgcaucgcuccgcucacugguggccagcaguggcacucuggaguuuacaaacgaagguuucaauuggaccgggguugcucaggacggaacguccuaugcaugcaagcgaggcucugucaagagcuuuuucucccgucucaacugguuacacaaacuggaguacaaguauccagcccuuaaugugacuaugcccaacaaugauaaauuugacaaguuguacauauggggcgugcaucacccuucaaccgauagugaccaaacaagccuguacguacaggcuucugggagaguuacuguguccaccaaaaggucacagcagacagucaucccaaacauuggaagccggcccugggugcgcggugugaguucuagaaucuccauuuauuggaccaucgucaagccuggcgacauacuacucauuaauagcacggggaaccugaucgccccaaggggauacuucaagauucggucgggcaaaucuuccaucaugcgcucagaugcgccgaucgguaacuguaguagcgagugcauuacucccaauggguccauaccuaacgacaagccauuucaaaauguuaaccgaaucacauauggagcaugucccagauacgugaaacagaauacccuuaagcuggccacuggcaugaggaacguaccugaaaaacagacacggggcauuuucggggcuaucgccggauuuauagagaaugguugggaaggcaugguggaugggugguauggauuccgucaccagaacucugagggcaccggucaagcagcugaccuuaagagcacgcaggccgcgauuaaucagaucaacgggaaacucaaucgccugaucgagaagaccaacgaaaaguuucaucaaauugagaaagaguucucagaagucgaaggcagaauccaggauuuagagaaguacguggaggacacaaaaauugaucuguggaguuauaaugccgaacuccuuguugcacuggagaaccagcacacuauagacuugaccgauuccgaaaugaauaagcuauucgagaggacacggaaacagcugcgagaaaacgcugaggacaugggaaacggcugcuuuaagaucuaccauaagugugauaaugccugcauugggagcauccgcaacggaacuuacgaccacgacguguauagagaugaggcucucaauaacagguuccaaaucaaaggugucgaacugaagucuggcuacaaagacuggauucuuuggauaucauuugccaucaguugcuuccuguugugugugguacuccugggguuuauuaugugggcaugccagaagggaaauauccgguguaacauuugcaucuga

SEQ ID NO: 136816 - RNA, 1701 nt, Artificial Sequence
  derived and/or modified CDS sequence (opt3) from hemagglutinin__InfluenzaA__AFJ74418
augaagaccaucauugcccugagcuacauacucugccuuguguucgcucagaaacugcccggcaacgacaauuccacagcaacuuuguguuuagggcaccaugccgucccuaacggaacgcugguuaagaccaucacaaaugaucaaauugaggugacuaacgcgaccgaacuuguacagucuucaaguacagguagaaucugcgacagcccacaccagauucucgauggcgagaauuguacccugaucgacgcucuacugggggauccgcauugcgacggauuucagaacaaagaaugggauuuguucguggagagguccaaggccuauucuaauuguuaccccuaugacgucccugauuacgcaucgcuccggucacugguggccagcaguggcacucuggaauuuaacaaugaguccuucaacuggacagguguugcucaaaaugggaccucuagcgcaugcaaacgccgauccauaaagucauuuuucagucgucucaacugguuacaccagcugaaguauaaauacccagcccuuaaugugacgaugcccaacaaugagaaguuugacaaauuguauaucuggggaguccaucacccuagcacugauucugaccagauuucccuguacgcucaggccucaggcagagugaccguaagcacaaagaggagucaacagacuguuaucccaaacauuggcucucggcccugggugcgcggggucuccagcagaaucucgauauacuggaccauugugaaaccuggagauauccuacucauuaacucuacagguaaucugaucgcgccaaggggcuauuucaagauccgguccgggaagucaaguauuaugcgcagcgacgcaccgauaggaaaauguaacuccgaaugcaucacccccaauggcucuauuccuaacgacaagccauuucagaaugugaaccgaaucacguacggugccugucccagauaugucaaacagaauacucuuaagcuggcuacagggaugaggaacguuccugagaaacaaacccggggaauauucggcgccauugcaggcuuuaucgaaaaugggugggagggaaugguggaugguugguacggcuuccgucaccagaacagcgaggggacuggacaggcugccgacuugaagucaacacaagcggccaucaaucagauuaacggcaaacucaaucgccugaucgaaaagaccaacgagaaguuucaucagauugaaaaagaguucagugaaguagaggguagaauacaggauuuagagaaguauguggaagacacgaaaaucgaucugugguccuacaaugcagagcuccuugucgcucuggaaaaccaacacaccauugacuugacagauagcgagaugaacaagcuauucgaaaggacuaaaaagcagcugcgggagaaugccgaggacauggggaacggcugcuuuaagaucuaucauaaaugugauaaugcuugcaucggaucuauucgaaacggcaccuacgaccacgauguguaccgcgacgaagcccucaauaacagauuccagauaaaggggguugagcugaaaucaggauauaaggacuggauccuuuggauuaguuuugcaaucagcugcuuccuguugugugugguccuccuggguuuuauuaugugggccugccagaaaggcaauaucagguguaacauaugcaucuga

SEQ ID NO: 136817 - RNA, 1701 nt, Artificial Sequence
  derived and/or modified CDS sequence (opt3) from hemagglutinin__InfluenzaA__AFJ74437
augaagaccaucauugcccugagcuacauacucugcaaaguguucgcucagaaacuucccggcaacgacaauuccacagcaacucuguguuuggggcaccaugccgucccuaacggaacguuaguuaagaccaucacaaaugaucaaauugaggugacuaacgcgaccgaacugguacagucuucaaguacagguagaaucugcgacagcccacaccagauucuagauggcgagaauuguacccucaucgacgcucugcuuggggauccgcauugcgacggauuucagaacaaggaaugggaucuguucguggagagguccaaagccuauucuaauuguuaccccuaugacgucccugauuacgcaucguugcggucacucguggccagcaguggcacucuggaauuuaacaaugaguccuucaacuggacagguguugcucaaaaugggaccucuagcgcaugcaagcgccgauccauaaagucauuuuucagucgucugaacuggcuccaccaguuaaaauauaaguacccagcccugaaugugacgaugcccaacaaugagaaauuugacaaacuuuauaucuggggaguccaucacccuagcacugauucugaccagauuuccuuguacgcucaggccucaggcagagugaccguaagcacaaagaggagucaacagacuguuaucccaaacauuggcucucggcccugggugcgcggggucuccagcagaaucucgauauacuggaccauugugaagccuggagauauccugcuaauuaacucuacagguaaucucaucgcgccaaggggcuauuucaagauccgguccgggaaaucaaguauuaugcgcagcgacgcaccgauaggaaaguguaacuccgaaugcaucacccccaauggcucuauuccuaacgacaaaccauuucagaaugugaaccgaaucacguacggugccugucccagauaugucaagcagaauacucugaaacuugcuacagggaugaggaacguuccugagaagcaaacccggggaauauucggcgccauugcaggcuuuaucgaaaaugggugggagggaaugguggaugguugguacggcuuccgucaccagaacagcgaggggacuggacaggcugccgaccugaaaucaacacaagcggccaucaaucagauuaacggcaaguugaaucgccucaucgaaaagaccaacgagaaauuucaucagauugaaaaggaguucagugaaguagaggguagaauacaggaucuggagaaauauguggaagacacgaagaucgauuuaugguccuacaaugcagagcugcucgucgcucuugaaaaccaacacaccauugaccugacagauagcgagaugaacaaauuguucgaaaggacuaagaagcagcuacgggagaaugccgaggacauggggaacggcugcuuuaaaaucuaucauaagugugauaaugcuugcaucggaucuauucgaaacggcaccuacgaccacgauguguaccgcgacgaagcccugaauaacagauuccagauaaaagggguugagcucaagucaggauauaaagacuggauccuguggauuaguuuugcaaucagcugcuuccuucuguguguggucuugcucgguuuuauuaugugggccugccagaagggcaauaucagguguaacauaugcaucuga

SEQ ID NO: 136818 - RNA, 1701 nt, Artificial Sequence
  derived and/or modified CDS sequence (opt3) from hemagglutinin__InfluenzaA__AFJ74448
augaagaccaucauugcccugagcuacauacucugccuuguguucgcucagaaacugcccggcaacgacaauuccacagcaacuuuguguuuagggcaccaugccgucccuaacggaacgcugguuaagaccaucacaaaugaucaaauugaggugacuaacgcgaccgaacugguacagucuucaaguacagguagaaucugcgacagcccacaccagauucucgauggcgagaauuguacccugaucgacgcccuucuagggggaccgcauugcgauggcuuucagaacaaagaaugggacuuguucguggagagguccaaggcuuauucuaauuguuaccccuaugaugucccugacuacgcaucgcuccggucacugguggccagcagugguacucuggaauuuaacaaugaguccuucaacuggacagggguugcucaaaauggaaccucuagcgcaugcaaacgccgauccaacaagucauuuuucagucgucucaauugguuacaccagcugaaguauaaauacccagcccuuaacgugacgaugcccaauaacgagaaguuugauaaauuguauauauggggcguccaucacccuagcacugacucugaucagaucucccuguacgcucaggccucaggcagagugaccguaagcacaaagaggagucaacagacuguuauuccaaacaucgggucucggcccugggugcgcggagucuccagcagaauuucgaucuacuggaccauagugaaaccuggugacauucuacucaucaauucuacaggcaaccugauugcgccaaggggguauuucaagauccgguccggaaagucaaguaucaugcgcagcgaugcaccgauuggcaaauguaauuccgaaugcauaacccccaacgguucuaucccuaaugacaagccauuucagaacgugaaucgaauuacguacggggccugucccagauaugucaaacagaacacucuuaagcuggcuacaggaaugaggaauguuccugagaaacaaacccggggcaucuucggcgccauagcaggguuuauugaaaacggaugggaggguaugguggacggcugguacggguuccgucaccagaauagcgagggaacuggccaggcugccgauuugaagucaacacaagcggccaucaaccagaucaaugguaaacucaaccgccugauugaaaagaccaaugagaaguuucaucagaucgaaaaagaguucagugaaguagaggggaggauucaggacuuagagaaguauguggaagauacgaaaauagaccugugguccuacaacgcagagcuccuugucgcucuggaaaaccaacacaccaucgauuugacagacagcgagaugaauaagcuauucgaaagaacuaaaaagcagcugcgggagaacgccgaggauaugggcaauggaugcuuuaagauuuaucauaaaugugacaacgcuugcaucggcucuauccgaaaugggaccuacgaucacgacguguaccgcgaugaagcccucaacaauagauuccagauuaagggaguugagcugaaaucagguuauaaggacuggauacuuuggaucaguuuugcaauuagcugcuuccuguugugugugguccuccugggcuuuaucaugugggccugccagaaagggaacauuagguguaauaucugcauauga

SEQ ID NO: 136819 - RNA, 1701 nt, Artificial Sequence
  derived and/or modified CDS sequence (opt3) from hemagglutinin__InfluenzaA__AFJ74459
auggaggccaagcugcucgugcuucugugcgcuuucaccgcaacauacgccgacacuaucuguauuggcuaucacgcgaacaauagcacggauaccgucgacacaguuuuggaaaagaacgugacuguaacccauuccgugaauuuacuggaggauucucacaacgggaagcuaugcagacucaaaggaacagcuccccugcagcuugguaauuguucaauagccggcuggauccuggggaacccugaaugcgagaguuuguuuagcaaggaauccuggucuuacauugcagagaccccaaauccggagaacggaacuuguuaucccggcuacuucgccgacuaugaagaacucagggaacaacugucgucagucagcaguuuugagcgguucgagaucuuuccuaaagaauccucuuggccaaaucauacagugaccaaggguguuacggcuagcugcucccacaacgggaagucaaguuucuacaaaaaucugcucugguuaacugagaagaacggacuguaucccaaucuuagcaaaucuuacgugaacaauaaggaaaaagaggucuuggugcuguggggcguacaucacccuuccaacauuggcgaucagcgcgcaaucuaccacaccgaaaacgccuauguuucaguggucagcagucauuacucucgacguuuuacaccagagauagcuaagagacccaaggugaggaaucaggaggggcggaucaacuauuacuggacucuacucgaaccuggagacaccauuaucuucgaggccaaugguaaccugauugcgccaugguaugcauuugcccuuucccgcggcuucgggagcggaaucauaacaucgaaugcuucuaugggcgaaugugaugccaaaugccagaccccgcaaggugcaauuaacuccucacugcccuuucagaaugugcacccugucacgaucggggaguguccaaaguacguuagaaguacuaaauugaggauggugacaggacuccggaacauucccagcauccagucccgcggccuguucggcgcuaucgccggguuuauugaaggagguuggaccggcaugauagacgggugguauggauaccaucaccagaaugagcaaggcucugguuacgcggccgaucagaaaagcacucagaacgcaaucaaugggauuacaaacaaaguaaauucaaucauagagaagaugaacacccaguucacggcugugggcaaagaguucaauaaguuagagcgaagaauggaaaaccugaacaagaaagucgacgauggauuucucgacauuuggaccuauaaugccgagcuucugguguugcuagaaaacgagaggacacuggauuuccacgacaguaauguuaagaaccucuacgagaaagugaagaaucaacugaaaaacaaugcuaaggaaaucggcaacgggugcuuugaguucuaucauaaguguaauaacgaaugcauggaguccgucaaaaauggaacuuacgacuauccuaaguacagcaaagagucuaaacuuaaccgggaaaagaucgauggugugaagcuggagucaaugggcguauaucagauuuuggccaucuacaguaccguugcaagcucccucgugcuguuagucucucugggggccauuucguuuuggaugugcagcaauggaucccuacagugucguauaugcaucuga

SEQ ID NO: 136820 - RNA, 1701 nt, Artificial Sequence
  derived and/or modified CDS sequence (opt3) from hemagglutinin__InfluenzaA__AFJ74470
augaagaccaucauugcccugagcuacauacucugccuuguguucgcucagaaacugcccggcaacgacaauuccacagcaacuuuguguuuagggcaccaugccgucccuaacggaacgcugguuaagaccaucacaaaugaucaaauugaggugacuaacgcgaccgaacuuguacagucuucaaguacagguagaaucugcgacagcccacacaggauucucgauggcaaaaauuguacccugaucgacgcucuacugggggauccgcauugcgacggauuucagaacaaggagugggauuuguucguggaacgguccaaagccuauucuaauuguuaccccuaugacgucccugauuacgcaucgcuccgcucacugguggccagcaguggcacucuggaguuuaacaaugaauccuucaacuggacagguguugcucagaaugggaccucuuaugcaugcaagcgacguagcgugaaguccuuuuucucaagacucaacugguuacacaaacuggaguacaaguauccagcccuuaaugucacgaugcccaacaaugacaaauuugauaaguuguacauauggggagugcaucacccuaguacugacagcgaucaaaucucucuguacgcucagaccuccggcaggguaacaguuucaacuaaacggagccagcagaccgugauuccaaacaucggcagucgccccugggucagaggggugucuuccaggauuagcaucuauuggacaauagugaagccuggagacauucuacucaucaacucgaccgguaaucugauugccccacggggcuacuucaagauccgcucugggaaauccucaaucaugcgaagugacgcgccgauuggaaacuguagcuccgagugcauaacgcccaauggcucuaucccuaacgauaagccauuucaaaaugucaacagaauuacuuauggugcaugucccagguacguuaaacagaauacacuuaagcuggccaccgggaugcggaacgugccugaaaaacagacucguggaaucuucggcgcuauagccggcuuuauugagaaugggugggaaggaaugguagacgguugguauggcuuccgccaccagaacagcgaggggacaggacaagcagcugauuugaagucaacccaggccgcgaucaaucagaucaacggcaaacucaauagacugauugagaagacgaacgaaaaguuucaucaaaucgagaaagaguucagugaaguggaagguaggauucaggacuuagagaaguacgucgaggauaccaaaauagaccugugguccuauaaugccgaacuccuuguggcacuggagaaccagcacacaaucgauuugacugacagcgaaaugaacaagcuauucgagcggacccgaaaacagcugcgcgaaaaugcugaggauauggggaacggcugcuuuaagauuuaccauaagugugacaaugccugcaucggaucuaucagaaacggcacauacaaucacgauguuuauagggacgaggcucucaacaaucgguuccaaauuaaagggguggaacugaagucaggauacaaagacuggauacuuuggaucaguuuugccauuagcugcuuccuguugugugucgugcuccuggguuuuaucaugugggcaugccagaagggcaacauucgcuguaauaucugcauauga

SEQ ID NO: 136821 - RNA, 1701 nt, Artificial Sequence
  derived and/or modified CDS sequence (opt3) from hemagglutinin__InfluenzaA__AFJ74492
augaagaccaucauugcccugagcuacauacucugccuuguguucgcucagaaacugcccggcaacgacaauuccacagcaacuuuguguuuagggcaccaugccgucccuaacggaacgcugguuaagaccaucacaaaugaucaaauugaggugacuaacgcgaccgaacuuguacagucuucaaguacagguagaaucugcgacagcccacaccagauucucgauggcgagaauuguacccugaucgacgcucuacugggggauccgcauugcgacggauuucagaacaaagaaugggauuuguucguggagagguccaaggccuauucuaauuguuaccccuaugacgucccugauuacgcaucgcuccggucacugguggccagcaguggcacucuggaauuuaacaaugaguccuucaacuggacagguguugcucaaaaugggaccucuagcgcaugcaaacgccgauccaacaagucauuuuucagucgucucaauugguuacaccagcugaaguauaaauacccagcccuuaacgugacgaugcccaauaacaagaaauuugacaaguuguauauauggggaguccaucacccuagcacugauucugaccagaucucccuguacgcucaggccucaggcagagugaccguaagcacaaaaaggagucaacagacuguuauuccaaacaucggcucucggcccugggugcgcggggucuccagcauuaucucgauauacuggaccauugugaagccuggagauauccuacucauuaauucuacagguaaccugaucgcgccaagaggcuauuucaagaucaggaaugggaaauccucaauuaugcggagugacgcaccgauaggaaaguguaacagcgagugcaucacccccaauggcuccauuccuaacgacaaaccauuucagaaugugaaccgcaucacguacggugccuguccccgauaugucaagcagaauacucuuaaacuggcuacagggaugagaaacguuccugaaaagcaaaccaggggaauauucggcgccauugcaggcuuuaucgagaaugggugggaaggaaugguggaugguugguacggcuuccggcaccagaacucugaggggacuggacaggcugccgacuugaaaagcacacaagcggccaucaaucagauuaacggcaagcucaaucgucugaucgguaagaccaacgagaaauuucaucagauugaaaaggaguucucagaaguagaggggcgcauacaggauuuagaaaaauauguggaggacacgaagaucgaucuguggaguuacaacgcagagcuccuugucgcucuggaaaaucaacacaccauugacuugacagauuccgagaugaacaaacuauucgaaagaacuaagaagcagcugagggagaaugccgaagacaugggcaacggaugcuuuaaaaucuaucauaagugugauaaugcuugcaucggcagcauucggaacgggaccuacgaccacgauguguaccgagacgaggcccucaauaaccgcuucaaaauaaagggaguugagcugaaaucugguuauaaggacuggauccuuuggauuucauuugcaaucaguugcuuccuguugugugugguccuccugggcuuuauuaugugggccugccagaaggggaauaucagauguaacauaugcaucuga

SEQ ID NO: 136822 - RNA, 1701 nt, Artificial Sequence
  derived and/or modified CDS sequence (opt3) from hemagglutinin__InfluenzaA__AFJ74525
augaagaccaucauugcccugagcuacauacucugccuuguguucgcucagaaacugcccggcaacgacaauuccacagcaacuuuguguuuagggcaccaugccgucccuaacggaacgcugguuaagaccaucacaaaugaucaaauugaggugacuaacgcgaccgaacuuguacagucuucaaguacagguagaaucugcgacagcccacacaggauucucgauggcgagaauuguacccugaucgacgcucuacugggggauccgcauugcgacggauuucagaacaaagaaugggauuuguucguggagcgguccaaggccuauucuaauuguuaccccuaugacgucccugauuacgcaucgcuccgcucacugguggccagcaguggcacucuggaauuuaacaaugaguccuucaacuggacagguguugcucaggacgggaccucuagcgcaugcaaacgacguuccauaaagucauuuuucaguagacucaauugguuacaccaacugaaguauaaauacccagcccuuaacgugacgaugcccaauaacgauaaguuugacaaauuguauaucuggggaguccaucacccuagcacugauucugaccagaccucccuguacgcucaggccucaggcagggugacaguaagcacuaagcggagucagcaaaccguuauuccaaauaucggcucucgccccugggugagaggggucuccagcauuaucucgauauacuggacaauugugaaaccuggagacauccuacucauuaacucuaccgguaaccugaucgcgccaaggggcuauuucaagauccgguccgggaagucaaguauuaugcgcagcgaugcaccgauaggaaaauguaauuccgagugcaucacgcccaacggcucuauuccuaaugacaagccauuucagaacgugaaucgaaucacuuacgguacaugucccagauaugucaaacagaacacccuuaagcuggccacugggaugaggaauguuccugaaaaacagacacggggaauauucggcgcuauugccggcuuuaucgagaacgggugggaaggaaugguggaugguugguacggcuuccgucaccaaaauagcgaggggaccggacaggcagcugacuugaagucaacgcaggccgcgaucaaccaaauuaauggcaaacucaaccgccugaucgagaagaccaaugaaaaguuucaucagauugagaaagaguucagugaaguagaagguagaauacaggauuuagagaaguauguggaggacacaaaaaucgaucugugguccuacaacgccgaacuccuugucgcacuggagaaucagcacacuauugacuugaccgauagcgaaaugaacaagcuauucgagaggacacggaaacaacugcgagaaaacgcugaggacauggggaauggcugcuuuaagaucuaucauaagugugauaacgccugcaucggaucuauucgcaauggcacuuacgaccacgacguguacagagaugaggcucucaacaauagguuccagauaaaagggguugaacugaagucaggauauaaagacuggauccuuuggauuaguuuugccaucagcugcuuccuguugugugugguccuccuggguuuuauuaugugggcaugccagaagggcaacauccgguguaauauaugcaucuga

SEQ ID NO: 136823 - RNA, 1701 nt, Artificial Sequence; identical to SEQ ID NO: 136821
  derived and/or modified CDS sequence (opt3) from hemagglutinin__InfluenzaA__AFJ74535

SEQ ID NO: 136824 - RNA, 1701 nt, Artificial Sequence
  derived and/or modified CDS sequence (opt3) from hemagglutinin__InfluenzaA__AFJ74560
augaagaccaucauugcccugagcuacauacucugccuuguguucgcucagaaacugcccggcaacgacaauuccacagcaacuuuguguuuagggcaccaugccgucccuaacggaacgcugguuaagaccaucacaaaugaucaaauugaggugacuaacgcgaccgaauugguacagucuucaaguacagguagaaucugcgacagcccacaccagauucucgauggcgagaauuguacccugaucgacgcccuucugggggauccgcauugcgacggauuucagaacaaagaaugggauuuguucguggagagguccaaggcuuauucuaauuguuaccccuaugacgucccugauuacgugucgcuccggucacugguugcaagcaguggcacucuggaauuuaacaaugaguccuucaacuggacagguguggcccaaaaugggaccucuagcgcuugcaaacgccgauccgacaagucauuuuucagucgucucaacugguuacaccagcugaaguauaaauacccagcacuuaaugucacgaugcccaacaaugagaaguuugauaaauuguauauauggggagugcaucacccuggcacugacagcgaucagaucucucuguacgcccagaccuccggcagaguaacaguuucaacuaagaggagccaacagaccgugauuccaaacaucgggaguggacccuggguccggggugugucuucccgcauuagcaucuacuggacaauagugaaaccuggcgacauucuacucaucaacucgaccgggaaucugauugcuccaagaggauauuucaagaucaggucuggcaaguccucaaucaugcggagugacgccccgauugguaaauguaacagcgaaugcauaacgcccaauggguccaucccuaacgauaagccauuucagaaugucaaccgcauuacuuacggacccuguccucgauauguuaaacagaauacacuuaagcuggcgaccggcaugagaaacgugccagagaaacaaacuaggggcaucuucggggcaauagccggauuuauugaaaaugguugggagggcaugauggacgggugguacggauuccggcaccagaacucugagggcacaggucaggcugccgaucuaaagagcacccaagcagcuaucaaucagaucaacgggaaacucaaucgucugguagaaaagacgaacgagaaguuucaucagauugaaaaagaguucucagaaguggagggccgcauccaggacuuagagaaguaugucgaagauaccaaaauugaccuguggaguuacaaugccgagcuccuuguggcgcuggaaaaccaacacacaauagauuugacugacuccgagaugaacaagcuauucgaaagaaccaaaaagcagcugagggagaaugccgaggauaugggaaacggcugcuuuaagaucuaucauaaaugugacaaugcaugcauugggagcauccggaacggaacauacgaucacgacguuuaccgagacgaagcucucaauaaccgcuuccagaucaaggguguggagcugaaaucuggcuauaaggauuggauucuuuggauaucauuugccaucaguugcuuccuguuguguauuguccuccugggguuuaucaugugggcuugccagaaaggaaauauuagauguaacaucugcauauga

SEQ ID NO: 136825 - RNA, 1701 nt, Artificial Sequence
  derived and/or modified CDS sequence (opt3) from hemagglutinin__InfluenzaA__AFJ74634
augaagaccaucauugcccugagcuacauacucugccuuguguucgcucagaaacugcccggcaacgacaauuccacagcaacuuuguguuuagggcaccaugccgucccuaacggaacgaucguuaagaccauuacaaaugaucaaaucgaggugacuaacgcgaccgaacugguacagucuucaaguacagguggcauuugcgacagcccacaccagauccuagauggggagaauuguacccucauagacgcucugcuuggagauccgcagugcgacggcuuucaaaacaaaaagugggaucuguucguggaaagauccaaagccuauucuaauuguuaccccuaugacgucccugauuacgcaucguugaggucacucguggccagcagugguacucuggaguuuaacaaugaauccuucaacuggacagggguuacccagaauggaacgucuagcgcuugcaagcggcgcuccaacaagucauuuuucagucgacugaauuggcucacucaguuaaaauauaaguacccagcacugaacgugaccaugcccaauaacgagaaauuugacaaacuuuauaucuggggcguccaucacccuggcacagauagcgaccagauuucuuuguacgcccaggcuuccgggcguaucacugugucaaccaagagaagccagcagacaguaauuccaaacaucggaaguaggccccggguucgcgaugugucuuccagaauaagcauuuacuggaccaucgucaagccuggugacauucugcuaaucaauucgacgggcaaccucaucgccccaaggggguauuucaagauucggucuggaaaauccucaauaaugcgcagugacgcgccgaucggcaaguguaauagcgagugcauuacucccaacgguuccaucccuaaugauaaaccauuucagaacgugaaucgaauaacauacggggcaugucccagauaugugaagcaaaacacccugaaacuugccacuggaaugaggaaugucccugaaaagcagacacggggcauuuucggcgcuaucgccggguuuaucgagaacggaugggaagguaugguugacggcugguacggguuccgucaucaaaauucugagggaaccggccaagcagcugaucugaaaagcacgcaggccgcgauuaaccagaucaaugguaaguugaaccgccucauugggaagaccaaugagaaauuucaccagauagaaaaggaguucucagaaguggagggcagaauccaagaccuggaaaaauauguagaggauacaaagauugacuuauggaguuacaacgccgagcugcucguggcacuugaaaaccagcacacuaucgaucugaccgacuccgagaugaauaaauuguucgaaaggacaaagaagcagcuacgggagaacgcugaagauaugggaaauggcugcuuuaaaaucuaucauaagugugacaacgccugcauugggagcauacgaaauggaacuuacgaucacgacgucuaccgcgacgaggcucugaacaauagauuccagaucaaagguguggagcucaagucuggcuauaaagauuggauucuguggaucucauuugccauuaguugcuuccuucuguguguugcauugcucggguuuaucaugugggccugccaaaagggaaacauaagguguaauaucugcauuuga

SEQ ID NO: 136826 - RNA, 1698 nt, Artificial Sequence
  derived and/or modified CDS sequence (opt3) from hemagglutinin__InfluenzaA__AFJ74653
augaaggugaaacugcucguccuucugugcaccuucacagccacuuacgcugacacgaucuguauuggcuaucacgcaaacaauagcaccgauacaguugacacuguguuggagaagaacguaaccgugacacauuccgucaauuuacuggaagauucucacaacgggaaacuaugccuccugaagggaauagcgccccuucagcuggguaauuguucaguggccggcuggaucuuggggaacccugagugcgaacuccugauuaguaaagagagcugguccuacaucguugaaaagccaaauccggagaacggaaccuguuaucccggcuacuuugcugacuaugaggaacugagagagcaacucucuucggugagcucauucgaaagguuugagauuuucccuaaggagaguuccuggccaaaucauacugucacaggugugucugccagcugcucccacaacgggaaaucaaguuuuuacaagaauuuacuguggcuuaccggcaaaaacggauuguaucccaaucugagcaagucuuacgcaaacaauaaagaaaaggaggugcuaguucucuggggcgugcaucacccuccaaacaucggggaucagcgggcccuguaccacacggacaacgcuuaugucuccguggugucaagccauuacagucgcaaguucacucccgaaauagcaaaacgaccuaagguccgugaucaggagggaagaaucaauuauuacuggacccuucuggaaccaggugacacaauuaucuuugaggccaacggcaauuugauugcuccgagguaugccuucgcgcucucucggggguuuggauccggcaucauaaacagcaaugcacccauggaugagugugacgccaaaugccagacuccucaaggugcuauuaacucgucucugccauuccagaauguucaccccgugaccaucggggaauguccuaaguacguacgcuccgccaaauuaagaauggugacaggacugaggaacauuccaucaauccagagucggggccucuuuggcgcaaucgcuggguucauugagggagguuggaccggcauggucgaugggugguauggauaccaucaccagaaugaacaaggcagcgguuacgccgcggaccagaaguccacgcagaacgccauaaaugggaucacuaacaaaguaaauucuguuauugagaagaugaacacacaguuuaccgcagugggcaaggaguucaauaaacuugaacgccgaauggagaaccugaacaagaaagucgaugacggauucaucgacauauggacuuauaaugcugaauugcuagugcugcucgagaacgaaagaacacuggauuuucacgacagcaauguaaagaaccuuuacgagaaaguuaagucacaacugaagaauaacgccaaagaaauuggcaaugggugcuucgaguuuuaucauaaguguaacgaugagugcauggaaagugugaaaaauggaaccuacgacuaucccaaguacuccgaggaaagcaaauugaacagggagaagaucgauggugucaagcucgagucuaugggcguguaucagauccuggcuauuuacucaacggucgccaguagcuuagugcugcuaguuucccucggggcaaucucuuucuggaugugcucgaauggaagccugcagugucggauuugcauauga

SEQ ID NO: 136827 - RNA, 1698 nt, Artificial Sequence
  derived and/or modified CDS sequence (opt3) from hemagglutinin__InfluenzaA__AFJ74673
augaaggugaaacugcucguccuucugugcaccuucacagccacuuacgcugacacgaucuguauuggcuaucacgcaaacaauagcaccgauacaguugacacuguguuggagaagaacguaaccgugacacauuccgucaauuuacuggaagauucucacaacgggaaacuaugccuccugaagggaauagcgccccuucagcuggguaauuguucaguggccggcuggaucuuggggaacccugagugcgaacuccugauuaguaaagagagcugguccuacaucguugaaaagccaaauccggagaacggaaccuguuaucccggcuacuuugcugacuaugaggaacugagagagcaacucucuucggugagcucauucgaaagguuugagauuuucccuaaggagaguuccuggccaaaucauacugucacaggugugucugccagcugcucccacaacgggaaaucaaguuuuuacaagaauuuacuguggcuuaccggaaagaacggcuuguaucccaaucugcggaaaagcuacgcaaacaauaaagaaaaggaggugcuaguucucuggggcgugcaucacccuccaaacaucggggaucagcgcgcccuguaccacacggacaacgcuuaugucucugugguguccucacauuacagccgaaaguucacucccgaaauagcaaaacguccuaaggucagagaucaggagggaaggaucaauuauuacuggacccuucuggaaccaggugacacaauuaucuuugaggccaacggcaauuugauugcuccgcgguaugccuucgcgcucagucgcggguuuggaucuggcaucauaaacuccaaugcacccauggaugagugugacgccaaaugccagacuccucaaggugcuauuaacagcucgcugccauuccagaauguucaccccgugaccaucggggaauguccuaaguacguaagaucugccaaauuaaggauggugacaggacugcggaacauuccauccauccagucacgcggccucuuuggcgcaaucgcuggguucauugagggagguuggaccggcauggucgaugggugguauggauaccaucaccagaaugaacaaggcagugguuacgccgcggaccaaaagagcacgcagaacgccauaaaugggaucacuaacaaaguaaauuccguuauugagaagaugaacacacaguuuaccgcagugggcaaggaguucaauaaacuugaacgaagaauggagaaccugaacaagaaagucgaugacggauucaucgacauauggacuuauaaugcugaauugcuagugcugcucgagaacgaaaggacacuggauuuucacgacucuaauguaaagaaccuuuacgagaaaguuaagagccagcugaagaauaacgccaaagaaauuggcaaugggugcuucgaguuuuaucauaaguguaacgaugagugcauggaaucagugaaaaauggaaccuacgacuaucccaaguacagugaggaauccaaauugaaccgggagaagaucgauggugucaagcucgagagcaugggcguguaucagauccuggcuauuuacucuacggucgccucaaguuuagugcugcuaguuagccucggggcaaucuccuucuggaugugcucuaauggaucgcugcagugucguauuugcauauga

SEQ ID NO: 136828 - RNA, 1701 nt, Artificial Sequence
  derived and/or modified CDS sequence (opt3) from hemagglutinin__InfluenzaA__AFJ74674
augaagaccaucauugcccugagcuacauacucugccuuguguucgcucagaaacugcccggcaacgacaauuccacagcaacuuuguguuuagggcaccaugccgucccuaacggaacgcugguuaagaccaucacaaaugaucaaauugaggugacuaacgcgaccgaacuuguacagucuucaaguacagguggcaucugcgacagcccacaccagauucucgauggggagaauuguacccugaucgacgcucuacugggagauccgcauugcgacggcuuucagaacaaaaagugggauuuguucguggaaagauccaaagccuauucuaauuguuaccccuaugacgucccugauuacgcaucgcucaggucacugguggccagcagugguacucuggaguuuaacaaugaauccuucaacuggacagggguugcucaaaauggaaccucuagcgcaugcaagcggcgcuccaacaagucauuuuucagucgacucaauugguuacaccagcugaaauauaaguacccagcccuuaacgugacgaugcccaauaacgagaaauuugacaaguuguauauauggggcguccaucacccuggcacugauagcgaccagaucucucuguacgcucaggccuccgggcguauuaccgugucaacaaaaagaagccaacagacuguaaucccaaacauuggaaguaggccccggguucgcgaugugucuuccagaaucagcauauacuggaccauugucaagccuggugacauccuacucauuaauucgacaggcaaccugaucgcgccaaggggguauuucaagauccggucuggacgcuccucaauuaugcgaagugacgcaccgauaggcaaauguaauagcgagugcaucacccccaacgguuccauuccuaaugauaagccauuucagaacgugaauagaaucacguacggggccugucccagguaugugaaacagaacacucuuaagcuggcuacaggaaugcggaaugucccugaaaaacaaccacguggcauauucggcgccauugcaggguuuaucgagaacggaugggaagguaugguugacggcugguacggguuccgccaccaaaauucugagggaaccggccaggcugccgauuugaaaagcacucaggcggccaucaaccagauuaaugguaaacucaacagacugaucgggaagacaaaugagaaguuucaucagauugaaaaagaguucucagaaguggagggcaggauacaggacuuagaaaaguauguagaggauaccaaaaucgaccuguggaguuacaacgcagagcuccuuguggcucuggaaaaccaacacacgauugauuugaccgacuccgagaugaauaagcuauucgaacggacaaagaagcagcugcgagagaacgccgaagauaugggaaauggcugcuuuaagaucuaucauaaaugugacaacgcuugcaucgggagcauucgcaauggaacuuacgaucacgacgucuacagagacgaggcccucaacaauagguuccagauaaaggguguggagcugaaaucuggcuauaaggauuggauccuuuggauuucauuugcaaucaguugcuuccuguuguguguugcccuccugggguuuauuaugugggcuugccagaaaggaaacauccgguguaauauaugcaucuga

SEQ ID NO: 136829 - RNA, 1698 nt, Artificial Sequence; identical to SEQ ID NO: 136826
  derived and/or modified CDS sequence (opt3) from hemagglutinin__InfluenzaA__AFJ74694

SEQ ID NO: 136830 - RNA, 1701 nt, Artificial Sequence
  derived and/or modified CDS sequence (opt3) from hemagglutinin__InfluenzaA__AFJ74695
augaagaccaucauugcccugagcuacauacucugccuuguguucgcucagaaacugcccggcaacgacaauuccacagcaacuuuguguuuagggcaccaugccgucccuaacggaacgcugguuaagaccaucacaaaugaucaaauugaggugacuaacgcgaccgaacuuguacagaauagcucaacagguagaaucugcgacaguccacaccagauucucgauggcgagaacuguacccugaucgacgcucuacugggggauccgcauugcgacggauuucagaauaaagaaugggauuuguucguggagaggagcaaggccuauuccaacuguuaccccuaugacgucccugauuacgugucucuccggucgcugguugcaucaagcggcacucuggaauuuaauaacgagaguuucaauuggacagguguggcccaagacgggaccuccucugcuugcaaacgccgaagcgauaaguccuuuuucucacgucucaacugguuacaccagcugaaguauaaauacccagcacuuaaugucacgaugcccaacaaugagaaguuugacaaauuguauauauggggagugcaucacccuggcacugauagugaccagaucagccuguacgccagagcuucuggcaggguaaccguuuccacaaagcggucacagcaaacugugauuccaaacaucgggagccgccccugggucagaggagugaguucuaaaauuuccaucuacuggaccauagugaagccuggugacauucuacucaucaacagcacaggcaaucugauugccccaaggggguauuucaagauccggucgggaaaaucuuccaucaugcgcucagaugcgccgauuggcaaguguaacagugaaugcauaacccccaaugguagcaucccuaacgacaaaccauuucagaaugucaaccgaauuacguacgggcccuguccuagauauguuaagcagaauacucuuaaacuggcaacaggaaugaggaacgugccagagaagcagacccggggcaucuucggcgccauagcuggguuuauugaaaauggaugggaggguaugguagauggcugguacggguuccgucaccaaaacuccgagggaacuggccaggccgcagacuugaaaucuacacaggcugccaucaaucaaaucaacgguaagcucaaucgccugauugaaaagaccaacgagaaauuucaucagaucgaaaaggaguucagcgaaguggaggggaggauucaggauuuagagaaauaugucgaagacacgaagauagaucuguggucauacaaugcggagcuccuuguggcccuggaaaaccagcacaccaucgacuugacagauagugagaugaacaaacuauucgaaagaacuaagaagcaacugcgggagaaugcagaggacaugggcaacggaugcuuuaaaauuuaucauaagugugauaaugcuugcaucggcuccauccgaaacgggaccuacgaccacgacguuuaccgcgaugaagcccucaauaacagauuccagauuaaaggaguggagcugaagucugguuauaaagacuggauacuuuggaucucuuuugcuauuucaugcuuccuguuguguaucguccuccugggcuuuauuaugugggccugccagaaggggaauaucagguguaacauaugcaucuga

SEQ ID NO: 136831 - RNA, 1701 nt, Artificial Sequence
  derived and/or modified CDS sequence (opt3) from hemagglutinin__InfluenzaA__AFJ74727
augaagaccaucauugcccugagcuacauacucugccuuguguucgcucagaaacugcccggcaacgacaauuccacagcaacuuuguguuuagggcaccaugccgucccuaacggaacgaucguuaagaccauuacaaaugaucaaaucgaggugacuaacgcgaccgaacugguacagucuucaaguacagguggcauuugcgacagcccacaccagauccuagauggggagaauuguacccucauagacgcucugcuuggagauccgcagugcgacggcuuucaaaacaaaaagugggaucuguucguggaaagauccaaagccuauucuaauuguuaccccuaugacgucccugauuacgcaucguugaggucacucguggccagcagugguacucuggaguuuaacaaugaauccuucaacuggacagggguuacccagaauggaacgucuagcgcuugcaagcggcgcuccaacaagucauuuuucagucgacugaauuggcucacucaguuaaaauauaaguacccagcacugaacgugaccaugcccaauaacgagaaauuugacaaacuuuauaucuggggcguccaucacccuggcacagauagcgaccagauuucuuuguacgcccaggcuuccgggcguaucacugugucaaccaagagaagccagcagacaguaauuccaaacaucggaaguaggccccggguucgcgauauaucuuccagaauuagcaucuacuggaccauugugaagccuggugacauccugcuaaucaauucgacgggcaaccucauugccccaaggggguauuucaagauacggucuggaaaauccucaaucaugcgcagugacgcgccgauuggcaaguguaauagcgagugcaucacucccaacgguuccauaccuaaugauaaaccauuucagaacgucaaucgaauuacauacggggcaugucccagauaugugaagcaaaacacccugaaacuugccacuggaaugaggaaugugccugaaaagcagacacggggcaucuucggcgcuaucgccggguuuauugagaacggaugggaagguauggucgacggcugguacggguuccgucaucaaaauucugagggaaccggccaagcagcugaucugaaaagcacgcaggccgcgaucaaccagauuaaugguaaguugaaccgccucauagggaagaccaaugagaaauuucaccagaucgaaaaggaguucucagaaguugagggcaggauucaagaccuggaaaaauauguggaggauacaaagaucgacuuauggaguuacaacgccgagcugcucguagcacuugaaaaccagcacacuaucgaucugaccgacuccgagaugaauaaauuguucgaaagaacaaagaagcagcuacgggagaacgcugaagauaugggaaauggcugcuuuaaaauuuaucauaagugugacaacgccugcauagggagcauccgaucuggaacuuacgaucacgacguguaccgcgacgaggcucugaauaacagauuccagauuaaaggugucgagcucaagucaggcuauaaagauuggauccuguggauuaguuuugccaucagcugcuuccuucuguguguggcauugcucggguuuauaaugugggccugccaaaagggaaauaucagguguaacauuugcaucuga

SEQ ID NO: 136832 - RNA, 1698 nt, Artificial Sequence; identical to SEQ ID NO: 136826
  derived and/or modified CDS sequence (opt3) from hemagglutinin__InfluenzaA__AFJ74743

SEQ ID NO: 136833 - RNA, 1701 nt, Artificial Sequence; identical to SEQ ID NO: 136825
  derived and/or modified CDS sequence (opt3) from hemagglutinin__InfluenzaA__AFJ74744

SEQ ID NO: 136834 - RNA, 1698 nt, Artificial Sequence; identical to SEQ ID NO: 136826
  derived and/or modified CDS sequence (opt3) from hemagglutinin__InfluenzaA__AFJ74760

SEQ ID NO: 136835 - RNA, 1701 nt, Artificial Sequence
  derived and/or modified CDS sequence (opt3) from hemagglutinin__InfluenzaA__AFJ74761
augaagaccaucauugcccugagcuacauacucugccuuguguucgcucagaaacugcccggcaacgacaauuccacagcaacuuuguguuuagggcaccaugccgucccuaacggaacgaucguuaagaccauuacaaaugaucaaaucgaggugacuaacgcgaccgaacugguacagucuucaaguacagguggcauuugcgacagcccacaccagauccuagauggggagaauuguacccucauagacgcucugcuuggagauccgcagugcgacggcuuucaaaacaaaaagugggaucuguucguggaaagauccaaagccuauucuaauuguuaccccuaugacgucccugauuacgcaucguugaggucacucguggccagcagugguacucuggaguuuaacaaugaauccuucaacuggacagggguuacccagaauggaacgucuagcgcuugcaagcggcgcuccaacaagucauuuuucagucgacugaauuggcucacucaguuaaaauauaaguacccagcacugaacgugaccaugcccaauaacgagaaauuugacaaacuuuauaucuggggcguccaucacccuggcacagauagcgaccagauuucuuuguacgcccaggcuuccgggcguaucacugugucaaccaagagaagccagcagacaguaauuccaaacaucggaaguaggccccggguucgcgauauaucuuccagaauuagcaucuacuggaccauugugaagccuggugacauccugcuaaucaauucgacgggcaaccucauugccccaaggggguauuucaagauacggucuggaaaauccucaaucaugcgcagugacgcgccgauuggcaaguguaauagcgagugcaucacucccaacgguuccauaccuaaugauaaaccauuucagaacgucaaucgaauuacauacggggcaugucccagauaugugaagcaaaacacccugaaacuugccacuggaaugaggaaugugccugaaaagcagacacggggcaucuucggcgcuaucgccggguuuauugagaacggaugggaagguauggucgacggcugguacggguuccgucaucaaaauucugagggaaccggccaagcagcugaucugaaaagcacgcaggccgcgaucaaccagauuaaugguaaguugaaccgccucauagggaagaccaaugagaaauuucaccagaucgaaaaggaguucucagaaguugagggcaggauucaagaccuggaaaaauauguggaggauacaaagaucgacuuauggaguuacaacgccgagcugcucguagcacuugaaaaccagcacacuaucgaucugaccgacuccgagaugaauaaauuguucgaaagaacaaagaagcagcuacgggagaacgcugaagauaugggaaauggcugcuuuaaaauuuaucauaagugugacaacgccugcauagggagcauccgaaauggaacuuacgaucacgacguguaccgcgacgaggcucugaacaauagauuccagauuaaaggugucgagcucaagucuggcuauaaagauuggauccuguggauuucauuugccaucaguugcuuccuucuguguguggcauugcucggguuuauaaugugggccugccaaaagggaaacaucagguguaauauuugcaucuga

SEQ ID NO: 136836 - RNA, 1698 nt, Artificial Sequence; identical to SEQ ID NO: 136826
  derived and/or modified CDS sequence (opt3) from hemagglutinin__InfluenzaA__AFJ74779

SEQ ID NO: 136837 - RNA, 1701 nt, Artificial Sequence; identical to SEQ ID NO: 136825
  derived and/or modified CDS sequence (opt3) from hemagglutinin__InfluenzaA__AFJ74780

SEQ ID NO: 136838 - RNA, 1701 nt, Artificial Sequence
  derived and/or modified CDS sequence (opt3) from hemagglutinin__InfluenzaA__AFJ74804
augaagaccaucauugcccugagcuacauacucugccuuguguucgcucagaaacugcccggcaacgacaauuccacagcaacuuuguguuuagggcaccaugccgucccuaacggaacgaucguuaagaccauuacaaaugaucaaaucgaggugacuaacgcgaccgaacugguacagucuucaaguacagguggcauuugcgacagcccacaccagauccuagauggggagaauuguacccucauagacgcucugcuuggagauccgcagugcgacggcuuucaaaacagaaaaugggaucuguucguggaaagguccaaggccuauucuaauuguuaccccuaugacgucccugauuacgcaucguugcggucacucguggccagcagugguacucuggaguuuaacaaugaauccuucgacuggacagggguuacccagaacggaacgucuagcgcuugcaaacgccgauccaauaagucauuuuucagucgucugaacuggcucacucauuuaaaguauaaauacccagcacugaaugugaccaugcccaacaaugagaaguuugauaaacuuuauaucuggggcguccaccauccuggcacagacagcgaucagauuucuuuguacgcccaggcuuccgggagaaucacugugucaaccaagaggagccaacagacaguaauuccaaacaucggaagucggccccgcguuagagacgugucuuccaggauaagcauuuacuggaccaucgucaaaccuggugacauucugcuaaucaacucgacgggcaaucucaucgccccacggggguauuucaagauucgcucuggaaaguccucaauaaugcgaagugaugcgccgaucggcaaauguaacagcgagugcauuacucccaaugguuccaucccuaacgacaagccauuucagaaugugaacagaauaacauacggggcaugucccagguaugugaaacagaauacccugaagcuggccacuggaaugcggaacgucccugaaaaacaaacacguggcauuuucggcgcuaucgccggguuuaucgagaauggaugggaagguaugguugauggcugguacggguuccgccaccagaacucugagggaaccggccaggcagcugaccuuaagagcacgcaagccgcgauuaaucagaucaacgguaaauugaauagacucauugggaagaccaacgagaaguuucaccagauagaaaaagaguucucagaaguggagggcaggauccaggaucuggaaaaguauguagaggacacaaaaauugauuuauggaguuacaaugccgagcugcucguggcacuugaaaaccaacauacuaucgaccugaccgauuccgagaugaacaaguuguucgaacggacuaaaaagcagcuacgagagaaugcugaagacaugggaaacggcugcuuuaagaucuaucacaaaugugauaaugccugcauugggagcauacgcaacggaacauacgaccaugacgucuacagagaugaggcucugaauaacagguuccagaucaaggguguggagcucaaaucuggcuauaaggacuggauucuguggaucucauuugccauuaguugcuuccuucuguguguugcauugcucggguuuaucaugugggccugccagaaaggaaauauacgguguaacaucugcauuuga

SEQ ID NO: 136839 - RNA, 1701 nt, Artificial Sequence
  derived and/or modified CDS sequence (opt3) from hemagglutinin__InfluenzaA__AFJ74819
augaagaccaucauugcccugagcuacauacucugccuuguguucgcucagaaacugcccggcaacgacaauuccacagcaacuuuguguuuagggcaccaugccgucccuaacggaacgaucguuaagaccauuacaaaugaucaaaucgaggugacuaacgcgaccgaacugguacagucuucaaguacagguggcauuugcgacagcccacaccagauccuagauggggagaauuguacccucauagacgcucugcuuggagauccgcagugcgacggcuuucaaaacaaaaagugggaucuguucguggaaagauccaaagccuauucuaauuguuaccccuaugacgucccugauuacgcaucguugaggucacucguggccagcagugguacucuggaguuuaacaaugaauccuucgacuggacagggguuacccagaacggaacgucuagcgcuugcaagcggcgcuccaauaagucauuuuucagucgacugaacuggcucacucauuuaaaauauaaguacccagcacugaaugugaccaugcccaacaaugagaaauuugauaaacuuuauaucuggggcguccaccauccuggcacagacagcgaucagauuaacuuguacgcccaggcuucugggcguaucacuguguccaccaagagaucacaacagacaguaauuccaaacaucggaagcaggccccggguucgcgacgugaguucuagaauauccauuuacuggaccaucgucaagccuggugacauucugcuaaucaauagcacgggcaaccucaucgccccaaggggguauuucaagauucggucgggaaaaucuuccauaaugcgcucagaugcgccgaucggcaaguguaauagugagugcauuacucccaacgguagcaucccuaaugacaaaccauuucagaacgugaaucgaauaacauacggggcaugucccagauaugugaagcagaacacccugaaacuugccacuggaaugaggaaugucccugaaaagcaaacacggggcauuuucggcgcuaucgccggguuuaucgagaacggaugggaagguaugguugauggcugguacggguuccgucaccaaaauuccgagggaaccggccaggcagcugaccugaaaucuacgcaggccgcgauuaaccagaucaaugguaaguugaaccgccucauugggaagaccaaugagaaauuucaccagauagaaaaggaguucagcgaaguggagggcagaauccaggaucuggaaaaauauguagaggacacaaagauugauuuauggucauacaacgccgagcugcucguggcacuugaaaaccaacauacuaucgaccugaccgauagugagaugaauaaauuguucgaaaggacaaagaagcagcuacgggagaacgcugaagacaugggaaauggcugcuuuaaaaucuaucacaagugugauaacgccugcauuggguccauacgaaauggaacuuacgaccaugacgucuaccgcgaugaggcucugaacaauagauuccagaucaaagguguggagcucaagagcggcuauaaagacuggauucuguggaucucuuuugccauuucaugcuuccuucuguguguugcauugcucggguuuaucaugugggccugccagaagggaaacauaagguguaauaucugcauuuga

SEQ ID NO: 136840 - RNA, 1701 nt, Artificial Sequence; identical to SEQ ID NO: 130693
  derived and/or modified CDS sequence (opt3) from hemagglutinin__InfluenzaA__AFJ74842

SEQ ID NO: 136841 - RNA, 1698 nt, Artificial Sequence
  derived and/or modified CDS sequence (opt3) from hemagglutinin__InfluenzaA__AFJ75036
augaaggugaaacugcucguccuucugugcaccuucacagccacuuacgcugacacgaucuguauuggcuaucacgcaaacaauagcaccgauacaguugacacuguguuggagaagaacguaaccgugacacauuccgucaauuuacuggaagauucucacaacgggaaacuaugccuccugaagggaauagcgccccuucagcuggguaauuguucaguggccggcuggaucuuggggaacccugagugcgaacuccugauuaguagagagagcugguccuacaucguugaaaaaccaaauccggagaacggaaccuguuaucccggccauuuugcugacuacgaggaacugagggagcaacucucuucggugagcucauucgaacgguuugagauuuucccuaaggagaauaguuggccaaaccacacugucacagguguguccgccucuugcagccauaaugggaaguccucauuuuauaaaaacuuacuguggcuuaccggaaagaauggcuuguaccccaaccugaguaaaagcuaugcaaauaacaaggaaaaagagguucuaguacucuggggcgugcaccacccuccaaacaucggggaucagcgcgcccuguaccauacggaaaaugcuuacgucucugugguguccucacacuauagccgaaaguucacucccgagauagcaaagcguccuaaagucagagaccaggaaggaaggaucaacuacuauuggacccuucuggagccaggugauacaauuaucuuugaggccaauggcaacuugauugcuccgcgguacgccuucgcgcucagucgcggguuuggaucuggcaucauaaauuccaacgcacccauggacgaaugugaugccaagugccagacuccucaaggugcuauuaauagcucgcugccauuccagaacguucaucccgugaccaucggggaguguccuaaauauguaagaucugccaaguuaaggauggugacaggacugcggaauauuccauccauccagucacgcggccucuuuggcgcaaucgcuggguucauugaaggagguuggaccggcauggucgacgggugguacggauaucaccaccagaacgagcaaggcagugguuacgccgcggaucagaaaagcacgcagaaugccauaaacgggaucacuaauaaggugaacuccguuauugaaaagaugaauacacaguuuaccgcagugggcaaggaguucaacaaacuugagcgaagaauggaaaaccugaauaaaaaggucgacgauggauucaucgacauauggacuuacaacgcugaguugcuagugcugcucgaaaaugagaggacacuggacuuucaugauucuaacguuaaaaaucuuuaugaaaagguaaaaagccaacugaagaacaaugccaaggagauuggcaacgggugcuucgaguuuuaccacaaauguaaugacgaaugcauggagucagugaagaacggaaccuaugauuaccccaaauauagugaagaguccaaguugaaucgggagaaaaucgacggugucaagcucgaaagcaugggcguguaccagauccuggcuauuuauucuacggucgccucaaguuuagugcugcuaguuagccucggggcaaucuccuucuggaugugcucuaacggaucgcugcagugucguauuugcauauga

SEQ ID NO: 136842 - RNA, 1701 nt, Artificial Sequence; identical to SEQ ID NO: 128678
  derived and/or modified CDS sequence (opt3) from hemagglutinin__InfluenzaA__AFJ75047

SEQ ID NO: 136843 - RNA, 1698 nt, Artificial Sequence
  derived and/or modified CDS sequence (opt3) from hemagglutinin__InfluenzaA__AFJ75058
augaaggugaaacugcucguccuucugugcaccuucacagccacuuacgcugacacgaucuguauuggcuaucacgcaaacaauagcaccgauacaguugacacuguguuggagaagaacguaaccgugacacauuccgucaauuuacuggaagauucucacaacgggaaacuaugccuccugaagggaauagcgccccuucagcuggguaauuguucaguggccggcuggaucuuggggaacccugagugcgaacuccugauuaguagagagagcugguccuacaucguugaaaaaccaaauccggagaacggaaccuguuaucccggccauuuugcugacuacgaggaacugagggagcaacucucuucggugagcucauucgaacgguuugagauuuucccuaaggagaguuccuggccaaaucacacugucacaggugugucugccagcugcucccauaacgggaagucaaguuuuuauaaaaauuuacuguggcuuaccggaaagaacggcuuguaccccaaucugagcaaaucuuaugcaaacaauaaggaaaaagaggugcuaguucucuggggcgugcaccacccuccaaacaucggggaucagcgcgcccuguaccauacggaaaacgcuuacgucuccguggugucaagccacuauagucgaaaguucacucccgagauagcaaagcguccuaaagucagagaccaggaaggaaggaucaauuacuauuggacccuucuggagccaggugauacaauuaucuuugaggccaacggcaauuugauugcuccgcgguacgccuucgcgcucucucgcggguuuggauccggcaucauaaacagcaaugcacccauggacgaaugugaugccaagugccagacuccucaaggugcuauuaacucgucucugccauuccagaauguucaucccgugaccaucggggaguguccuaaauauguaagauccgccaaguuaaggauggugacaggacugcggaacauuccaucaauccagagucgcggccucuuuggcgcaaucgcuggguucauugaaggagguuggaccggcauggucgacgggugguacggauaucaccaccagaaugagcaaggcagcgguuacgccgcggaucagaaauccacgcagaacgccauaaaugggaucacuaacaagguaaauucuguuauugaaaagaugaacacacaguuuaccgcagugggcaaggaguucaauaaacuugagcgaagaauggaaaaccugaacaaaaaggucgacgauggauucaucgacauauggacuuacaaugcugaguugcuagugcugcucgaaaacgagaggacacuggacuuucaugauagcaauguuaaaaaccuuuaugaaaagguaaaaucacaacugaagaauaacgccaaggagauuggcaaugggugcuucgaguuuuaccacaaauguaacgacgaaugcauggagagugugaagaauggaaccuaugauuaccccaaauauuccgaagagagcaaguugaaccgggagaaaaucgacggugucaagcucgaaucuaugggcguguaccagauccuggcuauuuauucaacggucgccaguagcuuagugcugcuaguuucccucggggcaaucucuuucuggaugugcucgaauggaagccugcagugucguauuugcauauga

SEQ ID NO: 136844 - RNA, 1698 nt, Artificial Sequence
  derived and/or modified CDS sequence (opt3) from hemagglutinin__InfluenzaA__AFJ75069
augaaggugaaacugcucguccuucugugcaccuucacagccacuuacgcugacacgaucuguauuggcuaucacgcaaacaauagcaccgauacaguugacacuguguuggagaagaacguaaccgugacacauuccgucaauuuacuggaagauucucacaacgggaaacuaugccuccugaagggaauagcgccccuucagcuggguaauuguucaguggccggcuggaucuuggggaacccugagugcgaacuccugauuaguagagagagcugguccuacaucguugaaaaaucuaauccagagaacggaaccuguuauccgggccauuuugcugacuacgaggaacugagggagcaacucucgucagugagcaguuucgaacgguuugagauuuuccccaaggaguccucuuggccuaaucacacuacaaccggugucagcgccuccugcucacauaacggggaaaguagcuuuuauaagaauuuacuguggcuuacgggaaagaacggcuuguacccaaaucugucuaaguccuaugcaaacaauaaagagaaggaagugcuaguacucuggggcguucaccaucccccuaacaucggggaucagcgcgcccuguaccacacugagaacgcuuacgugucagucgugagcagucacuauucucgaaaauucaccccagaaauagcaaagcgucccaaggugagagaccaggagggaaggaucaauuacuauuggacacuucuggagccuggugauacuauuaucuuugaagccaacggcaauuugauugcuccacgguacgccuucgcgcucucccgcggguuuggaagcggcaucauaaacucgaaugcaccgauggacgagugugaugccaaaugccagacaccccaaggugcuauuaacucuucccugccuuuccagaauguccauccaguuaccaucggggaaugucccaaguaugugagaucagccaaauuaaggaugguaaccggacugcggaacauuccuaguauccagagccgcggccucuuuggcgcaaucgcuggguucauugagggagguuggacgggcaugguggacgggugguacggauaucaccaccagaaugaacaaggcuccgguuacgccgcggaucagaagucuacucagaacgccauaaaugggaucacaaacaaagucaauagcgugauugagaagaugaacacccaguuuacugcaguuggcaaagaguucaauaaacuugaacgaagaauggagaaccugaacaagaaaguggacgauggauucaucgacauauggacauacaaugcugaauugcuaguccugcucgagaacgaaaggacccuggacuuucaugauucaaaugugaagaaccuuuaugagaaaguaaagagucaacugaaaaauaacgccaaggagauuggcaaugggugcuucgaauuuuaccacaaguguaacgacgagugcauggaauccguuaaaaauggaacguaugauuacccaaaguauagcgaggagucuaaauugaaccgggaaaagaucgacggugugaaacucgagucaaugggcgucuaccagauccuggcuauuuauaguaccguggccagcuccuuaguccugcuagugucucucggggcaaucucguucuggaugugcagcaauggaucccugcagugucguauuugcauauga

SEQ ID NO: 136845 - RNA, 1701 nt, Artificial Sequence
  derived and/or modified CDS sequence (opt3) from hemagglutinin__InfluenzaA__AFJ75091
augaagaccaucauugcccugagcuacauacucugccuuguguucgcucagaaacugcccggcaacgacaauuccacagcaacuuuguguuuagggcaccaugccgucccuaacggaacgaucguuaagaccauuacaaaugaucaaaucgaggugacuaacgcgaccgaacugguacagucuucaaguacagguggcauuugcgacagcccacaccagauccuagauggggagaauuguacccucauagacgcucugcuuggagauccgcagugcgacggcuuucaaaacaaaaagugggaucuguucguggaaagauccaaagccuauucuaauuguuaccccuaugacgucccugauuacgcaucguugaggucacucguggccagcagugguacucuggaguuuaacaaugaauccuucaacuggacagggguuacccagaauggaacgucuagcgcuugcaagcggcgcuccaacaauucauuuuucagucgacugaacuggcucacucauuuaaaguuuaaauauccagcacugaaugugaccaugcccaacaacgagaaguucgacaaacuuuacaucuggggcguccaccauccuggcacagauaaugaccagaucuuuuuguaugcccaggcuagcgggcguauuacugugucuaccaagauuucccaacagacaguaaucccaaacauaggaucaagacccaggguucggaauauuccuagccgcaucaguauuuacuggaccaucgugaaaccaggugauauccugcuaauuaacucuacgggcaaucucauagccccgagaggguacuucaagaucagguccggaaagagcucgauuaugcggucugacgcgcccaucggcaaauguaacuccgagugcauaacuccuaaugguucaauuccaaacgacaagcccuuucagaaugucaaccgcaucacauauggggcauguccucgauacgugaaacagaauacccugaagcuggccacuggaaugagaaacgugccagaaaaacaaacaaggggcaucuucggcgcuauugccggguuuaucgagaauggaugggaagguauggucgauggcugguauggguuccggcaccagaacagugagggaauuggccaggcagcugaccuuaagagcacccaagccgcgauagaucagaucaaugguaaauugaaccgucucauugggaagacgaacgagaaguuccaccagaucgaaaaagaguuuuccgaaguugagggccgcauccaggaccuggaaaaguacguggaggauaccaaaauugacuuauggucuuauaaugccgaucugcucguagcacuugagaaccaacauacaauagaccugacugauagcgaaaugaauaaguuguucgagaaaaccaagaagcagcuaagagaaaacgcugaggacaugggaaauggcugcuuuaaaaucuaccacaagugugauaacgccugcauugggucaaucaggaauggaacauaugaccaugacguguaccgggaugaagcucugaacaaucgauuccagauuaaaggugucgagcucaagaguggcuacaaagacuggauccuguggauauccuuugccaucagcugcuuccuucuguguguggcauugcucggguuuauuaugugggccugccagaagggaaacauccgcuguaauauuugcaucuga

SEQ ID NO: 136846 - RNA, 1701 nt, Artificial Sequence
  derived and/or modified CDS sequence (opt3) from hemagglutinin__InfluenzaA__AFJ75449
augaagaccaucauugcccugagcuacauacucugccuuguguucgcucagaaacugcccggcaacgacaauuccacagcaacuuuguguuuagggcaccaugccgucccuaacggaacgaucguuaagaccauuacaaaugaucaaaucgaggugacuaacgcgaccgaacugguacagucuucaaguacaggugagauuugcgacagcccacaccagauccuagauggcgaaaauuguacccucauagacgcucugcuuggggauccgcagugcgacggauuucaaaacaaaaagugggaucuguucguggagagauccaaagccuauucuaauuguuaccccuaugacgucccugauuacgcaucguugaggucacucguggccagcaguggcacucuggaauuuaacaaugaguccuucaacuggacagguguuacccagaaugggacgucuagcgcuugcauccggcgcuccaacaauucauuuuucagucgacugaacuggcucacucauuuaaaguuuaaguauccagcacugaaugugaccaugcccaacaacgagaaauucgacaagcuguacauuuggggaguccaccauccuggcacagauaaugaccagaucuuuuuguaugcccaggcuagcggcaaaauuacugugucuaccaagcguucccaacagacaguaaucccaaacauagggucaagacccaggguucggaauauuccuagccgcaucaguauuuacuggaccaucgugaaaccaggagauauccugcuaauuaacucuacggguaaucucauagccccgagaggcuacuucaagaucagguccggaaagagcucgauuaugcggucugacgcgcccaucgggaaauguaacuccgaaugcauaacuccuaauggcucaauuccaaacgacaagcccuuucagaaugucaaccgcaucacauauggugcauguccucgauacgugaaacagaauacccugaaacuugccacugggaugagaaacgugccagagaagcaaacaaggggaaucuucggcgcuauugccggcuuuaucgaaaaugggugggagggaauggucgaugguugguauggcuuccggcaccagaacagugaggggaccggacaggcagcugaccuuaagagcacgcaagccgcgauugaucagauaaauggcaaauugaaccgucucaucgguaagaccaacgaaaaguuccaccagauugagaaagaauuuuccgagguugaagggcgcauccaggaccuggagaaguacguggaggauacaaaaaucgacuuauggucuuauaaugccgaacugcucguagcacuugagaaccaacauacuauugaucugaccgacagcgaaaugaauaaguuguucgagaaaacaaagaagcagcuaagagaaaacgcugaggauaugggcaauggaugcuuuaaaauauaccacaagugugacaacgccugcaucggcucaauuaggaaugggacuuaugaucaugacguguaccgggacgaggcucugaacaaucgauuccagaucaaaggagucgaacucaagagugguuacaaagauuggauucuguggaucuccuuugccauaagcugcuuccuucuguguguggcauugcucggcuuuaucaugugggccugccagaaggggaacauucgcuguaauaucugcauuuga

SEQ ID NO: 136847 - RNA, 1701 nt, Artificial Sequence
  derived and/or modified CDS sequence (opt3) from hemagglutinin__InfluenzaA__AFJ75460
augaagaccaucauugcccugagcuacauacucugccuuguguucacacagaaacugcccggcaacgacaauuccacugcuacguuguguuuagggcaccaugcagucccuaacggaaccaucguuaagacaauuacuaaugaucaaaucgaggugaccaacgccacagaacugguacagucuucaaguaccggugagauuugcgacagcccacaccagauccuagauggcgaaaauuguacucucauagacgcgcugcuuggggauccgcagugcgacggauuucaaaacaaaaagugggaucuguucguggagagauccaaggcuuauucuaauuguuaccccuaugacgucccugauuacgccucguugaggucacucguggcaagcaguggcacacuggaauuuaacaaugaguccuucaacuggaccgguguuacgcagaaugggacuucuagcgccugcauccggcgcuccaacaauucauuuuucagucgacugaacuggcucacccauuuaaaauuuaaguauccagcucugaaugugacaaugcccaacaacgagaauuucgacaaacuuuacauuuggggaguccaccauccuggcacugauaacgaccagaucuuuuuguaugcacaggccagcggccguauuaccgugucuacaaagagaucccaacagaccguaaucccaaauauagggucaaggccccggguucgcaacauuccuagcagaaucaguauuuacuggacgaucgugaaaccaggagauauccugcuaauuaauucuacugguaaccucauagcuccgaggggcuacuucaagauccgguccgggaaaagcucgauuaugcgcucugacgcccccaucggaaaguguaauuccgaaugcauaacaccuaacggcucaauuccaaaugacaagcccuuucagaacgucaaucgaaucaccuauggugcguguccuagauacgugaaacagaacacucugaagcuggcaacagggaugaggaaugugccagagaaacaaacccggggaaucuucggcgccauugcuggcuuuaucgaaaacgggugggagggaauggucgaugguugguauggcuuccgucaccagaauagugaggggauuggacaggccgcagaccuuaagagcacgcaagcugccguugaucagauaaacggcaaauugaaccgccucaucgguaagaccaaugaaaaauuccaccagauugagaaggaauuuuccgagguggaagggagaauccaggaccuggagaaguacguagaggauacaaaaaucgacuuauggucuuauaacgcggaacugcucguggcccuugagaaucaacauacuauugaucugaccgacagcgaaaugaacaaguuguucgagaaaacaaagaaacagcuaagggaaaaugcagaggauaugggcaacggaugcuuuaagauauaccacaagugugacaaugcuugcaucggcucaauucggaacgggacuuaugaucaugacgucuaccgagacgaggcccugaauaaccgcuuccagaucaaaggaguggaacucaagagugguuacaaagauuggauucuguggaucuccuuugcuauaagcugcuuccuucuguguguugccuugcucggcuuuaucaugugggcaugccagaaggggaauauuagauguaacaucugcauuuga

SEQ ID NO: 136848 - RNA, 1698 nt, Artificial Sequence
  derived and/or modified CDS sequence (opt3) from hemagglutinin__InfluenzaA__AFJ75517
augaaggugaaacugcucguccuucugugcaccuucacagccacuuacgcugacacgaucuguauuggcuaucacgcaaacaauagcaccgauacaguugacacuguguuggagaagaacguaaccgugacauacuccgucaauuuacuggaagauaaccauaaugggaaacuaugccuccugaagggaauagcgccccuucagcuggguaacuguucuguggccggcuggaucuuggggaauccugagugcgaacuccugauuucaaaagagaguuggagcuauaucguugaaagaccaaacccggagaauggaaccuguuaccccggccacuuugcugacuaugaggaacugagggagcaacucuccucugugucgucauucgaacgguuugagauuuucccuaaggagagcaguuggccaaaccauacugucacagguguguccgccucuugcagccacaauggggaauccucauuuuacaagaacuuacuguggcuuaccggcaaaaauggauuguaucccaaccugaguaagagcuacgcaaauaacaaagagaaggaaguucuaguacucuggggcgugcaucacccuccaaacaucggggaucagaugacgcuguaccacaaaaagaaugccuaugucucugugguguccucacauuacagccgcaaguucacucccgagauagcuaaacgaccuaagguccgugaccaggaaggaagaaucaacuauuacuggacccuucuggagccaggugauacaauuaucuuugaggcaaauggcaacuugauugccccgagguaugcuuucgcccucaaucggggguuuggaaguggcaucauaaacucuaaugcgcccauggacgaaugugaugcaaaaugccagacuccucaaggugccauuaacuccagccugccauuccagaauguucaccccgugaccaucggggaguguccuaaguacguacgcucggcuaaauuaagaauggugacaggacugaggaacauuccaucuauccagucccggggccucuuuggcgccaucgcaggguucauugaaggagguuggaccggcauggucgacgggugguauggauaccaucaccagaaugagcaaggcucagguuacgcugccgaucagaagaguacgcagaacgcgauaaaugggaucacuaacaaagugaauagcguuauugaaaagaugaacacacaguuuaccgccgugggcaaggaguucaacaaacuugagcgccgaauggaaaaucugaacaagaaagucgacgauggauucaucgacguguggacuuauaaugcagaguugcuaguacugcucgaaaacgagagaacacuggacuuucacgauuccaauguuaagaaccuuuacgaaaaagugaagacccaacugaagaauaacgcuaaagagauaggcaaugggugcuucgaguuuuaucauaaguguaacgacgaaugcauggagucugucaaaaauggaacguacgauuaucccaaguacagcgaagagucaaaauugaguagggagaagauugacggugugaagcucgaauccaugggcgucuaucagauccuggccaucuacagcaccguggcuucuucauuaguucugcuagugagucucggggccauuagcuucuggaugugcuccaacggaucucugcagugucggaucugcauuuga

SEQ ID NO: 136849 - RNA, 1698 nt, Artificial Sequence
  derived and/or modified CDS sequence (opt3) from hemagglutinin__InfluenzaA__AFJ75560
augaaggugaaacugcucguccuucugugcaccuucacagccacuuacgcugacacgaucuguauuggcuaucacgcaaacaauagcaccgauacaguugacacuguguuggagaagaacguaaccgugacacauuccgucaauuuacuggaagauaaccacaaugggaaacuaugccuccugaagggaauagcgccccuucagcuggguaacuguucuguggccggcuggaucuuggggaauccugagugcgaacuccugauuucaaaagagaguuggagcuacaucguugaaagaccaaacccggagaauggaaccuguuaucccggccauuuugcugacuacgaggaacugagggagcaacucuccucugugucgucauucgaacgguuugagauuuucccuaaggagagcaguuggccaaaccacacugucacagguguguccgccucuugcagccauaauggggaauccucauuuuauaagaacuuacuguggcuuaccggaaagaauggcuuguaccccaaccugaguaagagcuaugcaaauaacaaagagaaggaaguucuaguacucuggggcgugcaccacccuccaaacaucggggaucagaugacgcuguaccauaaagagaaugccuacgucucugugguguccucacacuauagccgcaaguucacucccgaaauagcuaagcgaccuaaaguccgugaccaggagggaagaaucaacuacuauuggacccuucuggagccaggugauacaauuaucuuugaagcaaauggcaacuugauugccccgagguacgcuuucgcccucagucggggguuuggaucuggcaucauaaauuccaacgcgcccauggacgagugugaugcaaagugccagacuccucaaggugccauuaauagcucgcugccauuccagaacguucaucccgugaccaucggggaauguccuaaauuuguacgcucugcuaaguuaagaauggugacaggacugaggaauauuccauccauccagucacggggccucuucggcgccaucgcaggguuuauugagggagguuggaccggcauggucgacgggugguauggauaccaccaccagaacgaacaaggcagugguuaugcugccgaucagaaaagcacgcagaaugcgauaaacgggaucacuaauaaggugaacuccguuauugagaaaaugaauacacaguucaccgccgugggcaaggaguucaacaaacuugaacgccgaauggagaaccugaauaaaaaggucgacgauggauuuaucgacguguggacuuacaacgcagaauugcuaguacugcucgagaaugaaagaacacuggacuuccaugauucuaacguuaaaaaucuuuacgagaaggugaaaaaccaacugaggaauaacgcuaaggagauaggcaaugggugcuuugaguucuaucacaaguguaacgacgaaugcauggaaagcgucaaaaauggaaccuacgauuaucccaaguacucagaggagaguaaauugucccgggaaaagauugacggugugaaacucgagagcaugggcgucuaucagauccuggccaucuacucuacgguggcuucaaguuuaguucugcuagugagccucggggccauuuccuuuuggaugugcucuaacggaucgcugcagugucguaucugcauuuga

SEQ ID NO: 136850 - RNA, 1698 nt, Artificial Sequence
  derived and/or modified CDS sequence (opt3) from hemagglutinin__InfluenzaA__AFJ75571
augaaggugaaacugcucguccuucugugcaccuucacagccacuuacgcugacacgaucuguauuggcuaucacgcaaacaauagcaccgauacaguugacacuguguuggagaagaacguaaccgugacacauuccgucaauuuacuggaagauaaccacaaugggaaacuaugccuccugaagggaauagcgccccuucagcuggguaacuguucuguggccggcuggaucuuggggaauccugagugcgaacuccugauuucaaaagagaguuggagcuacaucguugaaagaccaaacccggagaauggaaccuguuaucccggccauuuugcugacuacgaggaacugagggagcaacucuccucugugucgucauucgaacgguuugagauuuucccuaaggagagcaguuggccaaaccacacugucacagguguguccgccucuugcagccauaauggggaaaacuccuuuuauaagaauuuacuguggcuuaccggaaagaacggcuuguaccccaaucugucaaagaguuaugcaaacaacaaagagaaggaaguucuaguacucuggggcgugcaccacccuccaaauaucggggaucagaugacgcuguaccauaaagagaacgccuacgucagcguggugucuucccacuauucacgcaaguucacucccgaaauagcuaagcgaccuaaaguccgugaccaggagggaagaaucaauuacuauuggacccuucuggagccaggugauacaauuaucuuugaagcaaacggcaauuugauugccccgagguacgcuuucgcccucagccggggguuuggaaguggcaucauaaacucuaaugcgcccauggacgagugugaugcaaagugccagacuccucaaggugccauuaacuccagccugccauuccagaauguucaucccgugaccaucggggaauguccuaaauauguacgcucggcuaaguuaagaauggugacaggacugaggaacauuccaucuauccagucccggggccucuuuggcgccaucgcaggguucauugagggagguuggaccggcauggucgacgggugguacggauaucaccaccagaaugaacaaggcucagguuacgcugccgaucagaaaaguacgcagaacgcgauaaaugggaucacuaacaaggugaauagcguuauugagaaaaugaacacacaguuuaccgccgugggcaaggaguucaacaaacuugaacgccgaauggagaaucugaacaaaaaggucgacgauggauucaucgacguguggacuuacaaugcagaauugcuaguacugcucgagaacgaaagaacacuggacuuucaugauuccaauguuaaaaaccuuuaugagaaggugaaaaaucaacugaagaacaaugcuaaggagauaggcaacgggugcuucgaauuuuaccacaaauguaaugacgagugcauggaaucugucaagaacggaaccuaugauuaccccaaauauagcgaggagucaaaguugaguagggaacggauugacggugugaaacucgaguccaugggcgucuaccagauccuggccaucuauagcacgguggcuucuucauuaguucugcuagugagucucggggccauuagcuucuggaugugcuccaauggaucucugcagugucguaucugcauuuga

SEQ ID NO: 136851 - RNA, 1701 nt, Artificial Sequence
  derived and/or modified CDS sequence (opt3) from hemagglutinin__InfluenzaA__AFJ75593
augaagaccaucauugcccugagcuacauacucugccuuguguucgcucagaaacugcccggcaacgacuccucuacagcaacuuuguguuuagggcaccaugccgucccuaauggaacgaucguuaagaccauuacaaacgaucaaaucgaggugacuaaugcgaccgaacugguacagucaaguagcacaggugagauuugcaacuccccacaccagauccuagacggcgaaaauuguacccucauagaugcucugcuuggggacccgcagugcgauggauuucaaaacaaaaagugggaccuguucguggagagaucuaaagccuauucgaauuguuaccccuaugaugucccugacuacgcaucauugaggagccucguggccaguuccggcacucuggaauuuaacaaugagucuuucaacuggacagguguuacccagaaugggacgagcuccgcuugcauccggcgcucaaacaauagcuuuuucagucgacugaacuggcucacucauuuaaaguuuaaguauccagcacugaaugugaccaugcccaacaacgagaaauucgauaaacuuuacauuuggggaguccaccauccuggcacagacaaugaucagaucuuuuuguaugcccaggcuucuggccguauuacuguguccaccaagagaucacaacagacaguaaucccaaacauagggagcaggccccggguucgcaauauuccuaguagaaucucuauuuacuggaccaucgugaagccaggagacauccugcuaauuaacuccacggguaaucucauagccccgaggggcuacuucaaaauccggagcgggaagucgucuauuaugcgcuccgaugcgcccaucggaaaguguaacucagaaugcauaacuccuaauggcaguauuccaaacgacaaacccuuucagaaugucaaccgaaucacauauggugcauguccuagauacgugaagcagaauacccugaaacuugccacugggaugaggaacgugccagagaagcaaacacggggaaucuucggcgcuauugccggcuuuaucgaaaaugggugggagggaauggucgacgguugguauggcuuccgucaccagaacagcgaggggauuggacaggcagcugaucugaaauccacccaagccgcgauagaccagaucaauggcaaguugaaccgccucauugguaaaacgaacgaaaaguuccaccagaucgagaaggaauuuucugagguugaagggagaauccaggaucuggagaaauacguggaggacaccaagguagauuuauggagcuauaaugccgaacugcucguggcacuugagaaccaacauacaauugaccugacugauucagaaaugaauaaauuguucgagaagaccaaaaagcagcuaagggaaaacgcugaggacaugggcaauggaugcuuuaagauauaccacaaaugugauaacgccugcaucggcaguauucggaaugggacauaugaccaugaugucuaccgagacgaggcucugaacaaucgcuuccagaucaagggaguggaacucaaauccgguuacaaggacuggauucuguggaucagcuuugccauaucuugcuuccuucuguguguugcauugcucggcuuuaucaugugggccugccagaaagggaacauuagauguaauaucugcauuuga

SEQ ID NO: 136852 - RNA, 1698 nt, Artificial Sequence
  derived and/or modified CDS sequence (opt3) from hemagglutinin__InfluenzaA__AFJ75615
augaaggugaaacugcucguccuucugugcaccuucacagccacuuacgcugacacgaucuguguuggcuaucacgcaaacaauagcaccgauacaguggacacuguauuggagaagaacgugaccgucacacauuccgugaauuuacuggaaaacucucacaaugggaaacuaugccuccugaagggaauugcgccccuucagcuggguaacuguucaguugccggcuggauauuggggaauccugagugcgaacuccugaucaguaaagagagcugguccuacauuguggaaaagccaaacccggagaauggaaccuguuaucccggccauuuugcugauuacgaggaacugagagagcaacucucuucggucagcucauucgaaagguuugagaucuucccuaaggagaguuccuggccaaaccacacugugacagguguaucugccagcugcucccauaauggggaaucaaguuuuuaucggaacuuacuguggcuuaccggcaaaaauggauuguaccccaaccugagcaagucuuaugcaaauaacaaagagaaggaaguucuagugcucuggggcguccaccacccuccaaacauuggggaccagaaagcccuguaccauacggagaaugcuuacguguccguggucucaagccacuauagucgcaaguucacucccgaaaucgcaaagcgaccuaaaguucgugaucaggagggaagaauaaacuacuauuggacccuucuggagccaggugacacaaucauuuuugaagccaauggcaacuugaucgcuccgagguacgccuucgcgcucucucggggguuuggauccggcauuaucaauagcaacgcacccauggauaagugugacgccaaaugccagacuccucaaggugcuauaaauucgucucugccauuccagaacgugcaucccguaaccauuggggaguguccuaaguaugugcgcuccgccaaauuaagaauggucacaggacugaggaauaucccaucaauucagagucggggccucuuuggcgcaaucgcuggguucaucgaaggagguuggaccggcaugguggaugggugguacggauaucaccaccagaacgagcaaggcagcgguuacgccgcggaccagaaguccacgcagaaugccauuaacgggauaacuaauaaaguuaacucugugaucgaaaagaugaauacacaguuuaccgaggucggcaaggaguucaacaaacuugaacgccgaauggagaaccugaauaagaaaguggaugacggauucauugauaucuggacuuacaacgcagaauugcuaguacugcucgagaaugaaagaacacuggacuuucaugacagcaacguuaagaaucuuuaugagaaagugaagucacaacugaagaacaaugcuaaagagauaggcaacgggugcuucgaauuuuaccacaaguguaaugaugagugcauggaaagugucaaaaacggaaccuaugacuaccccaaguauuccgaggagagcaaauugaauagggaaaagauugauggugugaagcucgagucuaugggcgucuaccagauccuggccaucuauucaacgguggcuaguagcuuaguucugcuagugucccucggggccauuucuuucuggaugugcucgaacggaagccugcagugucggaucugcauuuga

SEQ ID NO: 136853 - RNA, 1701 nt, Artificial Sequence; identical to SEQ ID NO: 133400
  derived and/or modified CDS sequence (opt3) from hemagglutinin__InfluenzaA__AFJ75630

SEQ ID NO: 136854 - RNA, 1701 nt, Artificial Sequence; identical to SEQ ID NO: 133400
  derived and/or modified CDS sequence (opt3) from hemagglutinin__InfluenzaA__AFJ75641

SEQ ID NO: 136855 - RNA, 1698 nt, Artificial Sequence
  derived and/or modified CDS sequence (opt3) from hemagglutinin__InfluenzaA__AFJ75651
augaaggugaaacugcucguccuucugugcaccuucacagccacuuacgcugacacgaucuguauuggcuaucacgcaaacaauagcaccgauacaguugacacuguguuggagaagaacguaaccgugacacauuccgucaauuuacuggaaaacucucacaaugggaaacuaugccuccugaagggaauagcgccccuucagcuggguaacuguucaguggccggcuggaucuuggggaauccugagugcgaacuccugauuaguaaagagagcugguccuacaucguugaaaagccaaacccggagaauggaaccuguuaucccggccauuuugcugauuacgaggaacugagagagcaacucucuucggugagcucauucgaaagguuugagauuuucccuaaggagaguuccuggccaaaccacacugucacaggugugucugccagcugcucccauaauggggaaucaaguuuuuaucggaacuuacuguggcuuaccggcaaaaauggauuguaccccaaccugagcaagucuuaugcaaauaacaaagagaaggaagugcuaguucucuggggcgugcaccacccuccaaacaucggggaccagaaagcccuguaccgcacggagaaugcuuacgucuccguggugucaagccauuauagucgaaaguucacucccgaaauagcaaagcguccuaaagucagagaucaggagggaaggaucaacuacuauuggacccuucuggagccaggugacacaauuaucuuugaagccaauggcaacuugauugcuccgcgguacgccuucgcgcucucucgcggguuuggauccggcaucauaaauagcgaugcacccauggacaagugugaugccaaaugccagacuccucaaggugcuauuaacucgucucugccauuccagaauguucaccccgugaccaucggggaguguccuaaguauguaagauccgccaaauuaaggauggugacaggacugcggaacauuccaucaauccagagucgcggccucuuuggcgcaaucgcuggguucauugaaggagguuggaccggcauggucgacgggugguacggauaucaucaccagaaugagcaaggcagcgguuacgccgcggaucagaaguccacgcagaacgccauaaaugggaucacuaacaaaguaaauucuguuauugaaaagaugaacacacaguuuaccgcagugggcaaggaguucaauaaacuugagcgaagaauggaaaaccugaacaagaaagucgacgauggauucaucgacauauggacuuacaaugcugaguugcuagugcugcucgaaaacgagaggacacuggacuuucacgauagcaauguaaagaaccuuuaugaaaaaguuaagucacaacugaagaauaacgccaaagagauuggcaaugggugcuucgaguuuuaccauaaguguaacgacgaaugcauggagagugugaaaaauggaaccuaugauuaccccaaguauuccgaagagagcaaauugaaccgggagaagaucgacggugucaagcucgaaucuaugggcguguaccagauccuggcuauuuauucaacggucgccaguagcuuagugcugcuaguuucccucggggcaaucucuuucuggaugugcucgaauggaagccugcagugucguauuugcauauga

SEQ ID NO: 136856 - RNA, 1701 nt, Artificial Sequence
  derived and/or modified CDS sequence (opt3) from hemagglutinin__InfluenzaA__AFJ75662
augaagaccaucauugcccugagcuacauacucugccuuguguucgcucagaaacugcccggcaacgacaauuccacagcaacuuuguguuuagggcaccaugccgucccuaacggaacgaucguuaagaccauuacaaaugaucaaaucgaggugacuaacgcgaccgaacugguacagucuucaaguacaggugagauuugcgacagcccacaccagauccuagauggcgaaaauuguacccucauagacgcucugcuuggggauccgcagugcgacggauuucaaaacaaaaagugggaucuguucguggagagauccaaagccuauucuaauuguuaccccuaugacgucccugauuacgcaucguugaggucacucguggccagcaguggcacucuggaauuuaacaaugaguccuucaacuggacagguguuacccagaaugggacgucuagcgcuugcauccggcgcuccaacaauucauuuuucagucgacugaacuggcucacucauuuaaaguuuaaguauccagcacugaaugugaccaugcccaacaacgaggaguucgacaaacuuuacauuuggggaguccaccauccuggcacagauaaugaccagaucuuuuuguaugcccaggcuagcggccguauuacugugucuaccaagagaucccaacagacaguaaucccaaacauagggucaaggccccggguucgcaauauuccuagcagaaucaguauuuacuggaccaucgugaaaccaggagauauccugcuaauuaacucuacggguaaucucauagccccgaggggcuacuucaagauccgguccgggaaaagcucgauuaugcgcucugacgcgcccaucggaaaguguaacuccgaaugcauaacuccuaauggcucaauuccaaacgacaagcccuuucagaaugucaaccgaaucacauauggugcauguccuagauacgugaaacagaauacccugaagcuggccacugggaugaggaacgugccagaaaaacaaacacggggaaucuucggcgcuauugccggcuuuaucgagaaugggugggagggaauggucgaugguugguauggcuuccgucaccagaacagugaagggaccggacaggcagcugaccuuaagagcacgcaagccgcgauugaucagauaaauggcaaauugaaccgccucaucgguaagaccaacgagaaauuccaccagauugaaaaggaguuuuccgaaguugaggggagaauccaggaccuggagaaguacguggaagauacaaaaaucgacuuauggucuuauaaugccgagcugcucguagcacuugaaaaccaacauacuauugaucugaccgacagcgagaugaauaaguuguucgagaaaacaaagaaacagcuaagggaaaacgcugaggauaugggcaauggaugcuuuaagauauaccacaagugugacaacgccugcaucggcucaauucggaaugggacuuaugaucaugacguguaccgagacgaagcucugaacaaucgcuuccagaucaaaggagucgagcucaagagugguuacaaagauuggauucuguggaucuccuuugccauaagcugcuuccuucuguguguggcauugcucggcuuuaucaugugggccugccagaaggggaacauuagauguaauaucugcauuuga

SEQ ID NO: 136857 - RNA, 1698 nt, Artificial Sequence
  derived and/or modified CDS sequence (opt3) from hemagglutinin__InfluenzaA__AFJ75673
augaaggugaaacugcucguccuucugugcaccuucacagccacuuacgcugacacgaucuguauuggcuaucacgcaaacaauagcaccgauacaguugacacuguguuggagaagaacguaaccgugacauacuccgucaauuuacuggaagauaaccauaaugggaaacuaugccuccugaagggaauagcgccccuucagcuggguaacuguucuguggccggcuggaucuuggggaauccugagugcgaacuccugauuucaaaagagaguuggagcuauaucguugaaagaccaaacccggagaauggaaccuguuaccccggccacuuugcugacuaugaggaacugagggagcaacucuccucugugucgucauucgaacgguuugagauuuucccuaaggagagcaguuggccaaaccauacugucacagguguguccgccucuugcagccacaauggggaauccucauuuuacaagaacuuacuguggcuuaccggaaagaauggcuuguaucccaaccugaguaagagcuacgcaaauaacaaagagaaggaaguucuaguacucuggggcgugcaucacccuccaaacaucgggaaucagaugacgcuguaccacaaagagaacgccuaugucucugugguguccucacauuacagccgcaaguucacucccgaaauagcuaagcgaccuaaaguccgugaucaggagggaagaaucaauuauuacuggacccuucuggagccaggugacacaauuaucuuugaagcaaacggcaauuugauugccccgagguaugcuuucgcccucaaccggggguuuggaaguggcaucauaaauucuaacgcgcccauggaugagugugacgcaaagugccagacuccucaaggugccauuaauuccagccugccauuccagaacguucaccccgugaccaucggggaauguccuaaauacguacgcucggcuaaguuaagaauggugacaggacugaggaauauuccaucuauccagucccggggccucuuuggcgccaucgcaggguucauugagggagguuggaccggcauggucgaugggugguauggauaccaucaccagaacgaacaaggcucagguuacgcugccgaccagaaaaguacgcagaaugcgauaaacgggaucacuaauaaggugaacagcguuauugagaaaaugaacacacaguuuaccgccgugggcaaggaguucaauaaacuugaacgccgaauggagaaccugaauaaaaaggucgaugacggauucaucgauguguggacuuauaacgcagaauugcuaguacugcucgagaaugaaagaacacuggacuuucacgacuccaacguuaaaaaucuuuacgagaaggugaaaacccaacugaagaacaaugcuaaggagauaggcaacgggugcuucgaauuuuaucauaaauguaaugaugagugcauggaaucugucaagaacggaacguacgacuaucccaaauacagcgaggagucaaaguugaguagggagaaaauugauggugugaagcucgaauccaugggcgucuaucagauccuggccaucuacagcaccguggcuucuucauuaguucugcuagugagucucggggccauuagcuucuggaugugcuccaauggaucucugcagugucggaucugcauuuga

SEQ ID NO: 136858 - RNA, 1701 nt, Artificial Sequence; identical to SEQ ID NO: 130717
  derived and/or modified CDS sequence (opt3) from hemagglutinin__InfluenzaA__AFJ76119

SEQ ID NO: 136859 - RNA, 1701 nt, Artificial Sequence; identical to SEQ ID NO: 131070
  derived and/or modified CDS sequence (opt3) from hemagglutinin__InfluenzaA__AFJ76131

SEQ ID NO: 136860 - RNA, 1701 nt, Artificial Sequence
  derived and/or modified CDS sequence (opt3) from hemagglutinin__InfluenzaA__AFJ76155
augaaggccauccuggugguccuccuuuacaccuucgcuacagcaaacgccgacacucugugcauuggcuaucacgcgaauaacagcacggauaccguugacacaguguuggagaaaaauguaacugugacccauuccgucaacuuacuggaagauaagcacaaugggaaacuauguaagcucagaggaauagcuccccugcaucuugguaaaugcaacaucgccggcuggauucuggggaauccugagugugaaucuuugucaacagcaaguagcugguccuacaucguggagaccucuucgucagacaacggaacuugcuauccaggcgauuuuauugacuacgaagaacucagggagcagcugagcaguguuuccucuuucgaacgguuugagaucuucccgaagacaagcuccuggcccaaucacgauucaaacaagggugugaccgccgcuuguccucaugcaggggccaaaaguuuuuauaagaaucugauauggcucgucaaaaagggaaacagcuacccaaaauuaucuaaguccuauaucaaugacaagggcaaagaagugcugguacuuuggggcauucaccaccccucaacgagcgcugaucaacagaguuuguaccagaacgccgacgcguacguuuucguggggacuucucgcuauuccaagaaauuuaagccugagaucgcaauucgaccaaaaguccgugagcaggaaggaagaaugaauuacuauuggacccugguggagcccggugauaagaucacauucgaagccacuggcaaccuaguggucccuagguacgcuuuugccauggagcggaaagcagggagcggaauaauuaucucggacaccccaguucaugauugcaacacaaccugucaaacgccgaagggcgcuauuaauacuucucuccccuuccagaacauccacuccaucacaauugguaagugcccuaaauaugugaagucaaccaaacugcgccuugccacugggcugagaaauguaccaaguauacagagcaggggauuguuuggcgcgaucgccggcuucauugaagggggauggacagguaugguggacggcugguacggguaucaucaccagaacgagcaaggauccggcuacgcagcugaccucaagucuacccagaaugccaucgaugagauaacgaacaaagucaauagcgugauugaaaagaugaacacccaguuuacagcuguugguaaggaguucaaucaccuggaaaaacggaucgagaacuuaaauaagaaaguggacgauggguuccuggacaucuggacuuacaacgccgaacuccuuguccuguuggagaaugagcgcacccuagauuaucaugacucaaacgugaagaaucuguacgaaaaaguacgaagucagcucaagaacaacgcaaaggagauuggcaauggauguuuugaguucuaucacaaaugcgauaacacauguauggaguccguuaagaauggcacuuacgacuaucccaaauacagcgaagaggccaagcugaacagagaggaaaucgauggggugaaacuugagucuaccaggauuuaucaaauacuggcuaucuacucaacagucgcgaguagcuuggugcucgucgugucccugggagcaauuucuuuuuggaugugcucgaaugguagcuuacagugccggaucuguaucuga

SEQ ID NO: 136861 - RNA, 1698 nt, Artificial Sequence
  derived and/or modified CDS sequence (opt3) from hemagglutinin__InfluenzaA__AFJ76186
augaaggugaaacugcucguccuucugugcaccuucacagccacuuacgcugacacgaucuguauuggcuaucacgcaaacaauagcaccgauacaguugacacuguguuggagaagaacguaaccgugacacauuccgucaauuuacuggaaaacucucacaaugggaaacuaugccuccugaagggaauagcgccccuucagcuggguaacuguucaguggccggcuggaucuuggggaauccugagugcgaacuccugauuaguaaagagagcugguccuacaucguugaaaagccaaacccggagaauggaaccuguuaucccggccauuuugcugauuacgaggaacugagagagcaacucucuucggugagcucauucgaaagguuugagauuuucccuaaggagaguuccuggccaaaccacacugucacaggugugucugccagcugcucccauaauggggaaucaaguuuuuaucggaacuuacuguggcuuaccggcaaaaauggauuguaccccaaccugagcaagucuuaugcaaauaacaaagagaaggaagugcuaguucucuggggcgugcaccacccuccaaacaucggggaccagaaagcccuguaccauacggagaaugcuuacgucuccguggugucaagccacuauagucgcaaguucacucccgaaauaaccaagcgaccuaaaguccgugaucaggagggaagaaucaacuacuauuggacacuucuggagccaggugacacuauuaucuuugaagcaaauggcaacuugauugccccgagguacgcuuucgcccucucucggggguuuggauccggcaucauaaauagcgaugcgcccauggacaagugugaugcaaaaugccagaccccucaaggugccauuaacucgucucugccauuccagaauguucaucccgugacaaucggggaguguccuaaguauguacgcuccgcuaaauuaagaauggugaccggacugaggaacauuccaucaauccagagucggggccucuuuggcgccaucgcaggguucauugaaggagguuggacgggcauggucgacgggugguacggauaucaccaccagaaugagcaaggcagcgguuacgcugccgaucagaaguccacucagaacgcgauaaaugggaucacaaacaaaguaaauucuguuauugaaaagaugaacacccaguuuacugccgugggcaaggaguucaauaaacuugagcgccgaauggaaaaccugaacaagaaagucgacgauggauucaucgacauauggacauacaaugcagaguugcuagugcugcucgaaaacgagagaacccuggacuuucaugauagcaauguaaagaaccuuuaugaaaaaguuaagucacaacugaagaauaacgcuaaagagauuggcaaugggugcuucgaguuuuaccacaaguguaacgacgaaugcauggagagugugaaaaauggaacguaugauuaccccaaguauuccgaagagagcaaauugaacagggagaagaucgacggugucaagcucgaaucuaugggcguguaccagauccuggccauuuauucaaccgucgcuaguagcuuagugcugcuaguuucccucggggccaucucuuucuggaugugcucgaauggaagccugcagugucggauuugcauauga

SEQ ID NO: 136862 - RNA, 1701 nt, Artificial Sequence; identical to SEQ ID NO: 130717
  derived and/or modified CDS sequence (opt3) from hemagglutinin__InfluenzaA__AFJ76203

SEQ ID NO: 136863 - RNA, 1701 nt, Artificial Sequence
  derived and/or modified CDS sequence (opt3) from hemagglutinin__InfluenzaA__AFJ76213
augaagaccaucauugcccugagcuacauacucugccuuguguucgcucagaaacugcccggcaacgacaauuccacagcaacuuuguguuuagggcaccaugccgucccuaacggaacgaucguuaagaccauuacaaaugaucaaaucgaggugacuaacgcgaccgaacugguacagucuucaaguacagguggcauuugcgacagcccacaccagauccuagauggggagaauuguacccucauagacgcucugcuuggagauccgcagugcgacggcuuucaaaacaaaaagugggaucuguucguggaaagauccaaagccuauucuaauuguuaccccuaugacgucccugauuacgcaucguugaggucacucguggccagcagugguacucuggaguuuaacaaugaauccuucgacuggacagggguuacccagaacggaacgucuagcgcuugcaagcggcgcuccaauaagucauuuuucagucgacugaacuggcucacucauagcaaauauaaguacccagcauuaaaugugaccaugcccaacaaugagaaauuugauaagcuguauaucuggggcguccaccauccuggcacagacucugaucagauuucccuuuacgcccaggcuucagggcguaucacugugagcaccaaaagaagucaacagacaguaauuccaaacaucggaucuaggccccggguucgcgacguguccagcagaauaucgauuuacuggaccaucgucaagccuggugacauuuugcugaucaacucuacgggcaaucuaaucgccccaaggggguauuucaagauucgguccggaaaaucaaguauaaugcgcagcgaugcgccgaucggcaaguguaacuccgagugcauuacucccaaugguucuaucccuaacgacaaaccauuucagaaugugaaccgaauaacauacggggcaugucccagauaugugaagcagaauacccucaaacuggccacuggaaugaggaacgucccugaaaagcaaacacggggcauuuucggcgcuaucgccggguuuaucgagaauggaugggaagguaugguugauggcugguacggguuccgucaccagaacagcgagggaaccggccaggcagcugaccuuaaaucaacgcaagccgcgauuaaucagaucaacgguaagcugaaucgcuugauugggaagaccaacgagaaauuucaccagauagaaaaggaguucagugaaguggagggcagaauccaggaucucgaaaaauauguagaggacacaaagauugaucugugguccuacaaugccgaguuacugguggcacucgaaaaccaacauacuaucgaccuuaccgauagcgagaugaacaaacuguucgaaaggacaaagaagcaguugcgggagaaugcugaagacaugggaaacggcugcuuuaaaaucuaucacaagugugauaaugccugcauugggucuauacgaaacggaacuuacgaccaugacgucuaccgcgaugaggcucuaaauaacagauuccagaucaaagguguggagcugaagucaggcuauaaagacuggauucucuggaucaguuuugccauuagcugcuuccugcuuuguguugcacuguugggguuuaucaugugggccugccagaagggaaauauaagguguaacaucugcauuuga

SEQ ID NO: 136864 - RNA, 1701 nt, Artificial Sequence
  derived and/or modified CDS sequence (opt3) from hemagglutinin__InfluenzaA__AFJ77408
augaagaccaucauugcccugagcuacauacucugccuuaucuucgcucagaaacugcccggcaacgacaauuccacagcaacuuuguguuuagggcaccaugccgugccuaacggaacgcuggucaagaccauuacaaaugaucaaaucgagguuacuaacgcgaccgaacuugugcagucuucaaguacagguagaauuugcaauagcccacacaggauccucgacggcgagaacuguacccugauagaugcucuacugggggacccgcauugcgauggauuucagaauaaagaaugggacuuguucguagagcgguccaaggccuauucuaacuguuaccccuaugaugugccugacuacgcaucgcuccgcucacuggucgccagcaguggcacucuggaauuuacaaaagaggguuucaauuggaccgggguggcucaggauggaaaguccuauucuugcaagcgaggcagcguuaacuccuuuuucucacgucucaauugguuacacaaacuggaguacaaguauccagcacuuaacgugacgaugcccaauaacgacaaauuugauaaguuguacaucuggggcguccaucacccuaguacugacagcgaucaaaccucucuguacgugcaggccuccgggagaguaacaguuucaacuaaaaggagccagcagaccgugauuccaaauaucggaagucggcccuggguccgcgguauuucuuccagaaucagcauauauuggacaauugugaagccuggcgacauccuacucauuaacucgaccgggaaccugaucgcuccaaggggauacuucaagauccggaauggcaaaucuuccauuaugcgcucagacgccccgauagguaacuguaauagugaaugcaucacgcccaacgggagcauuccuaaugauaagccauuucaaaacgugaaucgaaucacuuauggagcgugucccagauacgucaaacagaacacacuuaagcuggcaaccggcaugaggaauguuccugagaaacagacucggggcauauucggggccauugcuggauuuaucgaaaacgguugggagggcaugguggacgggugguauggauuccgucaccagaauagcgagggcacaggucaagccgcagauuugaagucuacccaggcugccaucaaccagauuaaugggaaacucaaccgccugaucgaaaagacgaaugagaaguuucaucaaauugaaaaagaguucagcgaaguagagggcagaauacaggacuuagagaaguacguggaagauaccaaaaucgaccuguggucauauaacgcggagcuccuugucgcccuggaaaaccagcacacaauugauuugacugacagugagaugaauaagcuauucgaaaggacccggaaacagcugcgagagaacgcagaggauaugggaaauggcugcuuuaagaucuaccauaagugugacaacgcuugcaucggguccauucgcaauggaacauacgaucacgacguguauagagacgaagcccucaacaauagguuccaaauaaaagguguugagcugaaguccggcuacaaagauuggauccuuuggauuucuuuugcuaucucaugcuuccuguugugugugguccuccugggguuuauuaugugggccugccagaagggaaacauccgguguaauauaugcaucuga

SEQ ID NO: 136865 - RNA, 1701 nt, Artificial Sequence
  derived and/or modified CDS sequence (opt3) from hemagglutinin__InfluenzaA__AFJ77430
augaagaccaucauugcccugagcuacauacucugccuuaucuucgcucagaaacugcccggcaacgacaauuccacagcaacuuuguguuuagggcaccaugccgugccuaacggaacgcuggucaagaccauuacaaaugaucaaaucgagguuacuaacgcgaccgaacuugugcagucuucaaguacagguagaauuugcgacagcccacacaggauccucgauggcgagaauuguacccugauagacgcucuacugggggauccgaacugcgacggauuucagaauaaagaaugggauuuguucguagagcgguccaaggccuauucuaacuguuaccccuaugacgugccugauuacgcaucgcuccgcucacuggucgccagcaguggcacucuggaauuuacaaaagaggguuucaauuggaccgggguggcucaggacggaaaguccuauucuugcaagcgaggcagcguuaacuccuuuuucucacgucucaauugguuacauaaacuggaguacaaguauccagcacuuaacgugacgaugcccaauaacgauaaauuugacaaguuguacaucuggggcguccaccauccuaguacugauagcgaccaaauuucucuguacgcccaggcuuccgggagagugaccguaucaacaaaaaggagccagcagacuguuaucccaaauauuggaagucggcccugggugcgcgguaucucuuccagaauaagcauuuauuggaccaucgucaagccuggcgacauucuacucaucaacucgacagggaaccugaucgccccaaggggauacuucaagauucggaauggcaaaucuuccauaaugcgcucagaugcgccgaucgguaacuguaauagugaaugcauuacccccaacgggagcaucccuaaugacaagccauuucaaaacgugaaucgaauaacguauggagcaugucccagauacgugaaacagaacacucuuaagcuggccacaggcaugaggaaugucccugagaaacagacccggggcauuuucggggcuaucgccggauuuaucgaaaacgguugggagggcaugguugaugggugguauggauuccgucaccaaaauuccgagggcacuggucaggcagcugacuugaagucuacacaggccgcgauuaaccagaucaaugggaaacucaaccgccugauugaaaagaccaaugagaaguuucaccaaauagaaaaagaguucagcgaaguggagggcagaauccaggauuuagagaaguacguagaagacacgaaaauugaucuguggucauauaacgccgagcuccuuguggcacuggaaaaccagcauaccaucgacuugacagauagugagaugaauaagcuauucgaaaggacucggcgacagcugcgcgagaacgcugaggacaugggaaauggcugcuuuaaaaucuaccacaagugugauaacgccugcauuggguccauaagaaauggaaccuacgaccaugacgucuauagggaugaagcucucaacaaucgguuccaaaucaaggguguggagcugaaaagcggcuacaaggacuggauucuuuggaucucuuuugccauuucaugcuuccuguuguguguugugcuccugggguuuaucaugugggcaugccagaaaggaaacauacgcuguaauaucugcauuuga

SEQ ID NO: 136866 - RNA, 1701 nt, Artificial Sequence
  derived and/or modified CDS sequence (opt3) from hemagglutinin__InfluenzaA__AFJ77440
augaagaccaucauugcccugagcuacauacucugccuuguguucgcucagaaacugcccggcaacgacaauuccacagcaacuuuguguuuagggcaccaugccgucccuaacggaacgcugguuaagaccaucacaaaugaucaaauugaggugacuaacgcgaccgagcuaguacagucuucaaguacagguagaaucugcgacagcccacacaggauucucgauggcaaaaauuguacccugaucgacgcuuugcugggggauccgcauugcgacggauuucagaacaaggaaugggauuuguucguggaacgguccaaagccuauucuaauuguuaccccuaugacgucccugauuacgcaucgcuccgcucacugguggccagcaguggcacucuggaguuuacauccgaagguuucaacuggaccgggguugcucaggacggaacgucuuaugcaugcaagcgaggcagcgugaaguccuuuuucucacgucucaauugguuacacaaacuggaguacaaguauccagcccuuaacgucacuaugcccaauaacgauaaauuugacaaguuguacauauggggcgugcaucacccuaguaccgauagcgaccaaacaucucuguacguacaggcuuccgggagaguuacugugucaaccaaaaggagccagcagacagucaucccaaauauuggaagucggcccugggugcgcggugugucuuccagaaucagcauuuauuggaccaucgucaagccuggcgacauacuacucauuaacucgacggggaaucugaucgccccaaggggauacuucaagauucggucuggcaaauccucaaucaugcgcagugaugcgccgaucgguaacuguaacagcgagugcauuacucccaauggguccauaccuaacgacaagccauuucaaaauguuaaccgaaucacauauggagcaugucccagauacgugaaacagaauacccuuaagcuggccacuggcaugaggaacguaccugaaaaacagacacggggcauuuucggggcuaucgccggauuuauagagaaugguugggaaggcaugguggaugggugguauggauuccgucaccagaacucugagggcaccggucaagcagcugaccuuaagagcacgcaggccgcgauuaaucagaucaacgggaaacucaaucgccugaucgagaagaccaacgaaaaguuucaucaaauugagaaagaguucucagaagucgaaggcagaauccaggauuuagagaaguacguggaggacacaaaaauugaucuguggaguuauaaugccgaacuccuuguugcacuggagaaccagcacacuauagacuugaccgauuccgaaaugaauaagcuauucgagaggacacggaaacagcugcgagaaaacgcugaggacaugggaaacggcugcuuuaagaucuaccauaagugugauaaugccugcauugggagcauccgcaacggaacuuacgaccacgacguguauagagaugaggcucucaauaacagguuccaaaucaaaggugucgaacugaagucuggcuacaaagacuggauucuuuggauaucauuugccaucaguugcuuccuguugugugugguacuccugggguuuauuaugugggcaugccagaagggaaauauccgguguaacauuugcaucuga

SEQ ID NO: 136867 - RNA, 1701 nt, Artificial Sequence
  derived and/or modified CDS sequence (opt3) from hemagglutinin__InfluenzaA__AFJ77451
augaagaccaucauugcccugagcuacauacucugccuuguguucgcucagaaacugcccggcaacgacaauuccacagcaacuuuguguuuagggcaccaugccgucccuaacggaacgcugguuaagaccaucacaaaugaucaaauugaggugacuaacgcgaccgaacuuguacagucuucaaguacagguagaaucugcgacagcccacacaggauucucgauggcaaaaauuguacccugaucgacgcucuacugggggauccgcauugcgacggauuucagaacaaggagugggauuuguucguggaacgguccaaagccuauucuaauuguuaccccuaugacgucccugauuacgcaucgcuccgcucacugguggccagcaguggcacucuggaguuuaacaaugaauccuucaacuggacagguguugcucagaaugggaccucuuaugcaugcaagcgacguagcgugaaguccuuuuucucaagacucaacugguuacacaaacuggaguacaaguauccagcccuuaaugucacgaugcccaacaaugacaaauuugauaaguuguacauauggggagugcaucacccuaguacugacagcgaucaaaccucucuguacguacaggcuuccggcaggguuacagugucaacuaaacggagccagcagaccgucaucccaaacauuggcagucgccccugggugagaggggugucuuccaggaucagcauuuauuggacaaucgucaagccuggagacauacuacucauuaacucgaccgguaaucugaucgccccacggggcuacuucaagauucgcucugggaaauccucaaucaugcgaagugacgcgccgaucggaaacuguaauagcgagugcauuacgcccaacggcuccauaccuaaugauaagccauuucaaaacguuaauagaaucacuuauggugcaugucccagguacgugaaacagaacacacuuaagcuggccaccgggaugcggaauguaccugaaaaacagacucguggaauuuucggcgcuaucgccggcuuuauagagaacgggugggaaggaaugguggacgguugguauggcuuccgccaccagaauagcgaggggacaggacaagcagcugauuugaagucuacccaggccgcgauuaaccagaucaauggcaaacucaacagacugaucgagaagacgaaugguaaguuucaucaaauugaaaaagaguucucagaagucgaggggaggauccaggacuuagaaaaguacguggaggauaccaaaauugaccuguggaguuauaacgccgagcuccuuguugcacuggaaaaccagcacacaauagauuugacugacuccgagaugaauaagcuauucgaacggacccgaaaacagcugcgcgagaacgcugaagauaugggcaauggaugcuuuaagaucuaccauaagugugacaacgccugcauuggcagcaucagaaaugggacauacgaucacgacguguauagggacgaggcucucaacaaucgguuccaaaucaaaggagucgagcugaagucugguuacaaagauuggauucuuuggauaucauuugccaucaguugcuuccuguugugugugguacuccugggcuuuauuaugugggcaugccagaaggggaacauccgcuguaauauuugcaucuga

SEQ ID NO: 136868 - RNA, 1701 nt, Artificial Sequence
  derived and/or modified CDS sequence (opt3) from hemagglutinin__InfluenzaA__AFJ77462
augaagaccaucauugcccugagcuacauacucugccuuguguucgcucagaaacugcccggcaacgacaauuccacagcaacuuuguguuuagggcaccaugccgucccuaacggaacgcugguuaagaccaucacaaaugaucaaauugaggugacuaacgcgaccgagcuaguacagucuucaaguacagguagaaucugcgacagcccacacaggauucucgauggcaaaaauuguacccugaucgacgcucugcugggggauccgcauugcgacggauuucagaacaaggaaugggauuuguucguggaacgguccaaagccuauucuaauuguuaccccuaugacgucccugauuacgcaucgcuccgcucacugguggccagcaguggcacucuggaguuuacaaacgaagguuucaauuggaccgggguugcucaggacggaacguccuaugcaugcaagcgaggcucugugaaguccuuuuucucccgucucaacugguuacacaaacuggaguacaaguauccagcccuuaaugucacuaugcccaacaaugauaaauuugacaaguuguacauauggggcgugcaucacccuucaaccgauagugaccaaacaagccuguacguacaggcuucugggagaguuacuguguccaccaaaaggucacagcagacagucaucccaaacauuggaagccggcccugggugcgcggugugaguucuagaaucuccauuuauuggaccaucgucaagccuggcgacauacuacucauuaauagcacggggaaccugaucgccccaaggggauacuucaagauucggucgggcaaaucuuccaucaugcgcucagaugcgccgaucgguaacuguaauagugagugcauuacucccaacgggagcauaccuaaugacaagccauuucaaaacguuaaucgaaucacauauggagcaugucccagauacgugaaacagaacacccuuaagcuggccacuggcaugaggaauguaccugaaaaacagacacggggcauuuucggggcuaucgccggauuuauagagaacgguugggaaggcaugguggaugggugguauggauuccgucaccagaauagcgagggcaccggucaagcagcugacuugaagucuacgcaggccgcgauuaaccagaucaaugggaaacucaaccgccugaucgagaagaccaaugaaaaguuucaucaaauugagaaagaguucagcgaagucgaaggcagaauccaggauuuagagaaguacguggaggacacaaaaauugaucuguggucauauaacgccgaacuccuuguugcacuggagaaucagcacacuauagacuugaccgauagugaaaugaacaagcuauucgagaggacacggaaacagcugcgagaaaacgcugaggacaugggaaauggcugcuuuaagaucuaccauaagugugauaacgccugcauuggguccauccgcaauggaacuuacgaccacgacguguauagagaugaggcucucaacaauagguuccaaaucaaaggugucgaacuuaagagcggcuacaaagacuggauucuuuggauaucuuuugccaucucaugcuuccuguugugugugguacuccugggguuuauuaugugggcaugccagaagggaaacauccgguguaauauuugcaucuga

SEQ ID NO: 136869 - RNA, 1701 nt, Artificial Sequence
  derived and/or modified CDS sequence (opt3) from hemagglutinin__InfluenzaA__AFJ77473
augaagaccaucauugcccugagcuacauacucugccagguguucgcucaaaaacuucccggcaacgacaauuccacagcaacucuguguuuggggcaccaugccgucccuaacggaacguuaguuaagaccaucacaaaugaucagauugaggugacuaacgcgaccgaacugguacagucuucaaguacagguagaaucugcgacagcccacaccagauucuagauggcgagaauuguacccucaucgacgcucugcuuggggauccgcauugcgacggauuucaaaacaaagaaugggaucuguucguggagagguccaaggccuauucuaauuguuaccccuaugacgucccugauuacgcaucguugcggucacucguggccagcaguggcacucuggaauuuaacaaugaguccuucaacuggacagguguugcucagaaugggaccucuagcgcaugcaaacgccgauccauaaagucauuuuucagucgucugaacuggcuccaccaguuaaaguauaaauacccagcccugaaugugacgaugcccaacaaugagaaguuugacaaacuuuauaucuggggaguccaucacccuagcacugauucugaccagauuuccuuguacgcucaagccucaggcagagugaccguaagcacaaagaggagucagcagacuguuaucccaaacauuggcucucggcccugggugcgcggggucuccagcagaaucucgauauacuggaccauugugaaaccuggagauauccugcuaauuaacucuacagguaaucucaucgcgccaaggggcuauuucaagauccgguccgggaagucaaguauuaugcgcagcgacgcaccgauaggaaaauguaacuccgaaugcaucacccccaauggcucuauuccuaacgacaagccauuucagaaugugaaccgaaucacguacggugccugucccagauaugucaaacaaaauacucugaaacuugcuacagggaugaggaacguuccugagaagcagacccggggaauauucggcgccauugcaggcuuuaucgaaaaugggugggagggaaugguggaugguugguacggcuuccgucaccagaacagcgaggggacuggacaagcugccgaccugaagucaacacaggcggccaucaaucagauuaacggcaaauugaaucgccucaucgaaaagaccaacgagaaguuucaucagauugaaaaagaguucagugaaguagaggguagaauacaagaucuggagaaguauguggaagacacgaaaaucgauuuaugguccuacaaugcagagcugcucgucgcucuugaaaaccagcacaccauugaccugacagauagcgagaugaacaaguuguucgaaaggacuaaaaagcagcuacgggagaaugccgaggacauggggaacggcugcuuuaagaucuaucauaaaugugauaaugcuugcaucggaucuauucgaaacggcaccuacgaccacgauguguaccgcgacgaagcccugaauaacagauuccagauaaaggggguugagcucaaaucaggauauaaggacuggauccuguggauuaguuuugcaaucagcugcuuccuucuguguguggucuugcucgguuuuauuaugugggccugccaaaaaggcaauaucagguguaacauaugcaucuga

SEQ ID NO: 136870 - RNA, 1701 nt, Artificial Sequence; identical to SEQ ID NO: 128234
  derived and/or modified CDS sequence (opt3) from hemagglutinin__InfluenzaA__AFJ77484

SEQ ID NO: 136871 - RNA, 1701 nt, Artificial Sequence; identical to SEQ ID NO: 128236
  derived and/or modified CDS sequence (opt3) from hemagglutinin__InfluenzaA__AFJ77495

SEQ ID NO: 136872 - RNA, 1701 nt, Artificial Sequence; identical to SEQ ID NO: 128234
  derived and/or modified CDS sequence (opt3) from hemagglutinin__InfluenzaA__AFJ77506

SEQ ID NO: 136873 - RNA, 1701 nt, Artificial Sequence
  derived and/or modified CDS sequence (opt3) from hemagglutinin__InfluenzaA__AFJ77517
augaagaccaucauugcccugagcuacauacucugccuuguguucgcucagaaaauccccggcaacgacaauuccacagcaacucuguguuuggggcaccaugccgucccuaacggaacguuaguuaagaccauuacaaaugaucaaaucgaggugacuaacgcgaccgaacugguacagucuucaaguacagguagaauuugcgacagcccacacaggauccuagauggcgagaauuguacccucauagacgcucugcuuggggauccgcauugcgacggauuucagaacaaagaaugggaucuguucguggagcgguccaaggccuauucuaauuguuaccccuaugacgucccugauuacgcaucguugcgcucacucguggccagcaguggcacucuggaauuuaacaaugaguccuucaacuggacagguguugcucagaaugggaccucuaacgcaugcaaacgacguagcaugaaguccuuuuucucaagacugaauuggcuccaccaauuaaaguauaaauacccagcccugaacgugacgaugcccaauaacgacaaguuugauaaacuuuauaucuggggaguccaucacccuaguacugacagcgaucagaccucuuuguacgcucaggccuccggcagggugacaguaucaacucagcggagccaacagaccguuauuccaaacaucggcagucgccccugggugagaggggucucuuccaggauuagcaucuacuggacaauagugaagccuggagacauucugcuaaucaauucgaccgguaaccucauugcgccacggggcuauuucaaaauccgcucugggaaguccucaaucauucgaagugacgcaccgauaggaaaguguaauagcgagugcaucacgcccaacggcuccauuccuaaugauaaaccauuucagaacgugaauagaaucacuuacggugccugucccagguaugucaagcagaacacacugaaacuugcuaccgggaugcggaauguuccugaaaagcaaacucguggaauauucggcgccauugcaggcuuuaucgagaacgggugggaaggaaugguggacgguugguacggcuuccgccaccaaaauucugaggggacaggacaggcugccgaucugaaaagcacccaggcggccaucaaccagauuaauggcaaguugaacagacucaucgagaaaacgaaugaaaaguuucaucagauugagaaggaguucucagaaguagaagguaggauacaggaccuggagaaauauguggaggauaccaagaucgacuuauggaguuacaacgcagaacugcucgucgcucuugagaaccaacacacaauugaucugacugacuccgaaaugaauaaauuguucgagcggacccgaaagcagcuacgcgaaaacgccgaggauauggggaauggcugcuuuaaaaucuaucauaagugugacaacgcuugcaucggaagcauuagaaauggcacauacgaucacgacguguacagggacgaggcccugaacaaucgguuccagauaaaggggguugaacucaaaucuggauauaaggauuggauccuguggauuucauuugcaaugaguugcuuccuucuguguguggucuugcucgguuuuaucaugugggccugccagaaaggcaacauucgcuguaauaucugcauauga

SEQ ID NO: 136874 - RNA, 1701 nt, Artificial Sequence; identical to SEQ ID NO: 128071
  derived and/or modified CDS sequence (opt3) from hemagglutinin__InfluenzaA__AFJ77528

SEQ ID NO: 136875 - RNA, 1698 nt, Artificial Sequence
  derived and/or modified CDS sequence (opt3) from hemagglutinin__InfluenzaA__AFJ77550
augaagaccaucauugcccugagcuacauacucugccagguguucgcucaaaaacuucccggcaacgacaauuccacagcaacucuguguuuggggcaccaugccgucccuaacggaacguuaguuaagaccaucacaaaugaucagauugaggugacuaacgcgaccgaacugguacagucuucaaguacagguagaaucugcgacagcccacaccagauucuagauggcgagaauuguacccucaucgacgcucugcuuggggauccgcauugcgacggauuucaaaacaaagaaugggaucuguucguggagagguccaaggccuauucuaauuguuaccccuaugacgucccugauuacgcaucguugcggucacucguggccagcaguggcacucuggaauuuaacaaugaguccuucaacuggacagguguugcucagaaugggaccucuagcgcaugcaaacgccgauccauaaagucauuuuucagucgucugaacuggcuccaccaguuaaaguauaaauacccagcccugaaugugacgaugcccaacaaugagaaguuugacaaacuuuauaucuggggaguccaucacccuagcacugauucugaccagauuuccuuguacgcucaagccucaggcagagugaccguaagcacaaagaggagucagcagacuguuaucccaaacauuggcucucggcccugggugcgcggggucuccagcagaaucucgauauacuggaccauugugaaaccuggagauauccugcuaauuaacucuacagguaaucucaucgcgccaaggggcuauuucaagauccgguccgggaagucaaguauuaugcgcagcgacgcaccgauaggaaaauguaacuccgaaugcaucacccccaauggcucuauuccuaacgacaagccauuucagaaugugaaccgaaucacguacggugccugucccagauaugucaaacaaaauacucugaaacuugcuacagggaugaggaacguuccugagaagacccggggaauauucggcgccauugcaggcuuuaucgaaaaugggugggagggaaugguggaugguugguacggcuuccgucaccagaacagcgaggggacuggacaggcugccgaccugaagucaacacaagcggccaucaaucagauuaacggcaaauugaaucgccucaucgaaaagaccaacgagaaguuucaucagauugaaaaagaguucagugaaguagaggguagaauacaggaucuggagaaguauguggaagacacgaaaaucgauuuaugguccuacaaugcagagcugcucgucgcucuugaaaaccaacacaccauugaccugacagauagcgagaugaacaaguuguucgaaaggacuaaaaagcagcuacgggagaaugccgaggacauggggaacggcugcuuuaagaucuaucauaaaugugauaaugcuugcaucggaucuauucgaaacggcaccuacgaccacgauguguaccgcgacgaagcccugaauaacagauuccagauaaaggggguugagcucaaaucaggauauaaggacuggauccuguggauuaguuuugcaaucagcugcuuccuucuguguguggucuugcucgguuuuauuaugugggccugccagaaaggcaauaucagguguuccauaugcaucuga

SEQ ID NO: 136876 - RNA, 1701 nt, Artificial Sequence
  derived and/or modified CDS sequence (opt3) from hemagglutinin__InfluenzaA__AFJ77561
augaagaccaucauugcccugagcuacauacucugccuuguguucgcucagaaacugcccggcaacgacaauuccacagcaacuuuguguuuagggcaccaugccgucccuaacggaacgcugguuaagaccaucacaaaugaucaaauugaggugacuaacgcgaccgaacuuguacagucuucaaguacagguagaaucugcgacagcccacacaggauucucgauggcaaaaauuguacccugaucgacgcucuacugggggauccgcauugcgacggauuucagaacaaggagugggauuuguucguggaacgguccaaagccuauucuaauuguuaccccuaugacgucccugauuacgcaucgcuccgcucacugguggccagcaguggcacucuggaguuuaacaaugaauccuucaacuggacagguguugcucagaaugggaccucuuaugcaugcaagcgacguagcgugaaguccuuuuucucaagacucaacugguuacacaaacuggaguacaaguauccagcccuuaaugucacgaugcccaacaaugacaaauuugauaaguuguacauauggggagugcaucacccuaguacugacagcgaucaaaccucucuguacgcucaggccuccggcaggguaacaguuucaacuaaacggagccagcagaccgugaucccaaacauuggcagucgccccugggucagaggggugucuuccaggaucagcauuuauuggacaaucgugaagccuggagacauacuacucauuuacucgaccgguaaccugaucgcgccacggggcuauuucaagauucgcucugggaaauccucaaucaugcgaagugacgcaccgaucggaaauuguagcuccgagugcauuacgcccaacggcucuauaccuaaugauaagccauuucaaaacgucaauagaaucacuuacggugccugucccagguauguuaaacagaacacacuuaagcuggcuaccgggaugcggaaugugccugaaaaacagacucguggaauuuucggcgccaucgcaggcuuuauagagaacgggugggaaggaaugguagacgguugguacggcuuccgccaccagaauagcgaggggacaggacaagcugccgauuugaagucaacccaggcggccauuaaccagaucaauggcaaacucaacagacugaucgagaagacgaaugaaaaguuucaucaaauugagaaagaguucagugaaguggaagguaggauccaggacuuagagaaguaugucgaggauaccaaaauugaccugugguccuacaacgcagaacuccuuguggcucuggagaaucagcacacaauagauuugacugacagcgaaaugaacaagcuauucgagcggacccgaaaacagcugcgcgaaaacgccgaggauauggggaauggcugcuuuaagaucuaccauaagugugacaacgcuugcauuggaucuaucagaaauggcacauaugaucacgacguuuacagggacgaggcccucaacaaucgguuccaaaucaaagggguggaacugaagucaggauauaaagauuggauucuuuggauaaguuuugcaaucagcugcuuccuguugugugucgugcuccuggguuuuauuaugugggccugccagaagggcaacauccgcuguaauauuugcaucuga

SEQ ID NO: 136877 - RNA, 1698 nt, Artificial Sequence
  derived and/or modified CDS sequence (opt3) from hemagglutinin__InfluenzaA__AFJ77572
augaagaccaucauugcccugagcuacauacucugccagguguucgcucaaaaacuucccggcaacgacaauuccacagcaacucuguguuuggggcaccaugccgucccuaacggaacguuaguuaagaccaucacaaaugaucagauugaggugacuaacgcgaccgaacugguacagucuucaaguacagguagaaucugcgacagcccacaccagauucuagauggcgagaauuguacccucaucgacgcucugcuuggggauccgcauugcgacggauuucaaaacaaagaaugggaucuguucguggagagguccaaggccuauucuaauuguuaccccuaugacgucccugauuacgcaucguugcggucacucguggccagcaguggcacucuggaauuuaacaaugaguccuucaacuggacagguguugcucagaaugggaccucuagcgcaugcaaacgccgauccauaaagucauuuuucagucgucugaacuggcuccaccaguuaaaguauaaauacccagcccugaaugugacgaugcccaacaaugagaaguuugacaaacuuuauaucuggggaguccaucacccuagcacugauucugaccagauuuccuuguacgcucaagccucaggcagagugaccguaagcacaaagaggagucagcagacuguuaucccaaacauuggcucugggcccugggugcggggagucuccagccgcaucucgauauacuggaccauugugaaaccuggugauauccugcuaauuaacucuacaggcaaucucaucgcgccaagaggguauuucaagaucagguccggaaagucaaguauuaugcggagcgacgcaccgauaggcaaauguaacuccgaaugcaucacccccaaugguucuauuccuaacgacaagccauuucagaaugugaaccgcaucacguacggggccuguccccgauaugucaaacaaaauacucugaaacuugcuacaggaaugagaaacguuccugagaagaccaggggcauauucggcgccauugcaggguuuaucgaaaauggaugggaggguaugguggauggcugguacggguuccggcaccagaacagcgagggaacuggccaggcugccgaccugaagucaacacaagcggccaucaaucagauuaacgguaaauugaaucgucucaucgaaaagaccaacgagaaguuucaucagauugaaaaagaguucagugaaguagaggggcgcauacaggaucuggagaaguauguggaagacacgaaaaucgauuuaugguccuacaaugcagagcugcucgucgcucuugaaaaccaacacaccauugaccugacagauagcgagaugaacaaguuguucgaaagaacuaaaaagcagcuaagggagaaugccgaggacaugggcaacggaugcuuuaagaucuaucauaaaugugauaaugcuugcaucggcucuauucggaacgggaccuacgaccacgauguguaccgagacgaagcccugaauaaccgcuuccagauaaagggaguugagcucaaaucagguuauaaggacuggauccuguggauuaguuuugcaaucagcugcuuccuucuguguguggucuugcucggcuuuauuaugugggccugccagaaagggaauaucagauguuccauaugcaucuga

SEQ ID NO: 136878 - RNA, 1701 nt, Artificial Sequence
  derived and/or modified CDS sequence (opt3) from hemagglutinin__InfluenzaA__AFJ77583
augaagaccaucauuacacugagcuacauacucugccuuguguucgcccagaaacugcccgucaaggacaacuccacugcuacguuguguuuaggccaccaugcaguuccuaaugggacccuggugaaaacaaucacuaacgaucacauugagguaaccaaugccacagagcuagugcaaucuucaaguaccggaagaaucugcgacagcccacaucagauucucgauggugaaaacuguacucugaucgacgcgcuucugggcgauccgcacugcgacggguuucagaauaaggaaugggauuuguucgucgagagguccacagcuuauucuaacuguuaccccuaugacgugccugauuacgccucgcuccggucacugguugcaagcaguggaacccuggaauuuaauaacgaguccuucaauuggacgggcguggcccagaacgguacuucuagcgcuugcaaacgccgauccauaaagucauuuuucagucgucucaauugguuacaucaacugaaguauaaauacccagcacuuaacgucaccaugcccaauaacgagaaguuugacaaauuguauaucuggggagugcaccacccuagcacagauucugaccagauuucccuguacgcccaggcuucagggagaguaacuguuagcaccaagaggagucagcaaacagugaucccaaauauuggcucucggcccuggguccgcggcguguccagcagaaucucgauauacuggaccauugugaaaccuggggauauccuacucauuaacucuacgggaaaccugaucgccccaagggguuauuucaagauccgguccggcaagucaaguauuaugcgcagcaaugcgccgauagggaaauguaacuccgaaugcaucacucccaauggaucuauuccuaacgacaagccauuucagaaugucaaccgaaucacauacggcgcaugucccagauauguuaaacagaauacccuuaagcuggccacugguaugaggaacgugccugagaaacagacacgggggauauucggagcuauugccggcuuuaucgaaaauggcugggaggggaugguagacggaugguacgguuuccgucaucaaaacagcgagggcaccgggcaggcagcugauuugaagucaacgcaggccgcgaucaaucaaauuaacggaaaacucaaucgccugaucgaaaagaccaacgagaaguuucaccagauugaaaaagaguucagugaaguggagggcagaauacaggacuuagagaaguaugucgaagauacaaaaaucgaccugugguccuacaaugccgagcuccuuguggcacuggaaaaccagcauacuauugauuugaccgacagcgagaugaacaagcuauucgaaaggacacggaaacaacugcgagagaaugcugaggauauggguaacgggugcuuuaagaucuaucacaagugugacaaugccugcaucggcucuauucgcaacggaacuuacgaucacgacguuuacagagaugaagcucucaauaacagguuccagauaaaaggcguggagcugaagucaggguauaaagacuggauccuuuggauuaguuuugccaucagcugcuuccuguugugugucgugcuccugggauuuauuaugugggcaugccagaaggguaauauccgguguaacauaugcaucuga

SEQ ID NO: 136879 - RNA, 1701 nt, Artificial Sequence
  derived and/or modified CDS sequence (opt3) from hemagglutinin__InfluenzaA__AFJ77594
augaagaccaucauugcccugagcuacauacucugccuuguguucgcucagaaacugcccgucaaggacaacuccacagcaacuuuguguuuaggccaccaugccguuccuaaugggacgcuggugaaaaccaucacaaacgaucacauugagguaacuaaugcgaccgaacuugugcaaucuucaaguacaggaagaaucugcgacagcccacaucagauucucgauggugagaacuguacccugaucgacgcucuacugggcgauccgcacugcgacggguuucagaauaaggaaugggauuuguucgucgagagguccacugccuauucuaacuguuaccccuaugacgugccugauuacgcaucgcuccggucacugguugccagcaguggaacacuggaauuuaauaacgaguccuucaauuggaccggcguggcucagaacgguacgucuagcgcaugcaaacgccgauccauaaagucauuuuucagucgucucaauugguuacaucaacugaaguauaaauacccagcccuuaacgucacuaugcccaauaacgagaaguuugacaaauuguauaucuggggagugcaccacccuagcaccgauucugaccagauuucccuguacgcucaggccucagggagaguaacaguuagcacuaagaggagucagcaaaccgugaucccaaauauuggcucucggcccuggguccgcggcguguccagcagaaucucgauauacuggacaauugugaaaccuggggauauccuacucauuaacucuaccggaaaccugaucgcgccaagggguuauuucaagauccgguccggcaagucaaguauuaugcgcagcaaugcaccgauagggaaauguaacuccgaaugcaucacgcccaauggaucuauuccuaacgacaagccauuucagaaugucaaccgaaucacuuacggcgccugucccagauauguuaaacagaauacacuuaagcuggcuaccgguaugaggaacgugccugagaaacagacucgggggauauucggagccauugcaggcuuuaucgaaaauggcugggaggggaugguagacggaugguacgguuuccgucaucaaaacagcgagggcacagggcaggcugccgauuugaagucaacccaggcggccaucaaucaaauuaacggaaaacucaaucgccugaucgaaaagacgaacgagaaguuucaccagauugaaaaagaguucagugaaguggagggcagaauacaggacuuagagaaguaugucgaagauaccaaaaucgaccugugguccuacaaugcagagcuccuuguggcucuggaaaaccagcauacaauugauuugacugacagcgagaugaacaagcuauucgaaaggacccggaaacaacugcgagagaaugccgaggauauggguaacgggugcuuuaagaucuaucacaagugugacaaugcuugcaucggcucuauucgcaacggaacauacgaucacgacguuuacagagaugaagcccucaauaacagguuccagauaaaaggcguggagcugaagucaggguauaaagacuggauccuuuggauuaguuuugcaaucagcugcuuccuguugugugucgugcuccugggauuuauuaugugggccugccagaaggguaauauccgguguaacauaugcaucuga

SEQ ID NO: 136880 - RNA, 1701 nt, Artificial Sequence
  derived and/or modified CDS sequence (opt3) from hemagglutinin__InfluenzaA__AFJ77605
augaagaccaucauugcccugagcuacauacucugccuuaucuucgcucagaaacugcccggcaacgacaauuccacagcaacuuuguguuuagggcaccaugccgugccuaacggaacgcuggucaagaccauuacaaaugaucaaaucgagguuacuaacgcgaccgaacuugugcagucuucaaguacagguaaaauuugcgacagcccacaccagauccucgauggcgagaauuguacccugauagacgcucuacugggggauccgcauugcgacggauuucagaacaaggaaugggauuuguucguagagagauccaaagccuauucuaauuguuaccccuaugacgugccugauuacgcaucgcucaggucacuggucgccagcaguggcacucuggaauuuaacaaugaguccuucaacuggacagguguggcucaaaaugggaccucuagcgcaugcaagcggcgcuccaacaagucauuuuucagucgacucaauugguuacaccagcugaaauauaaguacccagcccuuaacguuacgaugcccaauaacgagaaauuugacaaguuguauaucuggggagugcaucacccuagcacugauucugaccagauuucccuguacgcucaggccucaggccgugucaccgugagcacaaaaagaagucaacagacuguaaucccaaacauuggcucuaggcccuggguucgcgggguguccagccggaucucgauauacuggaccauugucaagccuggagauauccuacucauuaauucuacagguaaccugaucgcgccaagaggcuauuucaagaucagguccgggaaaucaaguauuaugcggagcgacgcaccgauaggaaaguguaauuccgaaugcaucacccccaacggcucuauuccuaaugacaaaccauuucagaacgugaaucgcaucacguacggugccuguccccgauaugugaagcagaacacucuuaaacuggcuacagggaugagaaaugucccugagaagcaaaccaggggaauauucggcgccauugcaggcuuuaucgaaaacgggugggagggaaugguugaugguugguacggcuuccggcaccagaauagcgaggggacuggacaggcugccgacuugaaaucaacacaagcggccaucaaccagauuaauggcaagcucaaccgucugaucgaaaagaccaaugagaaauuucaucagauugaaaaggaguucagugaaguggagggucgcauacaggauuuagagaaauauguagaagacacgaagaucgaucugugguccuacaacgcagagcuccuuguggcucuggaaaaccaacacaccauugacuugacagauagcgagaugaauaaacuauucgaaagaacuaagaagcagcugagggagaacgccgaggacauggggaauggcugcuuuaaaaucuaucauaagugugauaacgcuugcaucggaucuauucggaauggcaccuacgaccacgaugucuaccgagacgaagccgugaacaaucgcuuccagauaaaagggguugagcucaagucaggauauaaagacuggauccuguggauuaguuuugcaaucagcugcuuccuucuguguguggucuugcucgguuuuauuaugugggccugccagaagggcaacaucagauguaauauaugcaucuga

SEQ ID NO: 136881 - RNA, 1701 nt, Artificial Sequence
  derived and/or modified CDS sequence (opt3) from hemagglutinin__InfluenzaA__AFJ77616
augaagaccaucauugcccugagcuacauacucugcauggugcuugcucagaaacugcccgucaaggacaacuccacagcaacuuuguguuuaggccaccaugccguuccuaaugggacgcuggugaaaaccaucacaaacgaucacauugagguaacuaaugcgaccgaacuugugcaaucuucaaguacaggaagaaucugcgacagcccacaucagauucucgauggugagaacuguacccugaucgacgcucuacugggcgauccgcacugcgacggguuccagaauaaggaaugggauuuguuugucgagagguccacugccuauucuaacuguuaccccuaugacgugccugauuacgcaucgcuccggucacugguugccagcaguggaacacuggaguucaauaacgaauccuuuaauuggaccggcguggcucagaacgguacgucuagcgcaugcaaacgccgauccauaaagucauucuuuagucgucucaauugguuacaucaacugaaguauaaauacccagcccuuaacgucacuaugcccaauaacgagaaguucgacaaauuguauaucuggggagugcaccacccuagcaccgauucugaccagauuucccuguacgcucaggccucagggagaguaacaguuagcacuaagaggagucagcaaaccgugaucccaaauauuggcucucggcccuggguccgcggcguguccagcagaaucucgauauacuggacaauugugaaaccuggggauauccuacucauuaacucuaccggaaaccugaucgcgccaagggguuauuuuaagauccgguccggcaagucaaguauuaugcgcagcaaugcauccauagggaaauguaacucugaaugcaucacgccgaauggaagcauucccaacgacaagccuuuccagaaugucaaccgaaucacuuacggcgccuguccaagauauguuaaacagaauacacuuaagcuggcuaccgguaugaggaacgugcccgagaaacagacucgggggauauuuggagccauugcaggcuucaucgaaaauggcugggaggggaugguagacggaugguacgguuuucgucaucaaaacucagagggcacagggcaggcugccgauuugaagaguacccaggcggccaucaaucaaauuaacggaaaacucaaucgccugaucgaaaagacgaacgagaaguuccaccagauugaaaaagaguuuuccgaaguggagggcagaauacaggacuuagagaaguaugucgaagauaccaaaaucgaccuguggagcuacaaugcagagcuccuuguggcucuggaaaaccagcauacaauugauuugacugacucugagaugaacaagcuauucgaaaggacccggaaacaacugcgagagaaugccgaggauauggguaacgggugcuucaagaucuaucacaagugugacaaugcuugcaucggcucaauucgcaacggaacauacgaucacgacguuuacagagaugaagcccucaauaacagguuucagauaaaaggcguggagcugaagaguggguauaaagacuggauccuuuggauuagcuucgcaaucuccugcuuucuguugugugucgugcuccugggauucauuaugugggccugccagaaggguaauauccgguguaacauaugcaucuga

SEQ ID NO: 136882 - RNA, 1701 nt, Artificial Sequence
  derived and/or modified CDS sequence (opt3) from hemagglutinin__InfluenzaA__AFJ77627
augaagaccaucauugcccugagcuacauacucugccuugugcuggcucagaaauugcccgucaaggacaacuccacagcaacuuuaugucugggccaccaugccguuccuaaugggacgcuagugaaaaccaucacaaacgaucacauugagguaacuaaugcgaccgaacucgugcaaucuucaaguacaggaagaaucugcgacagcccacaucagauucuggauggugagaacuguacccuuaucgacgcucuguugggcgauccgcacugcgacggguuccagaauaaggaaugggaucucuuugucgagagguccacugccuauucuaacuguuaccccuaugacgugccugauuacgcaucgcugcggucacugguugccagcaguggaacacucgaguucaauaacgaauccuuuaauuggaccggcguggcucagaacgguacgucuagcgcaugcaaacgccgauccauaaagucauucuuuagucguuuaaauuggcugcaucaacuuaaguauaaauacccagccuugaacgucacuaugcccaauaacgagaaguucgacaaacuguauaucuggggagugcaccacccuagcaccgauucugaccagauuucccuauacgcucaggccucagggagaguaacaguuagcacuaagaggagucagcaaaccgugaucccaaauauuggcucucggcccuggguccgcggcguguccagcagaaucucgauauacuggacaauugugaaaccuggggauauccuccugauuaacucuaccggaaaccuuaucgcgccaagggguuauuuuaagauccgguccggcaagucaaguauuaugcgcagcaaugcauccauagggaaauguaacucugaaugcaucacgccgaauggaagcauucccaacgacaagccuuuccagaaugucaaccgaaucacuuacggcgccuguccaagauauguuaaacagaauacacugaaguuggcuaccgguaugaggaacgugcccgagaaacagacucgggggauauuuggagccauugcaggcuucaucgaaaauggcugggaggggaugguagacggaugguacgguuuucgucaucaaaacucagagggcacagggcaggcugccgaucucaagaguacccaggcggccaucaaucaaauuaacggaaaacugaaucgcuuaaucgaaaagacgaacgagaaguuccaccagauugaaaaagaguuuuccgaaguggagggcagaauacaggaccuggagaaguaugucgaagauaccaaaaucgaccucuggagcuacaaugcagagcuucugguggcuuuggaaaaccagcauacaauugaucuaacugacucugagaugaacaagcuguucgaaaggacccggaaacaacuccgagagaaugccgaggauauggguaacgggugcuucaagaucuaucacaagugugacaaugcuugcaucggcucaauucgcaacggaacauacgaucacgacguuuacagagaugaagcccugaauaacagguuucagauaaaaggcguggagcuuaagaguggguauaaagacuggauccuguggauuagcuucgcaaucuccugcuuuuugcucugugucgugcuguuaggauucauuaugugggccugccagaaggguaauauccgguguaacauaugcaucuga

SEQ ID NO: 136883 - RNA, 1701 nt, Artificial Sequence
  derived and/or modified CDS sequence (opt3) from hemagglutinin__InfluenzaA__AFJ77638
augaagaccaucauugcccugagcuacauacucugccuuguguucgcucagaaacugcccggcaacgacaauuccacagcaacuuuguguuuagggcaccaugccgucccuaacggaacgcugguuaagaccaucacaaaugaucaaauugaggugacuaacgcgaccgaacuuguacagucuucaaguacagguagaaucugcgacagcccacaccagauucucgauggcgagaauuguacccugaucgacgcucuacugggggauccgcauugcgacggauuucagaacaaagaaugggauuuguucguggagagguccaaggccuauucuaauuguuaccccuaugacgucccugauuacgcaucgcuccggucacugguggccagcaguggcacucuggaauuuaacaaugaguccuucaacuggacagguguugcucaaaaugggaccucuagcgcaugcaaacgccgauccaacaagucauuuuucagucgucucaauugguuacaccagcugaaguauaaauacccagcccuuaacgugacgaugcccaauaacgagaaguuugacaaauuguauauauggggaguccaucacccuagcacugauucugaccagaucucccuguacgcucaggccucaggcagagugaccguaagcacaaagaggagucaacagacuguuauuccaaacaucggcucucggcccugggugcgcggggucuccagcagaauuucgaucuacuggaccauagugaaaccuggagauauucuacucaucaauucuacagguaaccugauugcgccaaggggcuauuucaagauccgguccgggaagucaaguaucaugcgcagcgacgcaccgauuggaaaauguaauuccgaaugcaccacgcccaacggcucuauaccuaaugacaagccauuucagaacgugaaucgaaucacuuacggugccugucccagauaugucaaacagaacacacuuaagcuggcuaccgggaugaggaauguuccugagaaacaaacucggggaauuuucggcgccaucgcaggcuuuauagaaaacgggugggagggaaugguggaugguugguacggcuuccgucaccagaauagcgaggggacaggacaggcugccgacuugaagucaacccaagcggccauuaaccagaucaauggcaaacucaaccgccugaucgguaagacgaaugaaaaguuucaucagauugagaaagaguucagugaaguagaagggagaauccaggauuuagagaaguauguggaggacaccaaaauugaucugugguccuacaacgcagaacuccuugucgcucuggagaaccaacacacaauagacuugacugauagcgaaaugaauaagcuauucgagaggaccaaaaagcagcugcgggaaaacgccgaggacaugggcaauggaugcuuuaagaucuaucauaaaugugauaacgcuugcauuggcucuauccgaaaugggacauacgaccacgauguguaccgcgacgaggcccucaacaauagauuccagaucaagggaguugaacugaaaucagguuauaaggacuggauucuuuggauaaguuuugcaaucagcugcuuccuguugugugugguccuccugggcuuuauuaugugggccugccagaaagggaacaucagguguaauauuugcaucuga

SEQ ID NO: 136884 - RNA, 1701 nt, Artificial Sequence
  derived and/or modified CDS sequence (opt3) from hemagglutinin__InfluenzaA__AFJ77649
augaagaccaucauugcccugagcuacauacucugccuuguguucgcucagaaacugcccggcaacgacaauuccacagcaacuuuguguuuagggcaccaugccgucccuaacggaacgcugguuaagaccaucacaaaugaucaaauugaggugacuaacgcgaccgaacuuguacagucuucaaguacagguagaaucugcgacagcccacaccagauucucgauggcgagaauuguacccugaucgacgcucuacugggggauccgcauugcgacggauuucagaacaaagaaugggauuuguucguggagagguccaaggccuauucuaauuguuaccccuaugacgucccugauuacgcaucgcuccggucacugguggccagcaguggcacucuggaauuuaacaaugaguccuucaacuggacagguguugcucaaaaugggaccucuagcgcaugcaaacgccgauccaacaagucauuuuucagucgucucaauugguuacaccagcugaaguauaaauacccagcccuuaacgugacgaugcccaauaacgagaaguuugacaaauuguauauauggggaguccaucacccuagcacugauucugaccagaucucccuguacgcucaggccucaggcagagugaccguaagcacaaagaggagucaacagacuguuauuccaaacaucggcucucggcccugggugcgcggggucuccagcagaauuucgaucuacuggaccauagugaaaccuggagauauucuacucaucaauaacacagguaaucugauugcgccaaggggcuauuucaagauccggaacgggaagucuuccaucaugcgcucagacgcaccgauuggaaaauguaauagugaaugcauaacccccaacggcagcaucccuaaugacaagccauuucagaacgugaaucgaauuacguacggugccugucccagauaugucaaacagaacacucuuaagcuggcuacagggaugaggaauguuccugagaaacaaacccggggaaucuucggcgccauagcaggcuuuauugaaaacgggugggagggaaugguggaugguugguacggcuuccgucaccagaauagcgaggggacuggacaggcugccgacuugaagucuacacaagcggccaucaaccagaucaauggcaaacucaaccgccugauugguaagaccaacgaaaaguuucaucagaucgagaaagaguucagcgaaguagaagggaggauucaggauuuagagaaguauguggaggacacgaaaauagaucuguggucauacaaugcagaacuccuugucgcucuggagaaccaacacaccaucgacuugacagauagugaaaugaauaagcuauucgagagaacuaaaaagcagcugcgggaaaacgccgaggacaugggcaauggaugcuuuaagauuuaucauaaaugugauaacgcuugcaucggcuccauccgaaaugggaccuacgaccacgauguguaccgcgacgaggcccucaacaauagauucaagauuaaaggaguugaacugaaguccgguuauaaagacuggauacuuuggaucucuuuugcaauuucaugcuuccuguugugugugguccuccugggcuuuaucaugugggccugccagaaggggaacauuagguguaauaucugcauauga

SEQ ID NO: 136885 - RNA, 1701 nt, Artificial Sequence; identical to SEQ ID NO: 128251
  derived and/or modified CDS sequence (opt3) from hemagglutinin__InfluenzaA__AFJ77660

SEQ ID NO: 136886 - RNA, 1701 nt, Artificial Sequence; identical to SEQ ID NO: 128251
  derived and/or modified CDS sequence (opt3) from hemagglutinin__InfluenzaA__AFJ77671

SEQ ID NO: 136887 - RNA, 1701 nt, Artificial Sequence; identical to SEQ ID NO: 128251
  derived and/or modified CDS sequence (opt3) from hemagglutinin__InfluenzaA__AFJ77682

SEQ ID NO: 136888 - RNA, 1701 nt, Artificial Sequence
  derived and/or modified CDS sequence (opt3) from hemagglutinin__InfluenzaA__AFJ77693
augaagaccaucauugcccugagcuacauacucugccuuguguucgcucagaaacugcccgucaacgacaauuccacagcaacuuuguguuuaggccaccauacgguuccuaacgggacccuggugaagacaaucacuaaugauaacauugagguaaccaaugccacagagcuagugcaaucuucaaguaccggaagaaucugcgacagcccacaccagauucucgauggugaaaacuguacucugaucgacgcgcuucugggcgauccgcauugcgacggguuucagaauaaagaaugggauuuguucgucgagagguccacagcuuauucuaacuguuaccccuaugacgugccugauuacgccucgcuccggucacugguugcaagcaguggaacccuggaauuuaauaacgaguccuucaauuggacgggcguggaccagaacgguacuucuagcgccugcaagcgccgauccaauaaaucauuuuucagucgucucaacugguuacaccaacugaaguauaaguacccagcucuuaaugucaccaugcccaacaacgagaaauuugauaaguuguauauauggggagugcaucacccuagcacagacucugaucagaucucccuguacgcacaggccucagggagaguaacuguuagcaccaaaaggagucagcaaacagugauuccaaauaucggcucucggcccuggguccgcggcguguccagcagaauuucgaucuacuggaccauagugaagccuggggacauucuacucaucaacucuacgggaaaucugauugcuccaagggguuauuucaaaauccgguccggcaagucaaguaucaugcgcagcaacgccccgauugggaaguguaauuccgaaugcauaacucccaacggaucuaucccuaaugacaaaccauuucagaacgucaaucgaauuacauacggcgcgugucccagauauguuaagcagaacacccuuaaacuggcaacugguaugaggaaugugccugagaagcagacacgggggaucuucggagccauagcuggcuuuauugaaaacggcugggaggggaugguagauggaugguacgguuuccgucaccaaaauuuugagggcaccgggcaggccgcagacuugaaaagcacgcaggcugccaucaaccaaaucaauggaaagcucaaccgccugauugagaaaaccaacgaaaaguuccaucagaucgaaaaggaguucucagaaguggagggcaggauucaggauuuagagaaauaugucgaagacacaaagauagaucuguggaguuacaaugcggagcuccuuguggcccuggaaaaccagcacacuaucgacuugaccgauuccgagaugaauaaacuauuugaaagaacacggaagcaacugcgagagaacgcagaggacauggguaaugggugcuucaaaauuuaucauaagugugauaacgcuugcaucggcagcauccgcaauggaacuuacgaccacgauguuuacagagacgaagcccucaacaauagguuucagauuaagggcguggagcugaaaucuggguauaaggacuggauacuuuggaucucauucgcuauuaguugcuuucuguugugugucgugcuccugggauucaucaugugggccugccagaaagguaacauucgguguaauaucugcauauga

SEQ ID NO: 136889 - RNA, 1701 nt, Artificial Sequence; identical to SEQ ID NO: 128251
  derived and/or modified CDS sequence (opt3) from hemagglutinin__InfluenzaA__AFJ77704

SEQ ID NO: 136890 - RNA, 1701 nt, Artificial Sequence; identical to SEQ ID NO: 136729
  derived and/or modified CDS sequence (opt3) from hemagglutinin__InfluenzaA__AFJ77715

SEQ ID NO: 136891 - RNA, 1701 nt, Artificial Sequence; identical to SEQ ID NO: 136729
  derived and/or modified CDS sequence (opt3) from hemagglutinin__InfluenzaA__AFJ77726

SEQ ID NO: 136892 - RNA, 1701 nt, Artificial Sequence; identical to SEQ ID NO: 136825
  derived and/or modified CDS sequence (opt3) from hemagglutinin__InfluenzaA__AFJ77737

SEQ ID NO: 136893 - RNA, 1701 nt, Artificial Sequence; identical to SEQ ID NO: 128080
  derived and/or modified CDS sequence (opt3) from hemagglutinin__InfluenzaA__AFJ77748

SEQ ID NO: 136894 - RNA, 1701 nt, Artificial Sequence; identical to SEQ ID NO: 128080
  derived and/or modified CDS sequence (opt3) from hemagglutinin__InfluenzaA__AFJ77759

SEQ ID NO: 136895 - RNA, 1701 nt, Artificial Sequence
  derived and/or modified CDS sequence (opt3) from hemagglutinin__InfluenzaA__AFJ77781
augaagaccaucauugcccugagcuacauacucugccuuguguucgcucagaaacugcccggcaacgacaauuccacagcaacuuuguguuuagggcaccaugccgucccuaacggaacgaucguuaagaccauuacaaaugaucaaaucgaggugacuaacgcgaccgaacugguacagucuucaaguacagguggcauuugcgacagcccacaccagauccuagauggggagaauuguacccucauagacgcucugcuuggagauccgcagugcgacggcuuucaaaacaaaaagugggaucuguucguggaaagauccaaagccuauucuaauuguuaccccuaugacgucccugauuacgcaucguugaggucacucguggccagcagugguacucuggaguuuaacuccgaaucuuucgacuggacagggguuacccagaauggaacgagcuccgcuugcaagcggcgcucaaacaagagcuuuuucagucgacugaauuggcucacucauuuaaaauauaaguacccagcacugaacgugaccaugcccaauaacgagaaauuugauaaacuuuauaucuggggcguccaccauccuggcacagacucugaucagauuuccuuguacgcccaggcuucagggcguaucacugugagcaccaagagaagucaacagacaguaauuccaaauaucggaucuaggccccggguucgcgacguguccagcagaauaucgauuuacuggaccaucgucaagccuggugacauucugcuaaucaacucuacgggcaaccucaucgccccaaggggguauuucaagauucgguccggaaaaucaaguauaaugcgcagcgaugcgccgaucggcaaguguaauuccgagugcauuacucccaacgguucuaucccuaaugacaaaccauuucagaacgugaaucgaauaacauacggggcaugucccagauaugugaagcagaacacccugaaacuugccacuggaaugaggaaugucccugaaaagcaaacacggggcauuuucggcgcuaucgccggguuuaucgagaacggaugggaagguaugguugauggcugguacggguuccgucaccagaauagcgagggaaccggccaggcagcugaccugaaaucaacgcaagccgcgauuaaccagaucaaugguaaguugaaccgccucauugggaagaccaaugagaaauuucaccagauagaaaaggaguucagugaaguggagggcagaauccaggaucuggaaaaauauguagaggacacaaagauugauuuaugguccuacaacgccgagcugcucguggcacuugaaaaucaacauacuaucgaccugaccgauagcgagaugaacaaauuguucgaaaggacaaagaagcagcuacgggagaacgcugaagacaugggaaauggcugcuuuaaaaucuaucacaagugugauaacgccugcauugggucuauacgaaauggaacuuacgaccaugacgucuaccgcgaugaggcucugaacaauagauuccagaucaaagguguggagcucaagucaggcuauaaagacuggauucuguggaucaguuuugccauuagcugcuuccuucuguguguugcauugcucggguuuaucaugugggccugccagaagggaaacauaagguguaauaucugcauuuga

SEQ ID NO: 136896 - RNA, 1701 nt, Artificial Sequence; identical to SEQ ID NO: 129843
  derived and/or modified CDS sequence (opt3) from hemagglutinin__InfluenzaA__AFJ77792

SEQ ID NO: 136897 - RNA, 1701 nt, Artificial Sequence; identical to SEQ ID NO: 129843
  derived and/or modified CDS sequence (opt3) from hemagglutinin__InfluenzaA__AFJ77803

SEQ ID NO: 136898 - RNA, 1701 nt, Artificial Sequence; identical to SEQ ID NO: 129843
  derived and/or modified CDS sequence (opt3) from hemagglutinin__InfluenzaA__AFJ77814

SEQ ID NO: 136899 - RNA, 1701 nt, Artificial Sequence; identical to SEQ ID NO: 129843
  derived and/or modified CDS sequence (opt3) from hemagglutinin__InfluenzaA__AFJ77825

SEQ ID NO: 136900 - RNA, 1701 nt, Artificial Sequence; identical to SEQ ID NO: 129843
  derived and/or modified CDS sequence (opt3) from hemagglutinin__InfluenzaA__AFJ77836

SEQ ID NO: 136901 - RNA, 1701 nt, Artificial Sequence; identical to SEQ ID NO: 129843
  derived and/or modified CDS sequence (opt3) from hemagglutinin__InfluenzaA__AFJ77847

SEQ ID NO: 136902 - RNA, 1701 nt, Artificial Sequence
  derived and/or modified CDS sequence (opt3) from hemagglutinin__InfluenzaA__AFJ77858
augaagaccaucauugcccugagcuacauacucugccuuguguucgcucagaaacugcccggcaacgacaauuccacagcaacuuuguguuuagggcaccaugccgucccuaacggaacgaucguuaagaccauuacaaaugaucaaaucgaggugacuaacgcgaccgaacugguacagucuucaaguacagguggcauuugcgacagcccacaccagauccuagauggggagaauuguacccucauagacgcucugcuuggagauccgcagugcgacggcuuucaaaacaaaaagugggaucuguucguggaaagauccaaagccuauucuaauuguuaccccuaugacgucccugauuacgcaucguugaggucacucguggccagcagugguacucuggaguuuaacaaugaauccuucaacuggacagggguuacccagaauggaacgucuagcgcuugcaagcggcgcuccaacaauucauuuuucagucgacugaacuggcucacucauuuaaaguuuaaauauccagcacugaaugugaccaugcccaacaacgagaaguucgacaaacuuuacaucuggggcguccaccauccuggcacagauaaugaccagauuagcuuguaugcccaggcuucugggcguaucacuguguccacccaaagaucacagcagacaguaauuccaaacaucggaagcaggccccggguucgcgauauaccuaguagaauuucuaucuacuggaccauugugaagccaggugacaugcugcuaaucaauuccacgggcaaccucaucgccccgaggggguacuuuaaaauucggagcggaaagucgucuauaaugcgcuccgacgcgcccaucggcaaguguaauucagagugcauuacuccuaacgguaguaucccaaaugauaaacccuuccagaacgucaaucgaauaacauauggggcauguccuagauacgugaagcaaaacacccugaaacuugccacuggaaugaggaaugugccagaaaagcagacacggggcauuuuuggcgcuaucgccggguucaucgagaacggaugggaagguauggucgacggcugguauggguuucgucaccagaauagcgagggaaccggccaagcagcugaucugaaauccacgcaggccgcgauuaaccagaucaaugguaaguugaacaaacucauugggaagaccaacgagaaguuccaccagauagaaaaagaguucucugaaguugagggccgcauccaagaccuggaaaaguacguggaggauacaaaaauugacuuauggagcuauaaugccgagcugcucguagcacuugaaaaccagcauacuaucgaucugaccgacucagagaugaauaaguuguuugaaagaacuaaaaagcagcuaagggagaacgcugaagauaugggaaauggcugcuucaagaucuaccacaaaugugacaacgccugcauugggaguauacggaauggaacauaugaucaugacguguaccgagacgaggcucugaacaaucgcuuucagaucaagggugucgagcucaaauccggcuacaaggauuggauucuguggaucagcuucgccauuucuugcuuucuuuucuguguggcacuguugggguuuaucaugugggccugccaaaaaggaaacauaagauguaauaucugcauuuga

SEQ ID NO: 136903 - RNA, 1701 nt, Artificial Sequence
  derived and/or modified CDS sequence (opt3) from hemagglutinin__InfluenzaA__AFJ77869
augaagaccaucauugccuucagcuacauacugugccucguguuugcucagaaacuucccggcaacgacaauuccacagcaacucuguguuuggggcaccaugccgucccuaacggaacgaucguuaagaccauuacaaaugaucaaaucgaggugacuaacgcgaccgaauuaguacagucuucaaguacagguggcauuugcgacagcccacaccagauccuggauggggagaauuguacccuaauagacgcucuccugggagauccgcagugcgacggcuuccaaaacaaaaagugggaucuuuuuguggaaagauccaaagccuauucuaauuguuaccccuaugacgucccugauuacgcaucgcugaggucauugguggccagcagugguacucucgaguucaacaaugaauccuuuaacuggacagggguuacccagaauggaacgucuagcgcuugcaagcggcgcuccaacaauucauucuuuagucgacugaacuggcugacucaucucaaguucaaauauccagcauuaaaugugaccaugcccaacaacgagaaguuugacaaacuguacaucuggggcguccaccauccuggcacagauaaugaccagauuagccuuuaugcccaggcuucugggcguaucacuguguccaccaagagaucacaacagacaguaauuccaaacaucggaagcaggccccggguucgcgauauaccuaguagaauuucuaucuacuggaccauugugaaaccaggugacaucuugcugaucaauuccacgggcaaccuaauugccccgaggggguacuucaagauacggagcggaaagucgucuaucaugcgcuccgacgcgcccauuggcaaauguaauucagagugcaucacuccuaacgguaguauaccaaaugauaagcccuuucagaacgucaaucgaauuacauauggggcauguccuagauacgugaaacagaacacccucaagcuggccacuggaaugaggaaugugccagaaaaacaaacacggggcaucuucggcgcuaucgccggguuuauugagaacggaugggaagguauggucgacggcugguauggguuccgucaccagaauagcgagggaaccggccaggcagcugaucuuaaguccacgcaagccgcgaucaaccagauuaaugguaaacugaaccgcuugauagggaagaccaacgagaaguuccaccagaucgaaaaagaguuuucugaaguugagggcaggauucaggaccucgaaaaguacguggaggauacaaaaaucgaccuguggagcuauaaugccgaguuacugguagcacucgaaaaccaacauacuaucgaucuuaccgacucagagaugaauaagcuguucgaaagaacuaaaaagcaguugcgggagaacgcugaagauaugggaaauggcugcuuuaagauuuaccacaaaugugacaacgccugcauagggaguauccgaaauggaacauaugaucaugacguguaccgcgacgaggcucuaaacaauagauuccagauuaagggugucgagcugaaauccggcuacaaggauuggauccucuggauuagcuuugccaucucuugcuuccugcuuuguguggcacuguugggguuuauaaugugggccugccagaaaggaaacaucagguguaauauuugcaucuga

SEQ ID NO: 136904 - RNA, 1701 nt, Artificial Sequence
  derived and/or modified CDS sequence (opt3) from hemagglutinin__InfluenzaA__AFJ77880
augaagaccaucauugcccugagcuacauacucugccuuguguucgcucagaaacugcccggcaacgacaauuccacagcaacuuuguguuuagggcaccaugccgucccuaacggaacgaucguuaagaccauuacaaaugaucaaaucgaggugacuaacgcgaccgaacugguacagucuucaaguacagguggcauuugcaauagcccacaccagauccuagacggggagaacuguacccucauagaugcucugcuuggagacccgcagugcgauggcuuucaaaauaaaaagugggaccuguucguggaaagauccaaagccuauucuaacuguuaccccuaugaugucccugacuacgcaucguugaggucacucguggccagcagugguacucuggaguuuaauaacgaauccuucaauuggacagggguuacccagaacggaacgucuagcgcuugcaagcggcgcuccaauaagucauuuuucagucgacugaacuggcucacucauuuaaaauuuaaguauccagcacugaaugugaccaugcccaacaacgagaaauucgauaaacuuuacaucuggggcguccaccauccuggcacagacaaugaucagauuagcuuguaugcccaggcuucugggcguaucacuguguccaccaagagaucacaacagacaguaauuccaaacaucggaagcaggccccggguucgcgacgugccuaguagaauaucuauuuacuggaccaucgucaagccaggugauauucugcuaaucaauuccacgggcaaccucaucgccccgaggggguacuuuaagauucggagcggaaaaucgucuauaaugcgcuccgacgcgcccaucggcaaguguaauucagagugcauuacuccuaacgguaguaucccaaaugacaaacccuuccagaacgugaaucgaauaacauauggggcauguccuagauacgugaagcagaacacccugaaacuugccacuggaaugaggaaugucccagaaaagcaaacacggggcauuuuuggcgcuaucgccggguucaucgagaacggaugggaagguaugguugauggcugguauggguuucgucaccagaauagcgagggaaccggccaggcagcugaccugaaauccacgcaagccgcgauuaaccagaucaaugguaaguugaaccgccucauugggaagaccaacgagaaauuccaccagauagaaaaggaguucucugaaguggagggcagaauccaggaucuggaaaaauacguagaggacacaaagauugauuuauggagcuauaaugccgagcugcucguggcacuugaaaaccaacauacuaucgaccugaccgauucagagaugaauaaauuguuugaaaggacaaagaagcagcuacgggagaacgcugaagacaugggaaauggcugcuucaaaaucuaccacaagugugauaacgccugcauugggaguauacgaaauggaacuuaugaccaugaugucuaccgcgacgaggcucugaacaauagauuucagaucaaagguguggagcucaaguccggcuacaaagacuggauucuguggaucagcuucgccauuucuugcuuucuucuguguguugcauugcucggguucaucaugugggccugccagaagggaaacauaagguguaauaucugcauuuga

SEQ ID NO: 136905 - RNA, 1701 nt, Artificial Sequence
  derived and/or modified CDS sequence (opt3) from hemagglutinin__InfluenzaA__AFJ77902
augaagaccaucauugcccugagcuacauacucugccuuguguucgcucagaaacugcccggcaacgacaauuccacagcaacuuuguguuuagggcaccaugccgucccuaacggaacgaucguuaagaccauuacaaaugaucaaaucgaggugacuaacgcgaccgaacugguacagucuucaaguacagguggcauuugcgacagcccacaccagauccuagauggggagaauuguacccucauagacgcucugcuuggagauccgcagugcgacggcuuucaaaacaaaaagugggaucuguucguggaaagauccaaagccuauucuaauuguuaccccuaugacgucccugauuacgcaucguugaggucacucguggccagcagugguacucuggaguuuaacaaugaauccuucaacuggacagggguuacccagaauggaacgucuagcgcuugcaagcggcgcuccaacaauucauuuuucagucgacugaacuggcucacucauuuaaaguuuaaauauccagcacugaaugugaccaugcccaacaacgagaaguucgacaaacuuuacaucuggggcguccaccauccuggcacagauaaugaccagauuggguuguaugcccaggcuagcggacguaucacugugucuaccaagagaucccaacagacaguaauuccaaacaucgguucaaggccccggguucgcgauauaccuagcagaauuaguaucuacuggaccauugugaaaccaggcgacaugcugcuaaucaauucuacggggaaccucaucgccccgaggggauacuuuaagauucgguccggcaagagcucgauaaugcgcucugacgcgcccaucgguaaauguaauuccgagugcauuacuccuaacgggucaaucccaaaugauaagcccuuccagaacgucaaucgaauaacauauggagcauguccuagauacgugaaacagaacacccugaagcuggccacuggcaugaggaaugugccagaaaaacaaacacggggcauuuuuggggcuaucgccggauucaucgagaacgguugggaaggcauggucgacgggugguauggauuucgucaccagaauagugagggcaccggucaggcagcugaucuuaagagcacgcaagccgcgauuaaccagaucaaugggaaauugaaccgccucauuggcaagaccaacgagaaguuccaccagauagaaaaagaguucuccgaaguugagggaagaauccaggaccuggaaaaguacguggaggauacaaaaauugacuuauggucuuauaaugccgagcugcucguagcacuugaaaaccaacauacuaucgaucugaccgacagcgagaugaauaaguuguuugaaaggacuaaaaagcagcuacgggagaacgcugaagauaugggcaaugggugcuucaagaucuaccacaaaugugacaacgccugcauuggaucaauacgaaaugguacauaugaucaugacguguaccgcgacgaggcucugaacaauagauuucagaucaagggcgucgagcucaaaaguggguacaaggauuggauucuguggaucuccuucgccauuagcugcuuucuucuguguguggcauugcucggauucaucaugugggccugccagaaaggcaacauaagguguaauaucugcauuuga

SEQ ID NO: 136906 - RNA, 1701 nt, Artificial Sequence
  derived and/or modified CDS sequence (opt3) from hemagglutinin__InfluenzaA__AFJ77913
augaagaccaucauugcccugagcuacauacucugccuuguguucgcucagaaacugcccggcaacgacaauuccacagcaacuuuguguuuagggcaccaugccgucccuaacggaacgaucguuaagaccauuacaaaugaucaaaucgaggugacuaacgcgaccgaacugguacagucuucaaguacagguggcauuugcgacagcccacaccagauccuagauggggagaauuguacccucauagacgcucugcuuggagauccgcagugcgacggcuuucaaaacaaaaagugggaucuguucguggaaagauccaaagccuauucuaauuguuaccccuaugacguccaggauuacgcaucguugaggucacucguggccagcagugguacucuggaguuuaacaaugaauccuucaacuggacagggguuacccagaauggaacgucuagcgcuugcaagcggcgcuccaacaauucauuuuucagucgacugaacuggcucacucauuuaaaguuuaaauauccugcacugaaugugaccaugccaaacaacgagaaguucgacaaacuuuacaucuggggcguccaccaucccggcacagauaaugaccagauuagcuuguaugcccaggcuucugggcguaucacuguguccaccaagagaucacaacagacaguaauuccuaacaucggaagcaggccacggguucgcgauauacccaguagaauuucuaucuacuggaccauugugaaaccuggugacaugcugcuaaucaauuccacgggcaaccucaucgccccaaggggguacuuuaagauucggagcggaaagucgucuauaaugcgcuccgacgcgccgaucggcaaauguaauucagagugcauuacucccaacgguaguaucccuaaugauaagccauuccagaacgucaaucgaauaacauauggggcaugucccagauacgugaaacaaaacacccugaaacuugccacuggaaugaggaaugugccugaaaaacagacacggggcauuuuuggcgcuaucgccggguucaucgagaacggaugggaagguauggucgacggcugguauggguuucgucaccagaauagcgagggaaccggccaagcagcugaucugaaguccacgcaggccgcgauuaaccagaucaaugguaaauugaaccgccucauugggaagaccaacgagaaguuccaccagauagaaaaagaguucucugaaguugagggcagaauccaagaccuggaaaaguacguggaggauacaaaaauugacuuauggagcuauaaugccgagcugcucguagcacuugaaaaccagcauacuaucgaucugaccgacucagagaugaauaaguuguuugaaaggacaaagaagcagcuacgggagaacgcugaagauaugggaaauggcugcuucaagaucuaccacaaaugugacaacgccugcauugggaguauacgaaauggaacuuaugaucaugacguguaccgcgacgaggcucugaacaauagauuucagaucaagggugucgagcucaaauccggcuacaaggauuggauucuguggaucagcuucgccauuucuugcuuucuucuguguguggcauugcucggguucaucaugugggccugccaaaaaggaaacauaagguguaauaucugcauuuga

SEQ ID NO: 136907 - RNA, 1701 nt, Artificial Sequence; identical to SEQ ID NO: 129161
  derived and/or modified CDS sequence (opt3) from hemagglutinin__InfluenzaA__AFJ77924

SEQ ID NO: 136908 - RNA, 1701 nt, Artificial Sequence
  derived and/or modified CDS sequence (opt3) from hemagglutinin__InfluenzaA__AFJ77935
augaagaccaucauugcccugagcuacauacucugccuuguguucgcucagaaacugcccggcaacgacaauuccacagcaacuuuguguuuagggcaccaugccgucccuaacggaacgguugugaagaccaucacaaaugaucaaauugagguaacuaacgcgaccgaacuggugcagucuucaaguacagguggcaucugcgacagcccacaccagauucuagauggggagaauuguacccucauggacgcucugcuuggagauccgcagugcgacggcuuucaaaacaaaaagugggaucuguucgucgaaagauccaaagccuauucuaauuguuaccccuaugacgugccugaucaugcaucguugaggucacucguugccagcagugguacucuggaguuuaacaaugaauccuucaacuggacaggggugacccagaauggaacgucuagcgcuugcaagcggcgcuccaacaauucauuuuucagucgacugaacuggcucacucacuuaaaguuuaaauacccagcacugaaugucaccaugcccaacaacgagacauucgacaaguuguauaucuggggcgugcaucacccuggcacugauaaugaccagauaagccuuuacgcccaggcuucugggcguaucaccguauccacaaaaagaucacaacagaccguuauuccaaacaucggaagcaggccccgggugcgcgauauuccuaguagaaucucuauauauuggacgauugucaagccaggugacauccugcuaauuaauuccacuggcaaccucaucgccccgaggggguacuuuaaaauccggagcggaaagucgucuauuaugcgcuccgacgcgcccauaggcaaguguaauucagagugcaucacaccuaacgguaguauuccaaaugauaaacccuuccagaacgugaaucgaaucaccuacggggcauguccuagauaugugaagcagaacacucugaaacuugccacaggaaugaggaaugucccagaaaagcaaacccggggcauauuuggcgcuauugccggguucaucgagaacggaugggaagguaugguugacggcugguacggguuucgucaccagaauagcgagggaacgggccaggcagcugaucugaaauccacccaagccgcgaucaaccagauuaaugguaaguugaaccgccucaucgggaaaacaaacgagaaguuccaucagauugaaaaggaguucucugaaguggagggcagaauacaggaccuggaaaaauauguagaggauacuaagaucgacuuauggagcuacaaugccgagcugcucguggcacuugaaaaccaacacaccauugaucugacagacucagagaugaauaaauuguuugaaaggacuaagaaacagcuacgggagaacgcugaagauaugggaaauggcugcuucaagaucuaucauaagugugacaacgccugcaucgggaguauucgaaauggaaccuacgaucacgacgucuaucgcgacgaggcucugaacaauagauuucagauaaaagguguggagcucaaguccggcuacaaagauuggauccuguggauuagcuucgccaucucuugcuuucuucuguguguugcauugcucggguucauuaugugggccugccagaagggaaacaucagguguaauauaugcaucuga

SEQ ID NO: 136909 - RNA, 1701 nt, Artificial Sequence
  derived and/or modified CDS sequence (opt3) from hemagglutinin__InfluenzaA__AFJ77946
augaagaccaucauugcccugagcuacauacucugccuuguguucgcucagaaacugcccggcaacgacaauuccacagcaacuuuguguuuagggcaccaugccgucccuaacggaacgaucguuaagaccauuacaaaugaucaaaucgaggugacuaacgcgaccgaacugguacagucuucaaguacagguggcauuugcgacagcccacaccagauccuagauggggagaauuguacccucauagacgcucugcuuggagauccgcagugcgacggcuuucaaaacaaaaagugggaucuguucguggaaagauccaaagccuauucuaauuguuaccccuaugacgucccugauuacgcaucguugaggucacucguggccagcagugguacucuggaguuuaacaaugaauccuucaacuggacagggguuacccagaauggaacgucuagcgcuugcaagcggcgcuccaacaauucauuuuucagucgacugaacuggcucacucauuuaaaguuuaaauauccagcacugaaugugaccaugcccaacaacgagaaguucgacaaacuuuacaucuggggcguccaccauccuggcacagauaaugaccagauuagcuuguaugcccaggcuucugggcguaucacuguguccaccaagagaucacaacagacaguaauuccaaacaucggaagcaggccccggguucgcgauauaccuaguagaauuucuaucuacuggaccauugugaaaccaggugacaugcugcuaaucaauuccacgggcaaccucaucgccccgaggggguacuuuaagauucggagcggaaagucgucuauaaugcgcuccgacgcgcccaucggcaaauguaauucagagugcauuacuccuaacgguaguaucccaaaugauaagcccuuccagaacgucaaucgaauaacauauggggcauguccuagauacauuaaacagaacacccugaaacuugccacuggaaugaggaaugugccagaaaaacaaacacggggcaucuuuggcgcuaucgccggguucauugagaacggaugggaagguaugguggacggcugguauggguuucgucaccagaauagcgagggaaccggccaggcagcugaucugaaguccacgcaagccgcgaucaaccagauuaaugguaaauugaaccgccucauagggaagaccaacgagaaguuccaccagaucgaaaaagaguucucugaagucgagggcaggauucaggaccuggaaaaguacguugaggauacaaaaaucgacuuauggagcuauaaugccgagcugcucguggcacuugaaaaccaacauacuaucgaucugaccgacucagagaugaauaaguuguuugaaagaacaaagaagcagcuacgggagaacgcugaagauaugggaaauggcugcuucaagauuuaccacaaaugugacaacgccugcauagggaguauccgaaauggaacuuaugaucaugacguauaccgcgacgaggcucugaacaauagauuucagauuaaggguguggagcucaaauccggcuacaaggauuggaucauuuggaucagcuucgccauaucuugcuuucugcuuugugucgcacuguugggguucaucaugugggccugccagaaaggaaacauuagguguaauaucugcauuuga

SEQ ID NO: 136910 - RNA, 1701 nt, Artificial Sequence; identical to SEQ ID NO: 129801
  derived and/or modified CDS sequence (opt3) from hemagglutinin__InfluenzaA__AFJ77957

SEQ ID NO: 136911 - RNA, 1701 nt, Artificial Sequence; identical to SEQ ID NO: 128678
  derived and/or modified CDS sequence (opt3) from hemagglutinin__InfluenzaA__AFJ77968

SEQ ID NO: 136912 - RNA, 1701 nt, Artificial Sequence
  derived and/or modified CDS sequence (opt3) from hemagglutinin__InfluenzaA__AFJ77979
augaagaccaucauugcccugagcuacauacucugccuuguguucgcucagaaacugcccggcaacgacaauuccacagcaacuuuguguuuagggcaccaugccgucccuaacggaacgaucguuaagaccauuacaaaugaucaaaucgaggugacuaacgcgaccgaacugguacagucuucaaguacagguggcauuugcgacagcccacaccagauccuagauggggagaauuguacccucauagacgcucugcuuggagauccgcagugcgacggcuuucaaaacaaaaagugggaucuguucguggaaagauccaaagccuauucuaauuguuaccccuaugacgucccugauuacgcaucguugaggucacucguggccagcagugguacucuggaguuuaacaaugaauccuucaacuggacagggguuacccagaauggaacgucuagcgcuugcaagcggcgcuccaacaauucauuuuucagucgacugaacuggcucacucauuuaaaguuuaaauauccagcacugaaugugaccaugcccaacaacgagaaguucgacaaacuuuacaucuggggcguccaccauccuggcacagauaaugaccagaucuuuuuguaugcccaggcuagcgggcguauuacugugucuaccaagagaucccaacagacaguaauuccaaacaucggaucaaggccccggguucgcaauauaccuagcagaauuaguaucuacuggaccauugugaaaccaggugauauccugcuaaucaacucuacgggcaaucucauugccccgaggggguacuucaagauacgguccggaaagagcucgaucaugcgcucugacgcgcccauuggcaaauguaacuccgagugcaucacuccuaaugguucaauaccaaacgacaagcccuuucagaaugucaaccgaauuacauauggggcauguccuagauacgugaaacagaauacccugaagcuggccacuggaaugaggaacgugccagaaaaacaaacacggggcaucuucggcgcuaucgccggguuuauugagaauggaugggaagguauggucgauggcugguauggguuccgucaccagaacagugagggaaucggccaggcagcugaccuuaagagcacccaagccgcgauuaaucagauaaacgguaaauugaaccgccucaucgggaagacgaaugagaaguuccaccagauugaaaaagaguuuuccgaaguugagggcagaauccaggaucuggaaaaguacguggaggacaccaaaaucgauuuauggucuuauaacgccgagcugcucguagcacuugaaaaucaacauacaauugaccugacugauagcgagaugaacaaguuguucgaaaggaccaaaaagcagcuacgggagaaugcugaagacaugggaaacggcugcuuuaagauauaccacaaaugugauaaugccugcaucgggucaauucgaaacggaacauaugaccaugauguguaccgcgacgaggcucugaauaacagauuccagaucaagggugucgagcucaggaguggcuacaaagacuggauucuguggaucuccuuugccauaagcugcuuccuucuguguguggcauugcucggguuuaucaugugggccugccagaagggaaauauucgguguaacaucugcauuuga

SEQ ID NO: 136913 - RNA, 1701 nt, Artificial Sequence
  derived and/or modified CDS sequence (opt3) from hemagglutinin__InfluenzaA__AFJ77990
augaagaccaucauugcccugagcuacauacucugccuuguguucgcucagaaacugcccggcaacgacaauuccacagcaacuuuguguuuagggcaccaugccgucccuaacggaacgaucguuaagaccauuacaaaugaucaaaucgaggugacuaacgcgaccgaacugguacagucuucaaguacagguggcauuugcgacagcccacaccagauccuagauggggagaauuguacccucauagacgcucugcuuggagauccgcagugcgacggcuuucaaaacaaaaagugggaucuguucguggaaagauccaaagccuauucuaauuguuaccccuaugacgucccugauuacgcaucguugaggucacucguggccagcagugguacucuggaguuuaacaaugaauccuucaacuggacagggguuacccagaauggaacgucuagcgcuugcaagcggcgcuccaacaauucauuuuucagucgacugaacuggcucacucauuuaaaguuuaaauauccagcacugaaugugaccaugcccaacaacgagaaguucgacaaacuuuacaucuggggcguccaccauccuggcacagauaaugaccagaucuuuuuguaugcccaggcuagcgggcguauuacugugucuaccaagagaucccaacagacaguaauuccaaacaucggaucaaggccccggguucgcaauauaccuagcagaauuaguaucuacuggaccauugugaaaccaggugauauccugcuaaucaacucuacgggcaaucucauugccccgaggggguacuucaagauacgguccggaaagagcucgaucaugcgcucugacgcgcccauuggcaaauguaacuccgagugcaucacuccuaaugguucaauaccaaacgacaagcccuuucagaaugucaaccgaauuacauauggggcauguccuagauacgugaaacagaauacccugaagcuggccacuggaaugaggaacgugccagaaaaacaaacacggggcaucuucggcgcuaucgccggguuuauugagaauggaugggaagguauggucgauggcugguauggguuccgucaccagaacagugagggaaucggccaggcagcugaccuuaagagcacccaagccgcgauuaaucagauaaacgguaaauugaaccgccucaucgggaagacgaaugagaaguuccaccagauugaaaaagaguuuuccgaaguugagggcagaauccaggaucuggaaaaguacguggaggacaccaaaaucgauuuauggucuuauaacgccgagcugcucguagcacuugaaaaucaacauacaauugaccugacugauagcgagaugaacaaguuguucgaaaggaccaaaaagcagcuacgggagaaugcugaagacaugggaaacggcugcuuuaagauauaccacaaaugugauaaugccugcaucgggucaauucgaaacggaacauaugaccaugaugaguaccgcgacgaggcucugaauaacagauuccagaucaaggguguggaacucaaaaguggcuacaaggacuggauucuguggaucuccuuugccauaagcugcuuccuucugugugucacuuugcucggguuuaucaugugggcaugccagaaaggaaauauuagguguaacaucugcauuuga

SEQ ID NO: 136914 - RNA, 1701 nt, Artificial Sequence
  derived and/or modified CDS sequence (opt3) from hemagglutinin__InfluenzaA__AFJ78001
augaagaccaucauugcccugagcuacauacucugccuuguguucgcucagaaacugcccggcaacgacaauuccacagcaacuuuguguuuagggcaccaugccgucccuaacggaacgaucguuaagaccauuacaaaugaucaaaucgaggugacuaacgcgaccgaacugguacagucuucaaguacagguggcauuugcgacagcccacaccagauccuagaugggaaaaauuguacccucauagacgcucugcuuggagauccgcagugcgacgauuuucaaaacaagaaaugggaccuguucguggagagauccaaggccuauucuaauuguuaccccuaugaugucccugacuacgcaucguugaggucacucguggccagcaguggcacucuggaauuuaacaaugaguccuucaacuggacagguguuacccagaaugggacgucuagcgcuugcaagcggcgcuccaacaauucauuuuucagucgacugaacuggcucacucauuuaaaauuuaaguauccagcacugaaugugaccaugcccaacaacgaaaaauucgauaaguuguacaucuggggaguccaccauccuggcacagacaaugaucagauuuuucuuuaugcccaggcuagcggccguaucacugugucuaccaaaagaucccaacagacaguaauuccaaacaucgggucaaggccccggguucgcaauauaccuagcagaauuaguaucuacuggaccauugugaagccaggagacauccugcuaaucaacucuacggguaaucucauugccccgaggggcuacuucaagauacgguccgggaaaagcucgaucaugcgcucugacgcgcccauuggaaaguguaacuccgagugcaucacuccuaauggcucaauaccaaacgauaaacccuuucagaaugucaaccgaauuacauauggugcauguccuagauacgugaagcagaauacccugaaacuugccacugggaugaggaacgugccagagaagcaaacacggggaaucuucggcgcuaucgccggcuuuauugaaaaugggugggagggaauggucgacgguugguauggcuuccgucaccagaacagugaagggaucggacaggcagcugaucugaaaagcacccaagccgcgauuaaucagauaaacggcaaguugaaccgccucaucgguaagacgaaugagaaauuccaccagauugagaaggaauuuuccgagguugaagggagaauccaggaccuggagaaauacguggaagauaccaagaucgacuuauggucuuauaacgccgagcugcucguagcacuugagaaucaacauacaauugaucugacugacagcgaaaugaacaaauuguucgagaggaccaagaagcagcuacgggaaaaugcugaggauaugggcaacggaugcuuuaaaauauaccacaagugugacaaugccugcaucggcucaauucgaaacgggacauaugaucaugacguguaccgcgacgaagcucugaauaacagauuccagaucaaaggagucgagcucaagagugguuacaaagauuggauucuguggaucuccuuugccauaagcugcuuccuucugugugugacuuugcucggcuuuaucaugugggcaugccagaaggggaauauuagguguaacaucugcauuuga

SEQ ID NO: 136915 - RNA, 1701 nt, Artificial Sequence
  derived and/or modified CDS sequence (opt3) from hemagglutinin__InfluenzaA__AFJ78012
augaagaccaucauugcccugagcuacauacucugccuuguguucgcucagaaacugcccggcaacgacaauuccacagcaacuuuguguuuagggcaccaugccgucccuaacggaacgaucguuaagaccauuacaaaugaucaaaucgaggugacuaacgcgaccgaacugguacagucuucaaguacagguggcauuugcgacagcccacaccagauccuagauggggagaauuguacccucauagacgcucugcuuggagauccgcagugcgacggcuuucaaaacaaaaagugggaucuguucguggaaagauccaaagcccauucuaauuguuaucccuacgacgucccugauuaugcaucguugaggucacucguggccagcagugguacucuggaguuuaacaaugaauccuucaacuggacagggguuacccagaauggaacgucuagcgcuugcaagcggcgcuccaacaauucauuuuucagucgacugaacuggcucacucacuuaaaguuuaaauacccagcacugaaugugaccaugcccaacaacgagaaguucgacaaacuuuauaucuggggcguccaucacccuggcacagauaaugaccagaucuuuuuguacgcccaggcuagcgggcguauuacugugucuaccaagagaucccaacagacaguaauuccaaacaucggaucaaggccccggguucgcaauauaccuagcagaauuaguaucuauuggaccauugugaaaccaggugauauccugcuaaucaacucuacgggcaaucucauugccccgaggggguacuucaagauacgguccggaaagagcucgaucaugcgcucugacgcgcccauuggcaaauguaacuccgagugcaucacuccuaaugguucaauaccaaacgacaagcccuuucagaaugucaaccgaauuacauacggggcauguccuagauaugugaaacagaauacccugaagcuggccacuggaaugaggaacgugccagaaaaacaaacacggggcaucuucggcgcuaucgccggguuuauugagaauggaugggaagguauggucgauggcugguacggguuccgucaccagaacagugagggaaucggccaggcagcugaccuuaagagcacccaagccgcgauugaucagauaaaugguaaauugaaccgccucaucgggaagacgaacgagaaguuccaucagauugaaaaagaguuuuccgaaguugagggcagaauccaggaccuggaaaaguauguggaggauaccaaaaucgacuuauggucuuacaaugccgagcugcucguagcacuugaaaaccaacacacaauugaucugacugacagcgagaugaauaaguuguucgaaaggaccaaaaagcagcuacgggagaacgcugaagauaugggaaauggcugcuuuaagauauaucauaaaugugacaacgccugcaucgggucaauucgaaauggaacauacgaucacgacguguaucgcgacgaggcucugaacaauagauuccagaucaagggugucgagcucaaaaguggcuacaaggauuggauucuguggaucuccuuugccauaagcugcuuccuucuguguguggcauugcucggguuuaucaugugggccugccagaaaggaaacauuagguguaauaucugcauuuga

SEQ ID NO: 136916 - RNA, 1701 nt, Artificial Sequence
  derived and/or modified CDS sequence (opt3) from hemagglutinin__InfluenzaA__AFJ78023
augaagaccaucauugcccugagcuacauacucugccuuguguucgcucagaaacugcccggcaacgacaauuccacagcaacuuuguguuuagggcaccaugccgucccuaacggaacgaucguuaagaccauuacaaaugaucaaaucgaggugacuaacgcgaccgaacugguacagucuucaaguacagguggcauuugcgacagcccacaccagauccuagauggggagaauuguacccucauagacgcucugcuuggagauccgcagugcgacggcuuucaaaacaaaaagugggaucuguucguggaaagauccaaagccuauucuaauuguuaccccuaugacgucccugauuacgcaucguugaggucacucguggccagcagugguacucuggaguuuaacaaugaauccuucaacuggacagggguuacccagaauggaacgucuagcgcuugcaagcggaaguccaacaauucauuuuucagucgccugaacuggcucacucauuuaaaauuuaaguauccagcacugaaugugaccaugcccaacaacgagaaauucgacaaguuguacaucuggggcguccaccauccuggcacagauaaugaccagauuuuucuuuaugcccaggcuagcgggcgaaucacugugucuaccaaacguucccaacagacaguaauuccaaacaucggaucaagacccaggguucggaauauaccuagccgcauuaguaucuacuggaccauugugaagccaggugauauccugcuaaucaacucuacgggcaaucucauugccccgagaggguacuucaagauaagguccggaaaaagcucgaucaugcggucugacgcgcccauuggcaaguguaacuccgagugcaucacuccuaaugguucaauaccaaacgacaaacccuuucagaaugucaaccgcauuacauauggggcauguccucgauacgugaagcagaauacccugaaacuugccacuggaaugagaaacgugccagaaaagcaaacaaggggcaucuucggcgcuaucgccggguuuauugagaauggaugggaagguauggucgauggcugguauggguuccggcaccagaacagugagggaaucggccaggcagcugaccugaaaagcacccaagccgcgauuaaucagauaaacgguaaguugaaccgucucaucgggaagacgaaugagaaauuccaccagauugaaaaggaguuuuccgaaguugagggccgcauccaggaucuggaaaaauacguggaggacaccaagaucgauuuauggucuuauaacgccgagcugcucguagcacuugaaaaucaacauacaauugaccugacugauagcgagaugaacaaauuguucgaaagaaccaagaagcagcuaagggagaaugcugaagacaugggaaacggcugcuuuaaaauauaccacaagugugauaaugccugcaucgggucaauucggaacggaacauaugaccaugauguguaccgagacgaggcucugaauaaccgcuuccagaucaaaggugucgagcucaagaguggcuacaaagacuggauucuguggaucuccuuugccauaagcugcuuccuucuguguguggcauugcucggguuuaucaugugggccugccagaagggaaauauuagauguaacaucugcauuuga

SEQ ID NO: 136917 - RNA, 1701 nt, Artificial Sequence; identical to SEQ ID NO: 128678
  derived and/or modified CDS sequence (opt3) from hemagglutinin__InfluenzaA__AFJ78034

SEQ ID NO: 136918 - RNA, 1701 nt, Artificial Sequence
  derived and/or modified CDS sequence (opt3) from hemagglutinin__InfluenzaA__AFJ78045
augaagaccaucauugcccugagcuacauacucugccuuguguucgcucagaaacugcccggcaacgacaauuccacagcaacuuuguguuuagggcaccaugccgucccuaacggaacgaucguuaagaccauuacaaaugaucaaaucgaggugacuaacgcgaccgaacugguacagucuucaaguacagguggcauuugcgacagcccacaccagauccuagauggggagaauuguacccucauagacgcucugcuuggagauccgcagugcgacggcuuucaaaacaaaaagugggaucuguucguggaaagauccagggccuauucuaauuguuaccccuaugacgucccugauuacgcaucguugcggucacucguggccagcagugguacucuggaguuuaacaaugaauccuucaacuggacagggguuacccagaauggaacgucuagcgcuugcaaacgccgauccaacaauucauuuuucagucgucugaacuggcucacucauuuaaaguuuaaguauccagcacugaaugugaccaugcccaacaacgagaaauucgacaaguuguacaucuggggcguccaccauccuggcacagauaaugaccagauuuuucuuuaugcccaggcuagcgggagaaucacugugucuaccaaaaggucccaacagacaguaauuccaaacaucggaucacggccccgcguuagaaauauaccuagcaggauuaguaucuacuggaccauugugaagccaggugauauccugcuaaucaacucuacgggcaaucucauugccccgcggggguacuucaaaauacgcuccggaaagagcucgaucaugcgaucugacgcgcccauuggcaaguguaacuccgagugcaucacuccuaaugguucaauaccaaacgacaaacccuuucagaaugucaacagaauuacauauggggcauguccuagguacgugaagcagaauacccugaaacuugccacuggaaugcggaacgugccagaaaagcaaacacguggcaucuucggcgcuaucgccggguuuauugagaauggaugggaagguauggucgauggcugguauggguuccgccaccagaacagugagggaaugggccaggcagcugaccugaaaagcacccaagccgcgaucaaucagauuaacgguaaguugaacagacucauagggaaaacgaaugagaaguuccaccagaucgaaaaggaguuuuccgaaguugagggcaggauucaggaucuggaaaaauacguggaggacaccaagaucgauuuauggucuuauaacgccgagcugcucguagcacuugaaaaucaacauacaaucgaccugacugauagcgagaugaacaaauuguucgaacggaccaagaaacagcuacgagagaaugcugaagacaugggaaacggcugcuuuaagauuuaccacaagugugauaaugccugcauagggucaauccgcaacggaacauaugaccaugauguguacagagacgaggcucugaauaacagguuccagauuaaaggugucgagcucaagaguggcuacaaagacuggauccuguggauuuccuuugccaucagcugcuuccuucuguguguggcauugcucggguuuauaaugugggccugccagaagggaaauaucaaauguaacauuugcaucuga

SEQ ID NO: 136919 - RNA, 1701 nt, Artificial Sequence; identical to SEQ ID NO: 128678
  derived and/or modified CDS sequence (opt3) from hemagglutinin__InfluenzaA__AFJ78056

SEQ ID NO: 136920 - RNA, 1701 nt, Artificial Sequence
  derived and/or modified CDS sequence (opt3) from hemagglutinin__InfluenzaA__AFJ78067
augaagaccaucauugcccugagcuacauacucugccuuguguucgcucagaaacugcccggcaacgacaauuccacagcaacuuuguguuuagggcaccaugccgucccuaacggaacgaucguuaagaccauuacaaaugaucaaaucgaggugacuaacgcgaccgaacugguacagucuucaaguacagguggcauuugcgacagcccacaccagauccuagauggggagaauuguacccucauagacgcucugcuuggagauccgcagugcgacggcuuucaaaacaaaaagugggaucuguucguggaaagauccaaagccuauucuaauuguuaccccuaugacgucccugauuacgcaucguugaggucacucguggccagcagugguacucuggaguuuaacaaugaauccuucaacuggacagggguuacccagaauggaacgucuagcgcuugcaagcggcgcuccaacaauucauuuuucagucgacugaacuggcucacucauuuaaaguuuaaauauccagcacugaaugugaccaugcccaacaacgagaaguucgacaaacuuuacaucuggggcguccaccauccuggcacagauaaugaccagaucuuuuuguaugcccaggcuagcgggcguauuacugugucuaccaagagaucccaacagacaguaauuccaaacaucggaucaaggccccggguucgcaauauaccuagcagaauuaguaucuacuggaccauugugaaaccaggugauauccugcuaaucaacucuacgggcaaucucauugccccgaggggguacuucaagauacgguccggacgcagcucgaucaugcgaucugacgcgcccauuggcaaguguaacuccgagugcaucacuccuaaugguucaauaccaaacgacaaacccuuucagaaugucaacagaauuacauauggggcauguccuagguacgugaagcagaauacccugaaacuugccacuggaaugcggaacgugccagaaaagcaaacacguggcaucuucggcgcuaucgccggguuuauugagaauggaugggaagguauggucgauggcugguauggguuccgccaccagaacagugagggaaucggccaggcagcugaccugaaaagcacccaagccgcgauuaaucagauaaacgguaaguugaacagacucaucgggaaaacgaaugagaaguuccaccagauugaaaaggaguuuuccgaaguugagggcaggauccaggaucuggaaaaauacguggaggacaccaagaucgauuuauggucuuauaacgccgagcugcucguagcacuugaaaaucaacauacaauugaccugacugauagcgagaugaacaaauuguucgaacggaccaagaaacagcuacgagagaaugcugaagacaugggaaacggcugcuuuaagauauaccacaagugugauaaugccugcaucgggucaauucgcaacggaacauaugaccaugauguguacagagacgaggcucugaauaacagguuccagaucaaaggugucgagcucaagaguggcuacaaagacuggauucuguggaucuccuuugccauaagcugcuuccuucuguguguggcauugcucggguuuaucaugugggccugccagaagggaaauauucgguguaacaucugcauuuga

SEQ ID NO: 136921 - RNA, 1701 nt, Artificial Sequence
  derived and/or modified CDS sequence (opt3) from hemagglutinin__InfluenzaA__AFJ78078
augaagaccaucauugcccugagcuacauacucugccuuguguucgcucagaaacugcccggcaacgacaauuccacagcaacuuuguguuuagggcaccaugccgucccuaacggaacgaucguuaagaccauuacaaaugaucaaaucgaggugacuaacgcgaccgaacugguacagucuucaaguacagguggcauuugcgacagcccacaccagauccuagauggggagaauuguacccucauagacgcucugcuuggagauccgcagugcgacggcuuucaaaacaaaaagugggaucuguucguggaaagauccaaagccuauucuaauuguuaccccuaugacgucccugauuacgcaucguugaggucacucguggccagcagugguacucuggaguuuaacaaugaauccuucaacuggacagggguuacccagaauggaacgucuagcgcuugcaagcggcgcuccaacaauucauuuuucagucgacugaacuggcucacucauuuaaaguuuaaauauccagcacugaaugugaccaugcccaacaacgagaaguucgacaaacuuuacaucuggggcguccaccauccuggcacagauaaugaccagauuuuucuuuaugcccaggcuagcgggcguaucacugugucuaccaagagaucccaacagacaguaauuccaaacaucggaucaaggccccggguucgcaauauaccuagcagaauuaguaucuacuggaccauugugaaaccaggugauauccugcuaaucaacucuacgggcaaucucauugccccgaggggguacuucaagauacgguccggaaagagcucgaucaugcgcucugacgcgcccauugacaaauguaacuccgagugcaucacuccuaauggcucaauaccaaacgauaagcccuuucagaaugucaaccgaauuacauauggugcauguccuagauacgugaaacagaauacccugaaguuggccacugggaugaggaacgugccagaaaaacaaacacggggaaucuucggcgcuaucgccggcuuuauugagaaugggugggaaggaauggucgacgguugguauggcuuccgucaccagaacagugaggggaucggacaggcagcugaucugaaaagcacccaagccgcgauugaccagauaaauggcaaauugaaccgccucaucgguaagacgaacgagaaguuccaccagauugaaaaagaguuuuccgaaguugaggggagaauccaggaucuggaaaaguacguggaggacaccaaaaucgauuuauggucuuauaaugccgagcugcucguagcacuugaaaaccaacauacaauugaccugacugauagcgagaugaauaaguuguucgaaaagaccaagaagcagcuaagggagaacgcugaagacaugggcaauggaugcuuuaaaauauaccacaagugugauaacgccugcaucggcucaauucggaaugggacauaugaccaugacguguaccgagaugaggcucugaacaaucgcuuccagaucaaaggagucgagcucaagagugguuacaaagacuggauucuguggaucuccuuugccauaagcugcuuccuucuguguguggcauugcucggcuuuaucaugugggccugccagaaggggaacauuagauguaauaucugcauuuga

SEQ ID NO: 136922 - RNA, 1701 nt, Artificial Sequence; identical to SEQ ID NO: 136845
  derived and/or modified CDS sequence (opt3) from hemagglutinin__InfluenzaA__AFJ78089

SEQ ID NO: 136923 - RNA, 1701 nt, Artificial Sequence; identical to SEQ ID NO: 129876
  derived and/or modified CDS sequence (opt3) from hemagglutinin__InfluenzaA__AFJ78100

SEQ ID NO: 136924 - RNA, 1701 nt, Artificial Sequence
  derived and/or modified CDS sequence (opt3) from hemagglutinin__InfluenzaA__AFJ78111
augaagaccaucauugcccugagcuacauacucugccuuguguucgcucagaaacugcccggcaacgacaauuccacagcaacuuuguguuuagggcaccaugccgucccuaacggaacgaucguuaagaccauuacaaaugaucaaaucgaggugacuaacgcgaccgaacugguacagucuucaaguacagguggcauuugcgacagcccacaccagauccuagauggggagaauuguacccucauagacgcucugcuuggagauccgcagugcgacggcuuucaaaacaaaaagugggaucuguucguggaaagauccaaagccuauucuaauuguuaccccuaugacgucccugauuacgcaucguugaggucacucguggccagcagugguacucuggaguuuaacaaugaauccuucaacuggacagggguuacccagaauggaacgucuagcgcuugcaagcggcgcuccaacaauucauuuuucagucgacugaacuggcucacucauuuaaaguuuaaauauccagcacugaaugugaccaugcccaacaacgagaauuucgacaaguuguacaucuggggcguccaccauccuggcacagauaacgaccagauuuuucuuuaugcccaggcuagcgggcguaucacugugucuaccaaaagaucccaacagacaguaauuccaaauaucggaucaaggccccggguucgcaacauaccuagcagaauuaguaucuacuggaccauugugaagccaggugauauccugcuaaucaauucuacgggcaaccucauugccccgaggggguacuucaaaauacgguccggaaagagcucgaucaugcgcucugacgcgcccauuggcaaguguaauuccgagugcaucacuccuaacgguucaauaccaaaugacaaacccuuucagaacgucaaucgaauuacauauggggcauguccuagauacgugaagcagaacacccugaaacuugccacuggaaugaggaaugugccagaaaagcaaacacggggcaucuucggcgcuaucgccggguuuauugagaacggaugggaagguauggucgauggcugguauggguuccgucaccagaauagugagggaaucggccaggcagcugaccugaaaagcacccaagccgcgauugaucagauaaacgguaaguugaaccgccucaucgggaaaacgaaugagaaguuccaccagauugaaaaggaguuuuccgaaguugagggcagaauccaggaccuggaaaaauacguggaggauaccaagaucgacuuauggucuuauaacgccgagcugcucguagcacuugaaaaucaacauacaauugaucugacugacagcgagaugaacaaauuguucgaaaagaccaaaaagcagcuaagggagaaugcugaagauaugggaaacggcugcuuuaagauauaccacaaaugugacaaugccugcaucgggucaauucggaacggaacauaugaucaugacguguaccgagacgaggcucugaauaaccgcuuccagaucaagggugucgagcucaaaaguggcuacaaggauuggauucuguggaucuccuuugccauaagcugcuuccuucuguguguggcauugcucggguuuaucaugugggccugccagaaaggaaauauuagauguaacaucugcauuuga

SEQ ID NO: 136925 - RNA, 1701 nt, Artificial Sequence
  derived and/or modified CDS sequence (opt3) from hemagglutinin__InfluenzaA__AFJ78122
augaagaccaucauugcccugagcuacauacucugccuuaucuucgcucagaaacugcccggcaacgacaauuccacagcaacuuuguguuuagggcaccaugccgugccuaacggaacgauugucaagaccaucacaaaugaucaaauugagguuacuaacgcgaccgaacuggugcagucuucaaguacagguggcaucugcgacagcccacaccagauacuagauggggagaauuguacccucaucgacgcucugcuuggagauccgcagugcgacggcuuucaaaacaaaaagugggaucuguucguagaaagauccaaagccuauucuaauuguuaccccuaugacgugccugauuacgcaucguugaggucacucgucgccagcagugguacucuggaguuuaacaaugaauccuucaacuggacaggggugacccagaauggaacgucuagcgcuugcaagcggcgcuccaacaauucauuuuucagucgacugaacuggcucacucauuuaaaguuuaaauauccagcacugaauguuaccaugcccaacaacgagaaguucgacaaacuuuacauuuggggcgugcaccauccuggcacagauaaugaccagaucuuuuuguaugcccaggcuagcgggcguauuacugucucuaccaagagaucccaacagacagugaucccaaacauaggaucaaggccccggguacgcaauauuccuagcagaaucaguauuuacuggaccaucguuaaaccaggugauauccugcuaauuaacucuacgggcaaucucauagccccgaggggguacuucaagauccgguccggacgcagcucgauuaugcgaucugacgcgcccaucgacaaguguaacuccgagugcauaacuccuaauggcucaauuccaaacgauaaacccuuucagaaugugaacagaaucacauauggugcauguccuagguacgucaagcagaauacccugaaacuugccacugggaugcggaacgugccagaaaagcaaacacguggaaucuucggcgcuauugccggcuuuaucgagaaugggugggaaggaaugguggacgguugguauggcuuccgccaccagaacagugaggggauuggacaggcagcugaucugaaaagcacccaagccgcgauagaccagaucaauggcaaguugaacagacucauuaggaaaacgaacgagaaguuccaccagaucgaaaaggaguuuuccgaagucgagggucggauccaggaucuggaaaaauacguugaggacaccaagauugauuuauggucuuauaaugccgagcugcucguggcacuugaaaaccaacauacaauagaccugacugauagcgagaugaauaaauuguucgaaaagaccaaaaagcagcuacgagagaacgcugaagacauggggaauggcugcuuuaagaucuaccacaaaugugauaacgccugcauuggaucaauccgcaauggcacauaugaccaugacguauacagagaugaggcucugaacaauagguuccagauuaaggggguggagcucaaaaguggauacaaggacuggauccuguggauauccuuugccaucagcugcuuccuucugugugucgcauugcucgguuuuauuaugugggccugccagaaaggcaacauccgguguaauauuugcaucuga

SEQ ID NO: 136926 - RNA, 1701 nt, Artificial Sequence
  derived and/or modified CDS sequence (opt3) from hemagglutinin__InfluenzaA__AFJ78144
augaagaccaucauugcccugagcuacauacucugccuuguguucgcucagaaacugcccggcaacgacaauuccacagcaacuuuguguuuagggcaccaugccgucccuaacggaacgaucguuaagaccauuacaaaugaucaaaucgaggugacuaacgcgaccgaacugguacagucuucaaguacaggugagauuugcgacagcccacaccagauccuagauggcgaaaauuguacccucauagacgcucugcuuggggauccgcagugcgacggauuucaaaacaaaaagugggaucuguucguggagagauccaaagccuauucuaauuguuaccccuaugacgucccugauuacgcaucguugaggucacucguggccagcaguggcacucuggaauuuaacaaugaguccuucaacuggacagguguuacccagaaugggacgucuagcuccugcauccggcgcucaaacaauagcuuuuucagucgacugaacuggcucacucauuuaaaguuuaaguauccagcucugaaugugaccaugcccaacaacgagaaauucgacaaacuuuacauuuggggaguccaccauccuggcacagauaaugaccagaucuuuuuguaugcacaggccucuggccguauuacuguguccaccaagagaucacaacagacaguaaucccaaacauagggagcaggccccggguucgcaauauuccuaguagaaucucuauuuacuggaccaucgugaagccaggagauauccugcuaauuaacuccacggguaaucucauagcuccgaggggcuacuucaaaauccggagcgggaagucgucuauuaugcgcuccgacgcccccaucggaaaguguaacucagaaugcauaacuccuaauggcaguauuccaaacgacaaacccuuucagaaugucaaccgaaucacauauggugcguguccuagauacgugaagcagaauacccugaaacuugcaacugggaugaggaacgugccagagaagcaaacacggggaaucuucggcgccauugcuggcuuuaucgaaaaugggugggagggaauggucgaugguugguauggcuuccgucaccagaacagcgaggggauuggacaggccgcagaccugaaauccacccaagcugccauagaucagaucaauggcaaguugaaccgccucauugguaaaacgaacgaaaaguuccaccagaucgagaaggaauuuucugagguugaagggagaauccaggaccuggagaaauacguggaggauaccaagguagacuuauggagcuauaaugcggaacugcucguggcccuugagaaccaacauacaauugaucugacugacucagaaaugaauaaauuguucgagaagaccaaaaagcagcuaagggaaaacgcagaggauaugggcaauggaugcuuuaagauauaccacaaaugugacaacgcuugcaucggcaguauucggaaugggacauaugaucaugacgucuaccgagacgaggcccugaacaaucgcuuccagaucaagggaguggaacucaaauccgguuacaaggauuggauucuguggaucagcuuugcuauaucuugcuuccuucuguguguugccuugcucggcuuuaucaugugggcaugccagaaagggaacauuagauguaauaucugcauuuga

SEQ ID NO: 136927 - RNA, 1701 nt, Artificial Sequence; identical to SEQ ID NO: 136926
  derived and/or modified CDS sequence (opt3) from hemagglutinin__InfluenzaA__AFJ78155

SEQ ID NO: 136928 - RNA, 1701 nt, Artificial Sequence
  derived and/or modified CDS sequence (opt3) from hemagglutinin__InfluenzaA__AFJ78166
augaagaccaucauugcccugagcuacauacucugccuuguguucgcucagaaacugcccggcaacgacaauuccacagcaacuuuguguuuagggcaccaugccgucccuaacggaacgaucguuaagaccauuacaaaugaucaaaucgaggugacuaacgcgaccgaacugguacagucuucaaguacaggugagauuugcgacagcccacaccagauccuagauggcgaaaauuguacccucauagacgcucugcuuggggauccgcagugcgacggauuucaaaacaaaaagugggaucuguucguggagagauccaaagccuauucuaauuguuaccccuaugacgucccugauuacgcaucguugaggucacucguggccagcaguggcacucuggaauuuaacaaugaguccuucaacuggacagguguuacccagaaugggacgucuagcgcuugcauccggcgcuccaacaauucauuuuucagucgacugaacuggcucacucauuuaaaguuuaaguauccagcacugaaugugaccaugcccaacaacgaggaguucgacaaacuuuacauuuggggaguccaccauccuggcacagauaaugaccagaucuuuuuguaugcccaggcuagcggccguauuacugugucuaccaagagaucccaacagacaguaaucccaaacauagggucaaggccccggguucgcaauauuccuagcagaaucaguauuuacuggaccaucgugaaaccaggagauauccugcuaauuaacucuacggguaaucucauagccccgaggggcuacuucaagauccgguccgggaaaagcucgauuaugcgcucugacgcgcccaucggaaaguguaacuccgaaugcauaacuccuaauggcucaauuccaaacgacaagcccuuucagaaugucaaccgaaucacauauggugcauguccuagauacgugaaacagaauacccugaagcuggccacugggaugaggaacgugccagaaaaacaaacacggggaaucuucggcgcuauugccggcuuuaucgagaaugggugggagggaauggucgaugguugguauggcuuccgucaccagaacagugaagggauuggacaggcagcugaccuuaagagcacccaagccgcgauagaucagaucaauggcaaauugaaccgccucauugguaagacgaacgagaaauuccaccagaucgaaaaggaguuuuccgaaguugaggggagaauccaggaccuggagaaguacguggaagauaccaaaauugacuuauggucuuauaaugccgagcugcucguagcacuugaaaaccaacauacaauagaucugacugacagcgagaugaauaaguuguucgagaaaaccaagaggcagcuacgggaaaacgcugaggauaugggcaauggaugcuuuaaaaucuaccacaagugugacaacgccugcauuggcucaauccgaaaugggacauaugaucaugacguguaccgcgacgaagcucugaacaauagauuccagauuaagggagucgagcucaaaagugguuacaaggauuggauccuguggauauccuuugccaucagcugcuuccuucuguguguggcauugcucggcuuuauuaugugggccugccagaaagggaacaucagguguaauauuugcaucuga

SEQ ID NO: 136929 - RNA, 1701 nt, Artificial Sequence; identical to SEQ ID NO: 129777
  derived and/or modified CDS sequence (opt3) from hemagglutinin__InfluenzaA__AFJ78177

SEQ ID NO: 136930 - RNA, 1701 nt, Artificial Sequence
  derived and/or modified CDS sequence (opt3) from hemagglutinin__InfluenzaA__AFJ78188
augaagaccaucauugcccugagcuacauacucugccuuguguucgcucagaaacugcccggcaacgacaauuccacagcaacuuuguguuuagggcaccaugccgucccuaacggaacgaucguuaagaccauuacaaaugaucaaaucgaggugacuaacgcgaccgaacugguacagucuucaaguacaggugagauuugcgacagcccacaccagauccuagauggcgaaaauuguacccucauagacgcucugcuuggggauccgcagugcgacggauuucaaaacaaaaagugggaucuguucguggagagauccaaagccuauucuaauuguuaccccuaugacgucccugauuacgcaucguugaggucacucguggccagcaguggcacucuggaauuuaacaaugaguccuucaacuggacagguguuacccagaaugggacgucuagcgcuugcauccggcgcuccaacaauucauuuuucagucgacugaacuggcucacucauuuaaaguuuaaguauccagcacugaaugugaccaugcccaacaacgagaaauucgacaaacuuuacauuuggggaguccaccauccuggcacagauaaugaccagaucuuuuuguaugcccaggcuagcggccguauuacugugucuaccaaaagaucccaacagacaguaaucccaaacauagggucaaggccccggauucgcaauaucccuagcagaauuaguaucuacuggaccaucguuaagccaggagauauucugcuaauaaacucuacggguaaucucaucgccccgaggggcuacuucaaaauucgguccggaaagagcucgaucaugcgcucugacgcgcccauagggaaguguaacuccgaaugcauuacuccuaauggcucaaucccaaacgacaaacccuuucagaaugugaaccgaaucacauauggugcauguccuagauacgucaagcagaauacccugaaacuugccacugggaugaggaacgugccagagaagcaaacacggggaauuuucggcgcuaucgccggcuuuauugaaaaugggugggagggaaugguggaugguugguauggcuuccgucaccagaacagugaggggaccggacaggcagcugaccugaaaagcacgcaagccgcgauagaucagaucaauggcaaguugaaccgccucauugguaaaaccaacgaaaaguuccaccagaucgagaaggaauuuuccgaggucgaagggagaauccaggaccuggagaaauacguugaggauacaaagauugacuuauggucuuauaaugccgaacugcucguggcacuugagaaccaacauacuauagaucugaccgacagcgaaaugaauaaauuguucgagaagacaaagaagcagcuaagggaaaacgcugaggauaugggcaauggaugcuuuaagaucuaccacaaaugugacaacgccugcauuggcucaauccggaaugggacuuaugaucaugacguauaccgagacgaggcucugaacaaucgcuuccagauuaagggaguggaacucaaaagugguuacaaggauuggauccuguggauauccuuugccaucagcugcuuccuucugugugucgcauugcucggcuuuauuaugugggccugccagaaagggaacaucagauguaauauuugcaucuga

SEQ ID NO: 136931 - RNA, 1701 nt, Artificial Sequence
  derived and/or modified CDS sequence (opt3) from hemagglutinin__InfluenzaA__AFJ78210
augaagaccaucauugcccugagcuacauacucugccuuguguucgcucagaaacugcccggcaacgacaauuccacagcaacuuuguguuuagggcaccaugccgucccuaacggaacgaucguuaagaccauuacaaaugaucaaaucgaggugacuaacgcgaccgaacugguacagucuucaaguacaggugagauuugcgacagcccacaccagauccuagauggcgaaaauuguacccucauagacgcucugcuuggggauccgcagugcgacggauuucaaaacaaaaagugggaucuguucguggagagauccaaagccuauucuaauuguuaccccuaugacgucccugauuacgcaucguugaggucacucguggccagcaguggcacucuggaauuuaacaaugaguccuucaacuggacagguguuacccagaaugggacgucuagcgcuugcauccggcgcuccaacaauucauuuuucagucgacugaacuggcucacucauuuaaaguuuaaguauccagcacugaaugugaccaugcccaacaacgagaaauucgacaaacuuuacauuuggggaguccaccauccuggcacagauaaugaccagaucuuuuuguaugcccaggcuagcggccguauuacugugucuaccaaaagaucccaacagacaguaaucccaaacauagggucaaggccccggguucgcaauauuccuagcagaaucaguauuuacuggaccaucgugaagccaggagauauccugcuaauuaacucuacggguaaucucauagccccgaggggcuacuucaaaauccgguccggaaagagcucgauuaugcgcucugacgcgcccaucgggaaguguaacuccgaaugcauaacuccuaauggcucaauuccaaacgacaaacccuuucagaaugucaaccgaaucacauauggugcauguccuagauacgugaagcagaauacccugaaacuugccacugggaugaggaacgugccagagaagcaaacacggggaaucuucggcgcuauugccggcuuuaucgaaaaugggugggagggaauggucgaugguugguauggcuuccgucaccagaacagugaggggaccggacaggcagcugaccugaaaagcacgcaagccgcgauugaucagauaaauggcaaguugaaccgccucaucgguaaaaccaacgaaaaguuccaccagauugagaaggaauuuuccgagguugaagggagaauccaggaccuggagaaauacguggaggauacaaagaucgacuuauggucuuauaaugccgaacugcucguagcacuugagaaccaacauacuauugaucugaccgacagcgaaaugaauaaauuguucgagaagacaaagaagcagcuaagggaaaacgcugaggauaugggcaauggaugcuuuaagauauaccacaaaugugacaacgccugcaucggcucaauucggaaugggacuuaugaucaugacguguaccgagacgaggcucugaacaaucgcuuccagaucaagggaauugaacucaaaagugguuacaaggauuggauccuguggauauccuuugccaucagcugcuuccuucugugugucgcauugcucggcuuuauuaugugggccugccagaaagggaacaucagauguaauauuugcaucuga

SEQ ID NO: 136932 - RNA, 1701 nt, Artificial Sequence; identical to SEQ ID NO: 136856
  derived and/or modified CDS sequence (opt3) from hemagglutinin__InfluenzaA__AFJ78221

SEQ ID NO: 136933 - RNA, 1701 nt, Artificial Sequence
  derived and/or modified CDS sequence (opt3) from hemagglutinin__InfluenzaA__AFJ78232
augaagaccaucauugcccugagcuacauacucugccuuguguucgcucagaaacugcccggcaacgacaauuccacagcaacuuuguguuuagggcaccaugccgucccuaacggaacgaucguuaagaccauuacaaaugaucaaaucgaggugacuaacgcgaccgaacugguacagucuucaaguacagguaaaauuugcgacagcccacaccagauccuagauggcgagaauuguacccucauagacgcucugcuuggggauccgcagugcgacggauuucaaaacaagaaaugggaucuguucguggaaagauccaaggccuauucuaauuguuaccccuaugacgucccugauuacgcaucguugaggucacucguggccagcaguggcacucuggaguuuaacaaugaauccuucaacuggacagguguuacccagaaugggacgucuagcgcuugcauccggcgcuccaacaauucauuuuucagucgacugaacuggcucacucauuuaaaguuuaaauauccagcacugaaugugaccaugcccaacaacgaggaguucgacaaacuuuacauuuggggaguccaccauccuggcacagauaaugaccagaucuuuuuguaugcccaggcuagcggccguauuacugugucuaccaagagaucccaacagacaguaaucccaaacauagggucaaggccccggguucgcaauauuccuagcagaaucaguauuuacuggaccaucgugaagccaggagauauccugcuaauuaacucuacggguaaucucauagccccgaggggcuacuucaaaauccgguccggaaagagcucgauuaugcgcucugacgcgcccaucgggaaguguaacuccgaaugcauaacuccuaauggcucaauuccaaacgacaaacccuuucagaaugucaaccgaaucacauauggugcauguccuagauacgugaagcagaauacccugaaacuugccacugggaugaggaacgugccagagaagcaaacacggggaaucuucggcgcuauugccggcuuuaucgaaaaugggugggagggaauggucgaugguugguauggcuuccgucaccagaacagugaggggaccggacaggcagcugaccugaaaagcacgcaagccgcgauugaucagauaaauggcaaguugaaccgccucaucgguaaaaccaacgaaaaguuccaccagauugagaaugaauuuuccgagguugaagggagaauccaggaccuggagaaguacguggaggauacaaaaaucgacuuauggucuuauaacgccgaacugcucguagcacuugagaaucaacauacuauugaucugaccgacagcgaaaugaacaaguuguucgagaaaacaaagaaacagcuaagggaaaaugcugaggauaugggcaacggaugcuuuaagauauaccacaagugugacaaugccugcaucggcucaauucggaacgggacuuaugaucaugacguguaccgagacgaggcucugaauaaccgcuuccagaucaaaggagucgaacucaagagugguuacaaagauuggauucuguggaucuccuuugccauaagcugcuuccuucuguguguggcauugcucggcuuuaucaugugggccugccagaaggggaauauuagauguaacaucugcauuuga

SEQ ID NO: 136934 - RNA, 1701 nt, Artificial Sequence
  derived and/or modified CDS sequence (opt3) from hemagglutinin__InfluenzaA__AFJ78243
augaagaccaucauugcccugagcuacauacucugccuuguguucgcucagaaacugcccggcaacgacaauuccacagcaacuuuguguuuagggcaccaugccgucccuaacggaacgaucguuaagaccauuacaaaugaucaaaucgaggugacuaacgcgaccgaacugguacagucuucaaguacaggugagauuugcgacagcccacaccagauccuagauggcgaaaauuguacccucauagacgcucugcuuggggauccgcagugcgacggauuucaaaacaaaaagugggaucuguucguggagagauccaaagccuauucuaauuguuaccccuaugacgucccugauuacgcaucguugaggucacucguggccagcaguggcacucuggaauuuaacaaugaguccuucaacuggacagguguuacccagaaugggacgucuagcgcuugcauccggcgcuccaacaauucauuuuucagucgacugaacuggcucacucauuuaaaguuuaaguauccagcacugaaugugaccaugcccaacaacgaggaguucgacaaacuuuacauuuggggaguccaccauccuggcacagauaaugaccagaucuuuuuguaugccaaggcuagcggccguauuacugugucuaccaaaagaucccagcaaacaguaaucccaaacauagggucaaggccccggguucgcaauauuccuagcagaaucaguauuuacuggaccaucgugaagccaggagauauccugcuaauuaacucuacggguaaucucauagccccgaggggcuacuucaaaauccgguccggaaagagcucgauuaugcgcucugacgcgcccgucgggaaguguaacuccgaaugcaucacuccuaauggcucaauaccaaacgacaaacccuuucagaaugugaaccgaauuacauauggugcauguccuagauacgugaagcagaauacccugaaacuugccacugggaugaggaacgucccagaaaagcagacacggggaaucuucggcgcuaucgccggcuuuauugagaaugggugggagggaaugguugaugguugguauggcuuccgucacaaaaacagugaagggaccggacaagcagcugaccugaaaagcacgcaggccgcgaucgaucagauuaauggcaaauugaaccgccucauagguaagaccaacgagaaguuccaccaaaucgaaaaagaguuuuccgaaguggaggggaggauucaggaccuggagaaguacguagaagauacaaaaaucgacuuauggucuuauaaugccgagcugcucguggcacuugaaaaccagcauacuaucgaucugaccgacagcgagaugaauaaguuguucgaaaagacaaagaagcagcuaagagagaacgcugaggauaugggcaauggaugcuuuaaaauuuaccacaagugugacaacgccugcauaggcucaauccggaaugggacuuaugaucaugacgucuaccgagacgaagcucugaacaaucgcuuccaaauuaaaggaguggagcucaagagugguuacaaagauuggauccuguggauuuccuuugccaucagcugcuuccuucuguguguugcauugcucggcuuuauaaugugggccugccagaaggggaacaucagauguaauauuugcaucuga

SEQ ID NO: 136935 - RNA, 1701 nt, Artificial Sequence
  derived and/or modified CDS sequence (opt3) from hemagglutinin__InfluenzaA__AFJ78254
augaagaccaucauugcccugagcuacauacucugccuuguguucgcucagaaacugcccggcaacgacaauuccacagcaacuuuguguuuagggcaccaugccgucccuaacggaacgaucguuaagaccauuacaaaugaucaaaucgaggugacuaacgcgaccgaacugguacagucuucaaguacaggugagauuugcgacagcccacaccagauccuagauggcgaaaauuguacccucauagacgcucugcuuggggauccgcagugcgacggauuucaaaacaaaaagugggaucuguucguggagagauccaaagccuauucuaauuguuaccccuaugacgucccugauuacgcaucguugaggucacucguggccagcaguggcacucuggaauuuaacaaugaguccuucaacuggacagguguuacccagaaugggacgucuagcgcuugcauccggcgcuccaacaauucauuuuucagucgacugaacuggcucacucauuuaaaguuuaaguauccagcacugaaugugaccaugcccaacaacgaggaguucgacaaacuuuacauuuggggaguccaccauccuggcacagauaaugaccagaucuuuuuguaugcccaggcuagcggccguauuacugugucuaccaagagaucccaacagacaguaaucccaaacauagggucaaggccccggguucgcaauauuccuagcagaaucaguauuuacuggaccaucgugaaaccaggagauauccugcuaauuaacucuacggguaaucucauagccccgaggggcuacuucaagauccgguccgggaaaagcucgauuaugcgcucugacgcgcccaucggaaaguguaacuccgaaugcauaacuccuaauggcucaauuccaaacgacaagcccuuucagaaugucaaccgaaucacauauggugcauguccuagauacgugaaacagaauacccugaagcuggccacugggaugaggaacgugccagaaaaacaaacacggggaaucuucggcgcuauugccggcuuuaucgagaaugggugggagggaauggucgaugguugguauggcuuccgucaccagaacagugaagggauuggacaggcagcugaccuuaagagcacccaagccgcgauagaucagaucaauggcaaauugaaccgccucauugguaagacgaacgagaaauuccaccagaucgaaaaggaguuuuccgaaguugaggggagaauccaggaccuggagaaguacguggaagauaccaaaguagacuuauggucuuauaaugccgagcugcucguggcacuugaaaaccaacauacaauugaucugacugacagcgagaugaauaaguuguucgagaaaaccaagaaacagcuaagggaaaacgcugaggauaugggcaauggaugcuuuaagauauaccacaagugugacaacgccugcaucggcucaauucggaaugggacauaugaucaugacgucuaccgagacgaagcucugaacaaucgcuuccagaucaaaggaguggagcucaagagugguuacaaagauuggauucuguggaucuccuuugccauaagcugcuuccuucuguguguugcauugcucggcuuuaucaugugggccugccagaaggggaacauuagauguaauaucugcauuuga

SEQ ID NO: 136936 - RNA, 1701 nt, Artificial Sequence; identical to SEQ ID NO: 136935
  derived and/or modified CDS sequence (opt3) from hemagglutinin__InfluenzaA__AFJ78265

SEQ ID NO: 136937 - RNA, 1701 nt, Artificial Sequence
  derived and/or modified CDS sequence (opt3) from hemagglutinin__InfluenzaA__AFJ78276
augaagaccaucauugcccugagcuacauacucugccuuguguucgcucagaaacugcccggcaacgacaauuccacagcaacuuuguguuuagggcaccaugccgucccuaacggaacgaucguuaagaccauuacaaaugaucaaaucgaggugacuaacgcgaccgaacugguacagucuucaaguacaggugagauuugcgacagcccacaccagauccuagauggcgaaaauuguacccucauagacgcucugcuuggggauccgcagugcgacggauuucaaaacaaaaagugggaucuguucguggagagauccaaagccuauucuaauuguuaccccuaugacgucccugauuacgcaucguugaggucacucguggccagcaguggcacucuggaauuuaacaaugaguccuucaacuggacagguguuacccagaaugggacgucuagcgcuugcauccggcgcuccaacaauucauuuuucagucgacugaacuggcucacucauuuaaaguuuaaguauccagcacugaaugugaccaugcccaacaacgagaaauucgacaaacuuuacauuuggggaguccaccauccuggcacagauaaugaccagaucuuuuuguaugcccaggcuagcggccguauuacugugucuaccaagagaucccaacagacaguaaucccaaacauagggucaaggccccggguucgcaauauuccuagcagaaucaguauuuacuggaccaucgugaagccaggagauauccugcuaauuaacucuacggguaaucucauagccccgaggggcuacuucaaaauccgguccggaaagagcucgauuaugcgcucugacgcgcccaucgggaaguguaacuccgaaugcauaacuccuaauggcucaauuccaaacgacaaacccuuucagaaugucaaccgaaucacauauggugcauguccuagauacgugaagcagaauacccugaaacuugccacugggaugaggaacgugccagagaagcaaacacggggaaucuucggcgcuauugccggcuuuaucgaaaaugggugggagggaauggucgaugguugguauggcuuccgucaccagaacagugaggggauuggacaggcagcugaccugaaaagcacccaagccgcgauagaucagaucaauggcaaguugaaccgccucauugguaaaacgaacgaaaaguuccaccagaucgagaaggaauuuuccgagguugaagggagaauccaggaccuggagaaauacguggaggauaccaagguagacuuauggucuuauaaugccgaacugcucguggcacuugagaaccaacauacaauugaucugacugacagcgaaaugaauaaauuguucgagaagaccaaaaagcagcuaagggaaaacgcugaggauaugggcaauggaugcuuuaagauauaccacaaaugugacaacgccugcaucggcucaauucggaaugggacauaugaucaugacgucuaccgagacgaggcucugaacaaucgcuuccagaucaagggaguggaacucaaaagugguuacaaggauuggauucuguggaucuccuuugccauaagcugcuuccuucuguguguugcauugcucggcuuuaucaugugggccugccagaaagggaacauuagauguaauaucugcauuuga

SEQ ID NO: 136938 - RNA, 1701 nt, Artificial Sequence
  derived and/or modified CDS sequence (opt3) from hemagglutinin__InfluenzaA__AFJ78287
augaagaccaucauugcccugagcuacauacucugccuuguguucgcucagaaacugcccggcaacgacaauuccacagcaacuuuguguuuagggcaccaugccgucccuaacggaacgaucguuaagaccauuacaaaugaucaaaucgaggugacuaacgcgaccgaacugguacagucuucaaguacaggugagauuugcgacagcccacaccagauccuagauggcaaaaauuguacccucauggacgcucugcuuggggauccgcagugcgacggauuucaaaacaagaaaugggaucuguucguggaaagauccaaggccuauucuaauuguuaccccuaugacgucccugauuacgcaucguugaggucacucguggccagcaguggcacucuggaguuuaacaaugaauccuucaacuggacagguguuacccagaaugggacgucuagcgcuugcauacggcgcuccaagaacucauuuuucagucgacugaauuggcucacucauuuaaacuuuaaauauccagcacugaaugugaccaugcccaacaacgagcaguucgacaaacuuuacaucuggggaguccaccauccuggcacagauaaagaccagauuuuuccauaugcccaagcuagcggccguaucacugugucuaccaagagaucccagcagacaguaauucccaauaucgggucaaggccucggguucgcaacauaccaagcagaauuaguaucuacuggaccauugugaaaccgggagauaucuugcugaucaauucuacggguaaccuaauugcccccaggggcuacuucaagauacgguccggaaagagcucgaucaugcgcucugacgcgccuauugggaaauguaauuccgagugcaucacuccaaacggcucaauacccaaugacaagccuuuucagaacgucaaucgaauuacauauggugcauguccaagauacgugaaacaaaacacccucaagcuggccacugggaugaggaaugugcccgaaaaacagacacggggaaucuucggcgcuaucgccggcuuuauugagaacgggugggaaggaauggucgaugguugguauggcuuccgucaccagaauagugaggggcgcggacaagcagcugaccuuaagagcacccaggccgcgaucgaucagauuaacggcaaacugaauagauugauagguaagacgaacgagaaguuccaccagaucgaaaaagaguuuuccgaaguugaggggaggauucaagaccucgaaaaguacguggaggauaccaaaaucgaccuguggucuuauaacgccgaguuacugguagcacucgaaaaucagcauacaaucgaucuuacugacagcgagaugaacaagcuguucgaaaagaccaagaagcaguugcgggagaaugcugaagauaugggcaacggaugcuuuaaaauuuaccacaagugugacaaugccugcauaggcucaauccgaaacgggacauaugaucaugacguguaccgcgacgaggcucuaaauaacagauuccagauuaaaggagucgagcugaagagugguuacaaagauuggauccucuggauuuccuuugccaucagcugcuuccugcuuuguguggcacuguugggcuuuauaaugugggccugccaaaaggggaauaucagguguaacauuugcaucuga

SEQ ID NO: 136939 - RNA, 1698 nt, Artificial Sequence
  derived and/or modified CDS sequence (opt3) from hemagglutinin__InfluenzaA__AFJ78309
augaaggccaaacugcucgugcuucugugcaccuucacagcuacuuacgcagacacgaucuguauuggcuaucacgccaacaauagcaccgauacagucgacacuguuuuggagaagaacgugaccguaacacauuccgugaauuuacuggaagauucucacaacgggaaacuaugccuccugaagggaauagcgccccuucagcuggguaauuguucagucgcuggcuggaucuuggggaacccugagugcgaaagucucauuagcaaagaguccuggucuuacaucguggaaaccccaaauccggagaacggaacuuguuaucccggcuacuuugccgacuaugaggaacugagagagcaacugucgucaguuagcaguuucgaaagguuugagauuuucccuaaggaguccucuuggccaaaucauacagugaccggugucagcgcauccugcucacacaacgggaagaguagcuuuuaccggaaucucuuauggcugacggagaaaaacggacuuuaucccaauuugucuaaguccuacgugaacaauaaagagaaggaaguacugguucuauggggcgugcaucacccuucaaacaucggcgaucagcgcgccauauaccacacugagaacgcuuaugucagcguggugaguucucauuacucccgacguuucaccccagaaaucgcaaaaagacccaaggucagggaccaggaggggcggauuaauuauuacuggacacuccuggagccuggagauacuaucauuuuugaagccaacgguaaucuuaucgcuccaugguaugccuucgcgcugagccgcggcuuugggucgggaauaauuaccucuaacgcaccgauggacgagugugaugccaagugccagacaccccaaggcgcuaucaauuccucauugccuuuccagaacguucacccaauuaccaucggugaaugucccaaauacgugagaagugccaagcucaggaugguaacggggcugcggaauaucccuagcauucagucccgcggauuauuuggcgcaauagcuggcuucaucgaagggggauggacugguaugauugacggcugguauggguaccaucaccagaacgaacaaggaucuggcuacgccgcggaucagaaaagcacacagaaugccaucaacgguauaaccaauaaggugaacucagucauugagaaaaugaauacucaguuuacagcaguggggaaggaguucaacaaacuggaacgaagaauggagaaucucaacaagaagguugacgauggcuuccuugacaucuggaccuauaacgcugaacuguuggugcuacuggagaaugaaaggacgcucgacuuucacgauaguaacgucaaaaaucuguacgagaaggugaaaucccaacuuaagaacaaugccaaagagaucggaaacggcugcuucgaauuuuaucauaaguguaauaacgagugcauggaaagcguaaagaaugggaccuacgacuauccaaaauacucugaggagucaaagcugaaccgggagaaaauugauggaguuaaguuggaaaguauggguguguaucagauccucgcuauuuacagcacagucgccuccucucugguguuacuggucucgcuaggcgcaaucagcuucuggaugugcuccaaugggucacuccagugucguauaugcauuuga

SEQ ID NO: 136940 - RNA, 1701 nt, Artificial Sequence
  derived and/or modified CDS sequence (opt3) from hemagglutinin__InfluenzaA__AFJ78320
augaagaccaucauugcccugagcuacauacucugccuuguguucgcucagaaacugcccggcaacgacaauuccacagcaacuuuguguuuagggcaccaugccgucccuaacggaacgcugguuaagaccaucacaaaugaucaaauugaggugacuaacgcgaccgaacuuguacagucuucaaguacagguagaaucugcgacagcccacaccagauucucgauggcgagaauuguacccugaucgacgcucuacugggggauccgcauugcgacggauuucagaacaaagaaugggauuuguucguggagagguccaaggccuauucuaauuguuaccccuaugacgucccugauuacgcaucgcuccggucacugguggccagcaguggcacucuggaauuuaacaaugaguccuucaacuggacagguguugcucaaaaugggaccucuagcgcaugcaaacgccgauccaacaagucauuuuucagucgucucaauugguuacaccagcugaaguauaaauacccagcccuuaacgugacgaugcccaauaacgagaaguuugacaaauuguauauauggggaguccaucacccuagcacugauucugaccagaucucccuguacgcucaggccucaggcagagugaccguaagcacaaagaggagucaacagacuguuauuccaaacaucggcucucggcccugggugcgcggggucuccagcagaauuucgaucuacuggaccauagugaaaccuggagauauucuacucaucaauucuacagguaaccugauugcgccaaggggcuauuucaagauccgguccgggaagucaaguaucaugcgcagcgacgcaccgauuggaaaauguaauuccgaaugcauaacccccaacggcucuaucccuaaugacaagccauuucagaacgugaaucgaauuacguacggugccugucccagauaugucaaacagaacacucuuaagcuggcuacagggaugaggaauguuccugagaaacaaacccggggaaucuucggcgccauagcaggcuuuauugaaaacgggugggagggaaugguggaugguugguacggcuuccgucaccagaauagcgaggggacuggacaggcugccgacuugaagucaacacaagcggccaucaaccagaucaauggcaaacucaaccgccugauugguaagaccaaugaaaaguuucaucagaucgagaaagaguucagugaaguagaagggaggauucaggauuuagagaaguauguggaggacacgaaaauagaucugugguccuacaacgcagaacuccuugucgcucuggagaaccaacacaccaucgacuugacagauagcgaaaugaauaagcuauucgagagaacuaaaaagcagcugcgggaaaacgccgaggacaugggcaauggaugcuuuaagauuuaucauaaaugugauaacgcuugcaucggcucuauccgaaaugggaccuacgaccacgauguguaccgcgacgaggcccucaacaauagauuccagauuaagggaguugaacugaaaucagguuauaaggacuggauacuuuggaucaguuuugcaauuagcugcuuccuguugugugugguccuccugggcuuuaucaugugggccugccagaaagggaacauuagguguaauaucugcauauga

SEQ ID NO: 136941 - RNA, 1698 nt, Artificial Sequence
  derived and/or modified CDS sequence (opt3) from hemagglutinin__InfluenzaA__AFJ78331
augaaggccaaacugcucgugcuucugugcaccuucacagcuacuuacgcagacacgaucuguauuggcuaucacgccaacaauagcaccgauacagucgacacuguuuuggagaagaacgugaccguaacacauuccgugaauuuacuggaagauucucacaacgggaaacuaugccuccugaagggaauagcgccccuucagcuggguaauuguucagucgcuggcuggaucuuggggaacccugagugcgaacuccugauuaguaaagagagcugguccuacaucguggaaaccccaaauccggagaacggaacuuguuaucccggcuacuuugccgacuaugaggaacugagagagcaacucucuucgguuagcucauucgaaagguuugagauuuucccuaaggagaguuccuggccaaaucauacagugaccggugucucugcaagcugcucccacaacgggaagucaaguuuuuaccggaauuuacuguggcuuacgggcaaaaacggauuguaucccaaucugagcaagucuuacgugaacaauaaagaaaaggagguucuaguacucuggggcgugcaucacccuccaaacaucggggaucagcgcgcccuguaccacacugaaaacgcuuaugucuccguggugucaagccauuacagucgacguuucacccccgagauagcaaaaagaccuaaggucagggaccaggaaggacggaucaauuauuacuggacacuucuggagccaggugauacuauuaucuuugaggccaacggcaauuugauugcuccgugguaugccuucgcgcucucucgcggguuuggauccggcaucauaaccagcaacgcacccauggacgaaugugaugccaagugccagacaccucaaggugcuauuaauucgucucugccauuccagaacguucaccccgugaccaucggggaguguccuaaauacguaagauccgccaaguuaaggauggugacgggacugcggaauauuccaucaauccagagucgcggccucuuuggcgcaaucgcuggguucauugaaggagguuggacuggcauggucgacgggugguauggauaccaucaccagaacgagcaaggcagcgguuacgccgcggaucagaaauccacacagaaugccauaaacgggaucaccaauaaggugaacucuguuauugaaaagaugaauacucaguuuacagcagugggcaaagaguucaacaaacuugagcgaagaauggaaaaucugaacaagaaggucgacgauggauucuuggacaucuggaccuauaacgcugagcuacuggugcuccuggaaaaugagaggacgcuugacuuucacgauagcaacguuaaaaaucuguacgaaaagguaaaaucacaauugaagaacaaugccaaagagauaggcaacgggugcuucgaguuuuaucauaaguguaauaacgaaugcauggagagugugaagaauggaaccuacgacuaucccaaauacuccgaagagagcaagcucaaccgggagaaaauugauggugucaagcuggaaucuaugggcguguaucagaucuuagcuaucuacucaacagucgccaguagccuggugcuacucguuucccugggggcaauuucuuucuggaugugcucgaauggaagccuucagugucguaucugcauuuga

SEQ ID NO: 136942 - RNA, 1698 nt, Artificial Sequence; identical to SEQ ID NO: 136941
  derived and/or modified CDS sequence (opt3) from hemagglutinin__InfluenzaA__AFJ78342

SEQ ID NO: 136943 - RNA, 1698 nt, Artificial Sequence; identical to SEQ ID NO: 136941
  derived and/or modified CDS sequence (opt3) from hemagglutinin__InfluenzaA__AFJ78353

SEQ ID NO: 136944 - RNA, 1698 nt, Artificial Sequence
  derived and/or modified CDS sequence (opt3) from hemagglutinin__InfluenzaA__AFJ78364
augaaggccaaacugcucgugcuucugugcaccuucacagcuacuuacgcagacacgaucuguauuggcuaucacgccaacaauagcaccgauacagucgacacuguuuuggagaagaacgugaccguaacacauuccgugaauuuacuggaagauucucacaacgggaaacuaugccuccugaagggaauagcgccccuucagcuggguaauuguucagucgcuggcuggaucuuggggaacccugagugcgaaagucucauuagcaaagaguccuggucuuacaucguggaaaccccaaauccggagaacggaacuuguuaucccggcuacuuugccgacuaugaggaacugagagagcaacugucgucaguuagcaguuucgaaagguuugagauuuucccuaaggaguccucuuggccaaaucauacagugaccggugucagcgcauccugcucacacaacgggaagaguagcuuuuaccggaaucucuuauggcugacggagaaaaacggacuuuaucccaauuugucuaaguccuacgugaacaauaaagagaaggaaguacugguucuauggggcgugcaucacccuucaaacaucggcgaucagcgcgccauauaccacacugagaacgcuuaugucagcguggugaguucucauuacaaucgacguuucaccccagaaaucgcaaaaagacccaaggucaggaaccaggaggggcggauuaauuauuacuggacacuccuggagccuggagacacuaucauuuuugaagccaacgguaaucuuaucgcuccaugguaugccuucgcgcugucccgcggcuuugggagcggaauaauuaccucgaacgcaccgauggaugagugugacgccaagugccagacaccccaaggcgcuaucaauucuuccuugccuuuccagaacguucacccaauuaccaucggugaaugucccaaauacgugagaucagccaagcucaggaugguaacggggcugcggaauaucccuaguauucagagccgcggauuauuuggcgcaauagcuggcuucaucgaagggggauggacugguaugauugauggcugguauggguaccaucaccagaacgaacaaggauccggcuacgccgcggaccagaaaucuacacagaaugccaucaacgguauaaccaauaaggugaacagcgucauugagaaaaugaauacucaguuuacagcaguggggaaggaguucaacaaacuggaacgaagaauggagaaccucaauaagaagguugaugacggcuuccuugauaucuggaccuauaacgcugaacuguuggugcuacuggagaaugaaaggacgcucgacuuucacgacucaaacgucaaaaaucuguacgagaaggugaaaagucaacuuaagaacaaugccaaagagaucggaaacggcugcuucgaauuuuaucauaaguguaauaacgagugcauggaauccguaaagaaugggaccuacgauuauccaaaauacagcgaggagucuaagcugaaccgggagaaaauugacggaguuaaguuggaaucaauggguguguaucagauccucgcuauuuacaguacagucgccagcucccugguguuacuggucucucuaggcgcaauaucguucuggaugugcagcaaugggucccuccagugucguaucugcauuuga

SEQ ID NO: 136945 - RNA, 1698 nt, Artificial Sequence
  derived and/or modified CDS sequence (opt3) from hemagglutinin__InfluenzaA__AFJ78375
augaaggccaaacugcucgugcuucugugcaccuucacagcuacuuacgcagacacgaucuguauuggcuaucacgccaacaauagcaccgauacagucgacacuguuuuggagaagaacgugaccguaacacauuccauaaauuuacuggaaaacucucacaaugggaaacuaugccuccugaagggaaucgcgccccuucagcuggguaacuguucaguggcuggcuggauuuuggggaauccugagugcgaacuccugaucaguaaagagagcugguccuacauugucgaaaccccaaacccggagaauggaacuuguuaucccggccauuuugccgauuacgaggaacugagagagcaacucucuucggugagcucauucgaaagguuugagaucuucccuaaggagaguuccuggccaaaccacacaguuaccggugugucugcaagcugcucccauaaugggaagucaaguuuuuaucggaacuuacuguggcuuacggagaaaaauggauuguaccccaaccugagcaagucuuaugucaauaacaaagagaaggaagugcuaguacucuggggcguucaccacccuuccaacauaggcgaccagcgcgccaucuaccauacugagaaugcuuacgugucagucgugagcagucacuauucucgacguuucaccccagaaauugugaaaagacccaaggucagggaucaggaggggcggaucaacuacuauuggacacugcuugagccuggagacacuauuaucuuugaagcaaaugguaaccugauagccccaugguacgcuuucgccuugucccgcggcuuugggagcggaauuaucaccucgaaugcgccgauggaugagugugacgcaaagugccagacaccccaaggcgccauuaacucuucccucccuuuccagaauguucauccagugaccaucggugaaugucccaaauauguaagaucagcuaagcugaggauggugacgggguuacggaacaucccuaguauucagagccgcggacuguuuggcgccauagcaggcuucaucgaagggggauggacugguaugauugauggcugguacggguaucaccaccagaaugaacaaggauccggcuacgcugccgaccagaaaucuacacagaacgcgaucaaugguauaaccaacaaggucaauagcauuaucgagaaaaugaacacucaguuuacagccguggggaaggaguucaauaaacucgaacgaagaauggagaaccuuaacaagaagguugaugacggcuuccuggauaucuggaccuacaaugcagaauugcuagugcugcucgagaacgaaaggacgcuggacuuucaugacucaaaugucaaaaaccuuuaugagaaggugaaaagucaacugaagaauaacgcuaaagagauuggaaauggcugcuucgaauuuuaccacaaguguaacaaugagugcauggaauccguaaagaacgggaccuaugauuacccaaaauauagcgaggagucuaaguugaaucgggagaaaaucgacggaguuaagcucgaaucaauggguguguaccagauucuggccauauauaguacagucgcuagcuccuuagugcugcuagucucucucggcgccaucucguucuggaugugcagcaacgggucccugcagugucguauuugcaucuga

SEQ ID NO: 136946 - RNA, 1698 nt, Artificial Sequence; identical to SEQ ID NO: 129433
  derived and/or modified CDS sequence (opt3) from hemagglutinin__InfluenzaA__AFJ78386

SEQ ID NO: 136947 - RNA, 1698 nt, Artificial Sequence; identical to SEQ ID NO: 129433
  derived and/or modified CDS sequence (opt3) from hemagglutinin__InfluenzaA__AFJ78397

SEQ ID NO: 136948 - RNA, 1698 nt, Artificial Sequence; identical to SEQ ID NO: 136125
  derived and/or modified CDS sequence (opt3) from hemagglutinin__InfluenzaA__AFJ78408

SEQ ID NO: 136949 - RNA, 1698 nt, Artificial Sequence
  derived and/or modified CDS sequence (opt3) from hemagglutinin__InfluenzaA__AFJ78419
augaaggugaaacugcucguccuucugugcaccuucacagccacuuacgcugacacgaucuguauuggcuaucacgcaaacaauagcaccgauacaguugacacuguguuggagaagaacguaaccgugacacauuccgucaauuuacuggaagauucucacaacgggaaacuaugccuccugaagggaauagcgccccuucagcuggguaauuguucaguggccggcuggaucuuggggaacccugagugcgaacuccugauuaguaaagagagcugguccuacaucguugaaaagccaaauccggagaacggaaccuguuaucccggcuacuuugcugacuaugaggaacugagagagcaacucucuucggugagcucauucgaaagguuugagauuuucccuaaggagaguuccuggccaaaucauacugucacaggugugucugccagcugcucccacaacgggaaaucaaguuuuuacaagaauuuacuguggcuuaccggcaaaaacggauuguaucccaaucugagcaagucuuacgcaaacaauaaagaaaaggagguucuaguacucuggggcgugcaucacccuccaaacaucggggaucagcgggcccuguaccacacggaaaacgcuuaugucuccguggugucaagccauuacagucgcaaguucacucccgagauagcaaaacgaccuaagguccgugaccaggaaggaagaaucaauuauuacuggacccuucuggagccaggugauacaguuauuuuugaggccaacggcaauuugaucgcuccgagguaugccuucgcgcucucucggggguuuggauccggcauuaucaacagcaaugcacccauggacgaaugugaugccaaaugccagacuccucaaggugcuauaaacucgucucugccauuccagaaugugcaccccguaaccauuggggaguguccuaaguacgugcgcuccgccaaauuaagaauggucacaggacugaggaacaucccaucaauucagagucggggccucuuuggcgcaaucgcuggguucaucgaaggagguuggaccggcaugguggacgggugguauggauaccaucaccagaaugagcaaggcagcgguuacgccgcggaucagaaguccacgcagaacgccauuaaugggauaacuaacaaaguuaauucugugaucgaaaagaugaacacacaguuuaccgcagucggcaaggaguucaauaaacuugagcgccgaauggaaaaccugaacaagaaaguggacgauggauucauugacaucuggacuuauaaugcugaguugcuaguacugcucgaaaacgagagaacacuggacuuucacgauagcaauguuaagaaccuuuacgaaaaagugaagucacaacugaagaauaacgccaaagagauaggcaaugggugcuucgaguuuuaucauaaguguaacgacgaaugcauggagagugucaaaaauggaaccuacgauuaucccaaguacuccgaagagagcaaauugaacagggagaagauugacggugugaagcucgaaucuaugggcgucuaucagauccuggcuaucuacucaacgguggccaguagcuuaguucugcuagugucccucggggcaauuucuuucuggaugugcucgaauggaagccugcagugucggaucugcauuuga

SEQ ID NO: 136950 - RNA, 1698 nt, Artificial Sequence
  derived and/or modified CDS sequence (opt3) from hemagglutinin__InfluenzaA__AFJ78430
augaaggugaaacugcucguccuucugugcaccuucacagccacuuacgcugacacgaucuguauuggcuaucacgcaaacaauagcaccgauacaguugacacuguguuggagaagaacguaaccgugacacauuccgucaauuuacuggaagauucucacaacgggaaacuaugccuccugaagggaauagcgccccuucagcuggguaauuguucaguggccggcuggaucuuggggaacccugagugcgaacuccugauuaguagagagagcugguccuacaucguugaaaauccaaacccggagaauggaaccuguuaucccggccauuuugcugacuacgaggaacugagggagcaacucucuucggugagcucauucgaacgguuugagauuuucccuaaagagaguuccuggccaaaccacacugucacaggugugucugccagcugcucccauaaugggaagucaaguuuuuauaagaacuuacuguggcuuaccggaaagaauggcuuguaccccaaccugagcaagucuuaugcaaauaacaaagaaaaggagguucuaguacucuggggcgugcaccacccuccaaacaucggggaucagcgcgcccuguaccauacggaaaaugcuuacgucuccguggugucaagccacuauagucgaaaauucacucccgagauagcaaagcguccuaaggucagagaccaggaaggaaggaucaacuacuauuggacccuucuggguccaggcgauacaauuaucuuugaggccaaugggaacuugauugcuccgcgguacgccuucgcgcucucucgcggauuuggcuccgguaucauaaauagcaacgcacccauggacgagugugaugccaaaugccagacuccucaaggggcuauuaauucgucucugccauuccagaacguucaucccgugaccaucggagaauguccuaaguauguaagauccgccaaauuaaggauggugacaggccugcggaauauuccaucaauccagagucgcggccucuuuggggcaaucgcuggauucauugaggguggcuggaccgggauggucgacggaugguacggcuaucaccaccagaacgaacaagguagcggguacgccgcggaucagaaguccacgcagaaugccauaaacggcaucacuaauaaagugaacucuguuauugagaagaugaauacacaguuuaccgcagugggaaaagaguucaacaaacuugaacgaagaauggagaaccugaauaagaaagucgacgauggcuucaucgacauauggacuuacaacgcugaauugcuagugcugcucgagaaugaaaggacacuggacuuucaugauagcaacguaaagaaucuuuaugagaaaguuaagucacaacugaaaaacaaugccaaggaaauugggaacggaugcuucgaguuuuaccacaaguguaaugacgagugcauggaaagugugaaaaacgguaccuaugauuaccccaaguauuccgaggaaagcaaauugaaucgggagaagaucgacggcgucaaacucgagucuauggggguguaccagauccuggcuauuuauucaacggucgccaguagcuuagugcugcuaguuucccucggagcaaucucuuucuggaugugcucgaacggcagccugcagugucguauuugcauauga

SEQ ID NO: 136951 - RNA, 1698 nt, Artificial Sequence
  derived and/or modified CDS sequence (opt3) from hemagglutinin__InfluenzaA__AFJ78441
augaaggugaaacugaugguccuccuuugcaccuucacagccacuuacgcugacacgaucuguauuggcuaucacgcaaacaauagcaccgauacaguugacacugugcuggagaagaacguaaccgugacacauuccgucaauuuguuagaagauucucacaacgggaaacugugccuacucaagggaauagcgccccugcagcuugguaauuguucaguggccggcuggauccuggggaacccugagugcgaauugcucauuaguagagagagcugguccuacaucguugaaaaaccaaauccggagaacggaaccuguuaucccggccauuuugcugacuacgaggaacugagggagcaacugucuucggugucaucuuucgaacgguuugagauuuucccuaaggagaguuccuggccaaaucacacugucacaggugugucugccagcugcucccauaacgggaagucaaguuuuuauaaaaaucucuuauggcugaccggaaagaacggccuuuaccccaauuugagcaaaucuuaugcaaacaauaaggaaaaagagguacugguucuauggggcgugcaccacccuccaaacaucggggaucagaaggcccucuaccauacggaaaacgcuuacgucuccguggugucaagccacuauagucgcaaguucacucccgagauagcaaaacgaccuaagguccgugaccaggaaggaagaaucaauuacuauuggacccugcuugagccaggugauacaauuaucuuugaggccaacggcaaucugauugcuccgagguacgccuucgcguugucucggggguuuggauccggcaucauaaacagcaaugcacccauggacgaaugugaugccaaaugccagacuccucaaggugcuauuaacucgucucucccauuccagaauguucaucccgugaccaucggggaguguccuaaguauguacgcuccgccaaacugagaauggugacaggauuaaggaacauuccaucaauccagagucggggccuguuuggcgcaaucgcuggguucauugaaggagguuggaccggcauggucgacgggugguacggauaucaccaccagaaugagcaaggcagcgguuacgccgcggaucagaaguccacgcagaacgccauaaaugggaucacuaacaaagugaauagcguuauugaaaagaugaacacacaguuuaccgcaguggacaaggaguucaauaaacucgagcgccgaauggaaaaccuuaacaagaaagucgaugacggcuucaucgacauauggacuuacaaugcugagcuguuggugcuacuggaaaacgagagaacacucgauuuucaugacagcaauguaaagaaccuguaugaaaaaguuaagucacaacuuaagaauaacgccaaagagauuggaaauggcugcuucgaguuuuaccacaaguguaacgaugaaugcauggagagugugaaaaaugggaccuaugacuaccccaaguauuccgaagagagcaaacugaacagggagaagaucgauggagucaaguuggaaucuauggguguguaccagauccucgcuauuuauucaacggucgccaguagccugguguuacugguuucccuaggcgcaaucucuuucuggaugugcucgaaugggagccuccagugucggauuugcauauga

SEQ ID NO: 136952 - RNA, 1698 nt, Artificial Sequence
  derived and/or modified CDS sequence (opt3) from hemagglutinin__InfluenzaA__AFJ78452
augaaggugaaacugcucguccuucugugcaccuucacagccacuuacgcugacacgaucuguauuggcuaucacgcaaacaauagcaccgauacaguugacacuguguuggagaagaacguaaccgugacacauuccgucaauuuacuggaagauucucacaacgggaaacuaugccuccugaagggaauagcgccccuucagcuggguaauuguucaguggccggcuggaucuuggggaacccugagugcgaacuccugauuaguaaagagagcugguccuacaucguugaaaagccaaauccggagaacggaaccuguuaucccggccauuuugcugacuacgaggaacugagagagcaacucucuucggugagcucauucgaaagguuugagauuuucccuaaggagaguuccuggccaaaucacacugucacaggugugucugccagcugcucccauaacgggaaaucaaguuuuuauaagaauuuacuguggcuuaccggaaagaacggcuuguaccccaaucugagcaagucuuaugcaaacaauaaagaaaaggaggugcuaguucucuggggcgugcaccacccuccaaacaucggggaucagaaggcccuguaccauacggaaaacgcuuacgucuccguggugucaagccacuauagucggaaauucauacccgagaucgcaaagcgcccuaaaguccgagaccaggaaggacguauuaauuacuauuggacucuucuggagccaggugauaccaucauuuuugaggccaacggcaauuugaucgcuccgagauacgccuucgcgcucucuaggggguuuggauccggcauaauuaacagcaaugcacccauggacgaaugugaugccaagugccagacaccucaaggugcuaucaacucgucucugccauuccagaauguucaucccgugacuauuggggaguguccuaaauauguacgguccgccaaguuacgcauggugaccggacugagaaacaucccaucaauccagaguaggggccucuuuggcgcaauugcuggguucauagaaggagguuggacaggcauggucgacgggugguacggauaucaccaccagaaugagcaaggcagcgguuacgccgcggaucagaaauccacccagaacgccaucaaugggauuacgaacaagguaaauucuguuaucgaaaagaugaacacucaguuuacagcagugggcaaagaguucaauaaacuugagcggcgcauggaaaaccugaacaaaaaggucgacgauggauucauagacauuuggaccuacaaugcugaguugcuagugcugcucgaaaacgagcgaacucuggacuuucaugauagcaauguuaaaaaccuuuaugaaaagguaaagucacaacugaaaaauaacgccaaggagaucggcaaugggugcuucgaguuuuaccacaaauguaacgacgaaugcauggagagugugaagaauggaacauaugauuaccccaaauauuccgaagagagcaaguugaacagagagaagaucgacggugucaaacucgaaucuaugggcguguaccagauucuggcuaucuauucaaccgucgccaguagcuuagugcugcuaguuucccucggggcaauuucuuucuggaugugcucgaauggaagccugcaguguaggauaugcaucuga

SEQ ID NO: 136953 - RNA, 1698 nt, Artificial Sequence
  derived and/or modified CDS sequence (opt3) from hemagglutinin__InfluenzaA__AFJ78463
augaaggugaaacugcucguccuucugugcaccuucacagccacuuacgcugacacgaucuguauuggcuaucacgcaaacaauagcaccgauacaguugacacuguguuggagaagaacguaaccgugacacauuccgucaauuuacuggaagauucucacaacgggaaacuaugccuccugaagggaauagcgccccuucagcuggguaauuguucaguggccggcuggaucuuggggaacccugagugcgaacuccugauuaguaaagagagcugguccuacaucguugaaaagccaaauccggagaacggaaccuguuaucccggccauuuugcugacuacgaggaacugagagagcaacucucuucggugagcucauucgaaagguuugagauuuucccuaaggagaguuccuggccaaaucacacugucacaggugugucugccagcugcucccauaacgggaaaucaaguuuuuauaagaauuuacuguggcuuaccgggaaaaacggcuuguaccccaaucugggcaagagcuaugcaaacaauaaagaaaaggaggugcuaguucucuggggagugcaccacccuccaaacaucggagaucagaaggcccuguaccauacggaaaacgcuuacgucucugugguguccucacacuauagccggaaauucauacccgagaucgcaaagcgcccuaaaguccgagaccaggaaggucguauuaauuacuauuggacucuucuggagccaggcgauaccaucauuuuugaggccaacgggaauuugaucgcuccgagauacgccuucgcgcucaguaggggauuuggcucugguauaauuaacuccaaugcacccauggacgaaugugaugccaagugccagacaccucaaggggcuaucaacagcucgcugccauuccagaauguucaucccgugacuauuggagaguguccuaaauauguacggucugccaaguuacgcauggugaccggccugagaaacaucccauccauccagucaaggggccucuuuggggcaauugcuggauucauagaagguggcuggacagggauggucgacggaugguacggcuaucaccaccagaaugagcaagguaguggguacgccgcggaucagaaaagcacccagaacgccaucaauggcauuacgaacaagguaaauuccguuaucgaaaagaugaacacucaguuuacagcagugggaaaagaguucaauaaacuugagcggcgcauggaaaaccugaacaaaaaggucgacgauggcuucauagacauuuggaccuacaaugcugaguugcuagugcugcucgaaaacgagcgaacucuggacuuucaugauucuaauguaaagaaccuuuaugaaaagguuaagagccaacugaaaaauaacgccaaggagaucgggaauggaugcuucgaguuuuaccacaaauguaacgacgaaugcauggagucagugaagaaugguacauaugauuaccccaaauauagugaagaguccaaguugaacagagagaagaucgacggcgucaaacucgaaagcauggggguguaccagauucuggcuaucuauucuaccgucgccucaaguuuagugcugcuaguuagccucggagcaauuuccuucuggaugugcucuaauggcucgcugcaguguaggauaugcaucuga

SEQ ID NO: 136954 - RNA, 1698 nt, Artificial Sequence
  derived and/or modified CDS sequence (opt3) from hemagglutinin__InfluenzaA__AFJ78474
augaaggugaaacugcucguccuucugugcaccuucacagccacuuacgcugacacgaucuguauuggcuaucacgcaaacaauagcaccgauacaguugacacuguguuggagaagaacguaaccgugacacauuccgucaauuuacuggaagauucucacaacgggaaacuaugccuccugaagggaauagcgccccuucagcuggguaauuguucaguggccggcuggaucuuggggaacccugagugcgaacuccugauuaguagagagagcugguccuacaucguugaaaaaccaaauccggagaacggaaccuguuaucccggccauuuugcugacuacgaggaacugagggagcaacucucuucggugagcucauucgaacgguuugagauuuucccuaaggagaguuccuggccaaaucacacugucacaggugugucugccagcugcuccuauaacgggaagucaaguuuuuacaaaaauuuacuguggcuuaccggaaagaacggcuuguaucccaaucugagcaaaucuuacgcaaacaauaaggaaaaagaggugcuaguucucuggggcgugcaucacccuccaaacaucggggaucagcgcgcccuguaccacacggaaaacgcuuaugucuccguggugucaagccauuacagucgaaaguucacucccgagauagcaaagcguccuaaagucagagaccaggaaggaaggaucaauuauuacuggacccuucuggagccaggugauacaauuaucuuugaggccaacggcaauuugauugcuccgcgguaugccuucgcgcucucucgcggguuuggauccggcaucauaaacagcaaugcacccauggacgaaugugaugccaagugccagacuccucaaggugcuauuaacucgucucugccauuccagaauguucaccccgugaccaucggggaguguccuaaauacguaagauccgccaaguuaaggauggugacaggacugcggaacauuccaucaauccagagucgcggccucuuuggcgcaaucgcuggguucauugaaggagguuggaccggcauggucgacgggugguauggauaccaucaccagaaugagcaaggcagcgguuacgccgcggaucagaaauccacgcagaacgccauaaaugggaucacuaacaagguaaauucuguuauugaaaagaugaacacacaguuuaccgcagugggcaaggaguucaauaaacuugagcgaagaauggaaaaccugaacaaaaaggucgacgauggauucaucgacauauggacuuauaaugcugaguugcuagugcugcucgaaaacgagaggacacuggacuuucacgauagcaauguuaaaaaccuuuacgaaaagguaaaaucacaacugaagaauaacgccaaggagauuggcaaugggugcuucgaguuuuaucauaaauguaacgacgaaugcauggagagugugaagaauggaaccuacgauuaucccaaauacuccgaagagagcaaguugaaccgggagaaaaucgacggugucaagcucgaaucuaugggcguguaucagauccuggcuauuuacucaacggucgccaguagcuuagugcugcuaguuucccucggggcaaucucuuucuggaugugcucgaauggaagccugcagugucguauuugcauauga

SEQ ID NO: 136955 - RNA, 1698 nt, Artificial Sequence
  derived and/or modified CDS sequence (opt3) from hemagglutinin__InfluenzaA__AFJ78485
augaaggugaaacugcucguccuucugugcaccuucacagccacuuacgcugacacgaucuguauuggcuaucacgcaaacaauagcaccgauacaguugacacuguguuggagaagaacguaaccgugacacauuccgucaauuuacuggaagauucucacaacgggaaacuaugccuccugaagggaauagcgccccuucagcuggguaauuguucaguggccggcuggaucuuggggaacccugagugcgaacuccugauuaguagagagagcugguccuacaucguugaaaaaccaaauccggagaacggaaccuguuaucccggccauuuugcugacuacgaggaacugagggagcaacucucuucggugagcucauucgaacgguuugagauuuucccuaaggagaguuccuggccaaaucacacuacaaccggugucucugccagcugcucccauaacggggaaucaaguuuuuauaagaauuuacuguggcuuacgggaaagaacggcuuguaccccaaucugagcaagucuuaugcaaacaauaaagagaaggaagugcuaguacucuggggcguucaccacccuccaaacaucggggaucagcgcgcccuguaccauacugagaacgcuuacguguccgucgugucaagccacuauagucgaaaauucacccccgaaauagcaaagcguccuaaggugagagaccaggagggaaggaucaauuacuauuggacacuucuggagccaggugauacuauuaucuuugaagccaacggcaauuugauugcuccgcgguacgccuucgcgcucucucgcggguuuggauccggcaucauaaacagcaaugcacccauggacgagugugaugccaaaugccagaccccucaaggugcuauuaacucgucucugccauuccagaauguccaucccguuacaaucggggaauguccuaaguaugugagauccgccaaauuaaggaugguaaccggacugcggaacauuccaucaauccagagucgcggccucuuuggcgcaaucgcuggguucauugagggagguuggacgggcaugguggacgggugguacggauaucaccaccagaaugaacaaggcagcgguuacgccgcggaucagaaguccacucagaacgccauaaaugggaucacaaacaaagucaauucugugauugagaagaugaacacccaguuuacugcaguuggcaaagaguucaauaaacuugaacgaagaauggagaaccugaacaagaaaguggaagacggauucaucgauauauggacauacaaugcugaguugcuaguccugcucgaaaacgagaggacccuggacuuucaugacagcaaugugaagaaccuuuaugagaaaguaaagucacaacugaaaaauaacgccaaggaaauuggcaaugggugcuucgaguuuuaccacaaguguaacgaugaaugcauggagaguguuaaaaauggaacguaugacuaccccaaguauuccgaggaaagcaaauugaaccgggagaagaucgauggugugaaacucgaaucuaugggcgucuaccagauccuggcuauuuauucaaccguggccaguagcuuaguccugcuagugucccucggggcaaucucuuucuggaugugcucgaauggaagccugcagugucguauuugcauauga

SEQ ID NO: 136956 - RNA, 1698 nt, Artificial Sequence
  derived and/or modified CDS sequence (opt3) from hemagglutinin__InfluenzaA__AFJ78496
augaaggugaaacugcucguccuucugugcaccuucacagccacuuacgcugacacgaucuguauuggcuaucacgcaaacaauagcaccgauacaguugacacuguguuggagaagaacguaaccgugacacauuccgucaauuuacuggaagauucucacaacgggaaacuaugccuccugaagggaauagcgccccuucagcuggguaauuguucaguggccggcuggaucuuggggaacccugagugcgaacuccugauuaguagagagagcugguccuacaucguugaaaaaccaaauccggagaacggaaccuguuaucccggccauuuugcugacuacgaggaacugagggagcaacucucuucggugagcucauucgaacgguuugagauuuucccuaaggagaguuccuggccaaaucacacuacaaccggugucucugccagcugcucccauaacggggaaucaaguuuuuauaagaauuuacuguggcuuacgggaaagaacggcuuguaccccaaucugagcaagucuuaugcaaacaauaaagagaaggaagugcuaguacucuggggcguucaccacccuccaaacaucgggggacagcgcgcccuguaccauacugagaacgcuuacguguccgucgugucaagccacuauagucgaaaauucacccccgaaauagcaaagcguccuaaggugagagaucaggaggguaggaucaauuacuauuggacacuucuggagccaggcgacacuauuaucuuugaagccaacgggaauuugauugcuccgcgguacgccuucgcgcucucucgcggauuuggcuccgguaucauaaacagcaaugcacccauggaugagugugacgccaaaugccagaccccucaaggggcuauuaacucgucucugccauuccagaauguccaucccguuacaaucggagaauguccuaaguaugugagauccgccaaauuaaggaugguaaccggccugcggaacauuccaucaauccagagucgcggccucuuuggggcaaucgcuggauucauugaggguggcuggacggggaugguggauggaugguacggcuaucaccaccagaaugaacaagguagcggguacgccgcggaccagaaguccacucagaacgccauaaauggcaucacaaacaaagucaauucugugauugagaagaugaacacccaguuuacugcaguuggaaaagaguucaauaaacuugaacgaagaauggagaaccugaacaagaaaguggaugacggcuucaucgauauauggacauacaaugcugaauugcuaguccugcucgagaacgaaaggacccuggacuuucaugacagcaaugugaagaaccuuuaugagaaaguaaagucacaacugaaaaauaacgccaaggagauugggaauggaugcuucgaauuuuaccacaaguguaacgaugagugcauggaaaguguuaaaaaugguacguaugacuaccccaaguauuccgaggagagcaaauugaaccgggaaaagaucgauggcgugaaacucgagucuaugggggucuaccagauccuggcuauuuauucaaccguggccaguagcuuaguccugcuagugucccucggagcaaucucuuucuggaugugcucgaauggcagccugcagugucguauuugcauauga

SEQ ID NO: 136957 - RNA, 1698 nt, Artificial Sequence
  derived and/or modified CDS sequence (opt3) from hemagglutinin__InfluenzaA__AFJ78518
augaaggugaaacugcucguccuucugugcaccuucacagccacuuacgcugacacgaucuguauuggcuaucacgcaaacaauagcaccgauacaguugacacuguguuggagaagaacguaaccgugacacauuccgucaauuuacuggaagauucucacaacgggaaacuaugccuccugaagggaauagcgccccuucagcuggguaauuguucaguggccggcuggaucuuggggaacccugagugcgaacuccugauuaguagagagagcugguccuacaucguugaaaaaccaaauccggagaacggaaccuguuaucccggccauuuugcugacuacgaggaacugagggagcaacucucuucggugagcucauucgaacgguuugagauuuucccuaaggagaguuccuggccaaaucacacuacaaccggugucucugccagcugcucccauaacggggaaucaaguuuuuauaagaauuuacuguggcuuacgggaaagaacggcuuguaccccaaucugagcaagucuuaugcaaacaauaaagagaaggaagugcuaguacucuggggcguucaccacccuccaaacaucggggaucagcgcgcccuguaccauacugagaacgcuuacguguccgucgugucaagccacuauagucgaaaauucacccccgaaauagcaaagcguccuaaggugagagaccaggagggaaggaucaauuacuauuggacacuucuggagccaggugauacuauuaucuuugaagccaacggcaauuugauugcuccgcgguacgccuucgcgcucucucgcggguuuggauccggcaucauaaacagcaaugcacccauggacgagugugaugccaaaugccagaccccucaaggugcuauuaacucgucucugccauuccagaauguccaucccguuacaaucggggaauguccuaaguaugugagauccgccaaauuaaggaugguaaccggacugcggaacauuccaucaauccagagucgcggccucuuuggcgcaaucgcuggguucauugagggagguuggacgggcaugguggacgggugguacggauaucaccaccagaaugaacaaggcagcgguuacgccgcggaucagaaguccacucagaacgccauaaaugggaucacaaacaaagucaauucugugauugagaagaugaacacccaguuuacugcaguuggcaaagaguucaauaaacuugaacgaagaauggagaaccugaacaagaaaguggacgauggauucaucgacauauggacauacaaugcugaauugcuaguccugcucgagaacgaaaggacccuggacuuucaugauagcaaugugaagaaccuuuaugagaaaguaaagucacaacugaaaaauaacgccaaggagauuggcaaugggugcuucgaauuuuaccacaaguguaacgacgagugcauggaaaguguuaaaaauggaacguaugauuaccccaaguauuccgaggagagcaaauugaaccgggaaaagaucgacggugugaaacucgagucuaugggcgucuaccagauccuggcuauuuauucaaccguggccaguagcuuaguccugcuagugucccucggggcaaucucuuucuggaugugcucgaauggaagccugcagugucguauuugcauauga

SEQ ID NO: 136958 - RNA, 1698 nt, Artificial Sequence
  derived and/or modified CDS sequence (opt3) from hemagglutinin__InfluenzaA__AFJ78529
augaaggugaaacugcucguccuucugugcaccuucacagccacuuacgcugacacgaucuguauuggcuaucacgcaaacaauagcaccgauacaguugacacuguguuggagaagaacguaaccgugacacauuccgucaauuuacuggaagauaaccacaaugggaaacuaugccuccugaagggaauagcgccccuucagcuggguaacuguucuguggccggcuggaucuuggggaauccugagugcgaacuccugauuucaaaagagaguuggagcuacaucguugaaagaccaaacccggagaauggaaccuguuaucccggccauuuugcugacuacgaggaacugagggagcaacucuccucugugucgucauucgaacgguuugagauuuucccuaaggagagcaguuggccaaaccacacugucacagguguguccgccucuugcagccauaauggggaauccucauuuuauaagaacuuacuguggcuuaccggaaagaauggcuuguaccccaaccugaguaagagcuaugcaaauaacaaagagaaggaaguucuaguacucuggggcgugcaccacccuccaaacaucggggaucagaugacgcuguaccauaaagagaaugccuacgucucugugguguccucacacuauagccgcaaguucacucccgaaauagcuaagcgaccuaaaguccgugaccaggagggaagaaucaacuacuauuggacccuucuggagccaggugauacaauuaucuuugaagcaaauggcaacuugauugccccgagguacgcuuucgcccucagucggggguuuggaucuggcaucauaaauuccaacgcgcccauggacgagugugaugcaaagugccagacuccucaaggugccauuaauagcucgcugccauuccagaacguucaucccgugaccaucggggaauguccuaaauauguacgcucugcuaaguuaagaauggugacaggacugaggaauauuccauccauccagucacggggccucuuuggcgccaucgcaggguucauugagggagguuggaccggcauggucgacgggugguacggauaucaccaccagaacgaacaaggcagugguuacgcugccgaucagaaaagcacgcagaaugcgauaaacgggaucacuaauaaggugaacuccguuauugagaaaaugaauacacaguuuaccgccgugggcaaggaguucaacaaacuugaacgccgaauggagaaccugaauaaaaaggucgacgauggauucaucgacguguggacuuacaacgcagaauugcuaguacugcucgagaaugaaagaacacuggacuuucaugauucuaacguuaaaaaucuuuaugagaaggugaaaaaccaacugaagaauaacgcuaaggagauaggcaaugggugcuucgaauuuuaccacaaauguaacgacgagugcauggaaagcgucaagaauggaaccuaugauuaccccaaauauucagaggagaguaaguuguccagggagaaaauugacggugugaagcucgaaagcaugggcgucuaccagauccuggccaucuauucuacgguggcuucaaguuuaguucugcuagugagccucggggccauuuccuucuggaugugcucuaacggaucgcugcagugucggaucugcauuuga

SEQ ID NO: 136959 - RNA, 1698 nt, Artificial Sequence; identical to SEQ ID NO: 136958
  derived and/or modified CDS sequence (opt3) from hemagglutinin__InfluenzaA__AFJ78540

SEQ ID NO: 136960 - RNA, 1698 nt, Artificial Sequence; identical to SEQ ID NO: 136958
  derived and/or modified CDS sequence (opt3) from hemagglutinin__InfluenzaA__AFJ78551

SEQ ID NO: 136961 - RNA, 1698 nt, Artificial Sequence
  derived and/or modified CDS sequence (opt3) from hemagglutinin__InfluenzaA__AFJ78562
augaaggugaaacugcucguccuucugugcaccuucacagccacuuacgcugacacgaucuguauuggcuaucacgcaaacaauagcaccgauacaguugacacuguguuggagaagaacguaaccgugacacauuccgucaauuuacuggaagauaaccacaaugggaaacuaugccuccugaagggaauagcgccccuucagcuggguaacuguucuguggccggcuggaucuuggggaauccugagugcgaacuccugauuucaaaagagaguuggagcuacaucguugaaagaccaaacccggagaauggaaccuguuaucccggccauuuugcugacuacgaggaacugagggagcaacucuccucugugucgucauucgaacgguuugagauuuucccuaaggagagcaguuggccaaaccacacugucacagguguguccgccucuugcagccauaauggggaauccucauuuuauaagaacuuacuguggcuuaccggcaaaaauggauuguaccccacgcugaguaagagcuaugcaaacaauaaagagaaggaagugcuaguucucuggggcgugcaccacccuccaaacaucggggaucagaugacucuguaccauaaagagaacgccuacgucucugugguguccucacacuauagccgcaaguucacccccgaaauagcuaagcgacuuaaaguccgugaccaggagggaagaaucaauuacuauuggacacuguuggagccuggugauacuauuaucuuugaagcaaacggcaaucucauugccccaagguacgcuuucgcccugagucggggguuaggaucuggcaucauaaacuccaaugcgccgauggacgagugugaugcaaagugccagacaccccaaggugccauuaacagcucgcugccuuuucagaauguucauccagugaccaucggggaaugucccaaauauguacgcucugcuaagcucagaauggugaccggacuuaggaacauuccuuccauccagucacggggccuguucggcgccaucgcaggguuuauugagggagguuggacgggcauggucgacgggugguacggauaucaccaccagaaugaacaaggcagugguuacgcugccgaucagaaaagcacucagaacgcgauaaaugggaucacaaacaagguaaauuccguuauugagaaaaugaacacccaguucacugccgugggcaaggaguuuaauaaguuggaacgccgaauggagaaccuaaacaaaaaggucgacgauggauucaucgacguguggacauacaaugcagaacugcucguacugcuugagaacgaaagaacccuggacuuccaugauucuaauguuaaaaacuuguaugagaaggugaaaaaucaacucaagaacaaugcuaaggagauaggcaacgggugcuuugaguucuaccacaaauguaaugacgaaugcauggaaagcgucaagaacggaacguaugauuacccaaaauauucagaggagaguaagcuguccagggagaaaauugacggugugaaguuagaaagcaugggcgucuaccagauccuggccaucuauucuaccguggcuucaagucuaguucuccuggugagccuuggggccauuuccuuuuggaugugcucuaauggaucguugcagugucggaucugcauuuga

SEQ ID NO: 136962 - RNA, 1698 nt, Artificial Sequence
  derived and/or modified CDS sequence (opt3) from hemagglutinin__InfluenzaA__AFJ78573
augaaggugaaacugcucguccuucugugcaccuucacagccacuuacgcugacacgaucuguauuggcuaucacgcaaacaauagcaccgauacaguugacacuguguuggagaagaacguaaccgugacacauuccgucaauuuacuggaagauaaccacaaugggaaacuaugccuccugaagggaauagcgccccuucagcuggguaacuguucuguggccggcuggaucuuggggaauccugagugcgaacuccugauuucaaaagagaguuggagcuacaucguugaaagaccaaacccggagaauggaaccuguuaucccggccauuuugcugacuacgaggaacugagggagcaacucuccucugugucgucauucgaacgguuugagauuuucccuaaggagagcaguuggccaaaccacacugucacagguguguccgccucuugcagccauaauggggaauccucauuuuauaagaacuuacuguggcuuaccggaaagaauggcuuguaccccaaccugaguaagagcuaugcaaauaacaaagagaaggaaguucuaguacucuggggcgugcaccacccuccaaacaucggggaucagaugacgcuguaccauaaagagaaugccuacgucucugugguguccucacacuauagccgcaaguucacucccgaaauagcuaagcgaccuaaaguccgugaccaggagggaagaaucaacuacuauuggacccuucuggagccaggugauacaauuaucuuugaagcaaauggcaacuugauugccccgagguacgcuuucgcccucagucggggguuuggaucuggcaucauaaauuccaacgcgagcauggacgagugugaugcaaagugccagacuccccaaggugccauuaauucgucucugccuuuccagaacguucauccagugaccaucggggaaugucccaaauauguacgcuccgcuaaguuaagaauggugacaggacugaggaauauuccuucaauccagagucggggccucuuuggcgccaucgcaggguucauugagggagguuggaccggcauggucgacgggugguacggauaucaccaccagaacgaacaaggcagcgguuacgcugccgaucagaaauccacgcagaaugcgauaaacgggaucacuaauaaggugaacucuguuauugagaaaaugaauacacaguuuaccgccgugggcaaggaguucaacaaacuugaacgccgaauggagaaccugaauaaaaaggucgacgauggauucaucgacguguggacuuacaacgcagaauugcuaguacugcucgagaaugaaagaacacuggacuuucaugauagcaacguuaaaaaucuuuaugagaaggugaaaaaccaacugaagaauaacgcuaaggagauaggcaaugggugcuucgaauuuuaccacaaauguaacgacgagugcauggaaucagucaagaauggaaccuaugauuacccaaaauauagugaggaggccaaguuguccagggagaaaauugacggugugaagcucgaaagcaugggcgucuaccagauccuggcuaucuauucuacgguggccucaaguuuaguucugcuagugagccucggggcaauuuccuucuggaugugcucuaacggaucgcugcagugucggaucugcauuuga

SEQ ID NO: 136963 - RNA, 1698 nt, Artificial Sequence
  derived and/or modified CDS sequence (opt3) from hemagglutinin__InfluenzaA__AFJ78584
augaaggugaaacugcucguccuucugugcaccuucacagccacuuacgcugacacgaucuguauuggcuaucacgcaaacaauagcaccgauacaguugacacuguguuggagaagaacguaaccgugacacauuccgucaauuuacuggaaaacucucacaaugggaaacuaugccuccugaagggaauagcgccccuucagcuggguaacuguucaguggccggcuggaucuuggggaauccugagugcgaacuccugauuaguaaagagagcugguccuacaucguugaaaagccaaacccggagaauggaaccuguuaucccggccauuuugcugauuacgaggaacugagagagcaacucucuucggugagcagcuucgaaagguuugagauuuucccuaaggagaguuccuggccaaaccacacugucacaggugugucugccagcugcucccauaauggggaaaacucauuuuaucggaauuuacuguggcuuacccgcaaaaacggauuguaccccaaucugaguaagagcuaugcaaacaacaaagagaaggaagugcuaguucucuggggcgugcaccacccuccaaauaucggcgaccagaaagcccuguaccauacggagaacgcuuacgucucugugguguccucacacuauagccgaaaguucacucccgaaauagcaaagcguccuaaagucagagaucaggaggggaggaucaauuacuauuggacccuucuggagccaggagacacaauuaucuuugaagccaacgguaauuugauugcuccgcgguacgccuucgcgcucagucgcggcuuugggucuggaaucauaaacuccaaugcacccauggauaagugugacgccaaaugccagacuccucaaggcgcuauuaacagcucgcugccauuccagaauguucaucccguggccaucggugaguguccuaaguauguaagaucugcaaaauuaaggauggugaccgggcugcggaacauuccauccauccagucacgcggacucuuuggcgcuaucgccggcuucauugaagggggauggacagguauggucgauggcugguacggguaucaccaccagaaugagcaaggaaguggcuacgcggccgaccagaagucaacccagaacgcaauaaaugguaucacgaacaaaguaaauuccguuauugaaaagaugaacacucaguuuacagcuguggggaaggaguucaacaaacuugagcgaagaauggaaaaucugaacaagaaagucgaugacggcuucaucgauauauggaccuacaaugccgaguugcuagugcugcucgaaaacgagaggacucuggacuuucaugacucuaauguaaagaaccuuuaugaaaaaguuaagagccaacugaagaauaacgcuaaagagauuggaaauggcugcuucgaguuuuaccacaaguguaacgaugaaugcauggagucagugaaaaaugggacauaugacuaccccaaguauagugaagaguccaaauugaaccgggagaagaucgauggagucaagcucgaaagcauggguguguaccagauccuggccauuuauucuaccgucgcaucaaguuuagugcugcuaguuagccucggcgccaucuccuucuggaugugcucuaaugggucgcugcagugucguauuugcauauga

SEQ ID NO: 136964 - RNA, 1698 nt, Artificial Sequence
  derived and/or modified CDS sequence (opt3) from hemagglutinin__InfluenzaA__AFJ78595
augaaggugaaacugcucguccuucugugcaccuucacagccacuuacgcugacacgaucuguauuggcuaucacgcaaacaauagcaccgauacaguugacacuguguuggagaagaacguaaccgugacacauuccgucaauuuacuggaaaacucucacaaugggaaacuaugccuccugaagggaauagcgccccuucagcuggguaacuguucaguggccggcuggaucuuggggaauccugagugcgaacuccugauuaguaaagagagcugguccuacaucguugaaaagccaaacccggagaauggaaccuguuaucccggccauuuugcugauuacgaggaacugagagagcaacucucuucggugagcucauucgaaagguuugagauuuucccuaaggagaguuccuggccaaaccacacugucacaggugugucugccagcugcucccauaauggggaaucaaguuuuuaucggaacuuacuguggcuuaccggcaaaaauggauuguaccccaaccugagcaagucuuaugcaaauaaccgcgagaaagaaguucuaguacucuggggcgugcaccacccuccaaacaucggggaccagaaggcccuguaccauacggagaaugcuuacgucuccguggugucaagccacuauagucgaaaauucacucccgaaauagcaaagcguccuaaggucagagaucaggagggaaggaucaacuacuauuggacccuucuggagccaggugacacaauuaucuuugaagccaauggcaacuugauugcuccgcgguacgccuucgcgcucucucgcggguuuggauccggcaucauaaauagcaacgcacccauggauaaaugugacgccaagugccagacuccucaaggugcuauuaauucgucucugccauuccagaacguucaucccgugaccaucggggaguguccuaaauauguaagauccgccaaguuaaggauggugacaggacugcggaauauuccaucaauccagagucgcggccucuuuggcgcaaucgcuggguucauugaaggagguuggaccggcauggucgaugggugguacggauaucaccaccagaacgagcaaggcagcgguuacgccgcggaccagaaauccacgcagaaugccauaaacgggaucacuaauaaggugaacucuguuauugaaaagaugaauacacaguuuaccgcagugggcaaggaguucaacaaacuugagcgaagaauggaaaaccugaauaaaaaggucgaugacggauucaucgauauauggacuuacaacgcugaguugcuagugcugcucgaaaaugagaggacacuggacuuucaugacagcaacguuaaaaaucuuuaugaaaagguaaaaucacaacugaagaacaaugccaaggagauuggcaacgggugcuucgaguuuuaccacaaauguaaugaugaaugcauggagagugugaagaacggaaccuaugacuaccccaaauauuccgaagagagcaaguugaaucgggagaaaaucgauggugucaagcucgaaucuaugggcguguaccagauccuggcuauuuauucaacggucgccaguagcuuagugcugcuaguuucccucggggcaaucucuuucuggaugugcucgaacggaagccugcagugucguauuugcauauga

SEQ ID NO: 136965 - RNA, 1698 nt, Artificial Sequence
  derived and/or modified CDS sequence (opt3) from hemagglutinin__InfluenzaA__AFJ78617
augaaggugaaacugcucguccuucugugcaccuucacagccacuuacgcugacacgaucuguauuggcuaucacgcaaacaauagcaccgauacaguugacacuguguuggagaagaacguaaccgugacacauuccgucaauuuacuggaaaacucucacaaugggaaacuaugccuccugaagggaauagcgccccuucagcuggguaacuguucaguggccggcuggaucuuggggaauccugagugcgaacuccugauuaguaaagagagcugguccuacaucguugaaaagccaaacccggagaauggaaccuguuaucccggccauuuugcugauuacgaggaacugagagagcaacucucuucggugagcucauucgaaagguuugagauuuucccuaaggagaguuccuggccaaaccacacugucacaggugugucugccagcugcucccaugacggggaaucaaguuuuuaucggaauuuacuguggcuuaccggaaagaacggcuuguaccccaaucugagcaagucuuaugcaaacaauaaagagaaggaaguucuaguacucuggggcgugcaccacccuccauccaucucagaucagaaaacgcuguaccauacugagaacgcccacgucagcguggugaguucucauuacucccgcaaguucacccccgaaauagcuaagcgaccuaaaguccgugaccaggaggggagaaucaacuauuacuggacacuucuggagccaggagauacuauuaucuuugaagcaaaugguaacuugauugccccgagguaugcuuucgcccucagccggggcuuugggucgggaaucauaaauucuaacgcgcccauggacaagugugaugcaaaaugccagaccccucaaggcgccauuaauuccucacugccauuccagaacguucaccccgugacaaucggugaguguccuaaguacguacgcagugcuaaauuaagaauggugaccgggcugaggaauauuccaagcauccagucccggggacucuuuggcgccaucgcaggcuucauugaagggggauggacggguauggucgacggcugguauggguaccaccaucagaacgagcaaggaucuggcuaugcugccgaucagaaaagcacucagaaugcgauaaacgguaucacaaauaaagugaacucaguuauugaaaagaugaauacccaguuuacugccgugaguaaggaguucaacaaacuugagcgccgaauggaaaaucugaacaagaaagucgacgauggguucaucgacauauggacauacaacgcagaguugcuagugcugcucgaaaaugagagaacccuggacuuucacgauuccaacguaaagaaucuuuacgaaaaaguuaagagccaacugaagaacaaugcuaaagagauuggcaacggaugcuucgaguuuuaucauaaguguaaugacgaaugcauggagucugugaaaaacggcacguacgauuaucccaaguacucagaagagaguaaauugaauagggagaagaucgacggggucaagcucgaaagcaugggaguguaucagauccuggccauuuacuccaccgucgcuucuucguuagugcugcuaguuagccucggugccaucuccuucuggaugugcucaaacggcagucugcagugucggauuugcauauga

SEQ ID NO: 136966 - RNA, 1698 nt, Artificial Sequence
  derived and/or modified CDS sequence (opt3) from hemagglutinin__InfluenzaA__AFJ78628
augaaggugaaacugcucguccuucugugcaccuucacagccacuuacgcugacacgaucuguauuggcuaucacgcaaacaauagcaccgauacaguugacacuguguuggagaagaacguaaccgugacacauuccgucaauuuacuggaagauaaccacaaugggaaacuaugccuccugaagggaauagcgccccuucagcuggguaacuguucuguggccggcuggaucuuggggaauccugagugcgaacuccugauuucaaaagagaguuggagcuacaucguugaaagaccaaacccggagaauggaaccuguuaucccggccauuuugcugacuacgaggaacugagggagcaacucuccucugugucgucauucgaacgguuugagauuuucccuaaggagagcaguuggccaaaccacacugucacagguguguccgccucuugcagccauaauggggaauccucauuuuauaagaacuuacuguggcuuaccggaaagaauggcuuguaccccaaccugaguaagagcuaugcaaauaacaaagagaaggaagugcuaguucucuggggcgugcaccacccuccaaacaucgggaaucagaugacgcuguaccauaaagagaacgccuacgucucugugguguccucacacuauagccgcaaguucacucccgaaauagcuaagcgaccuaaaguccgugaucaggagggaagaaucaauuacuauuggacccuucuggagccaggugacacaauuaucuuugaagcaaacggcaauuugauugccccgagguacgcuuucgcccucagucggggguuuggaucuggcaucauaaacuccaaugcgcccauggaugagugugacgcaaagugccagacuccucaaggugccauuaacagcucgcugccauuccagaauguucaucccgugaccaucggggaauguccuaaauauguacgcucugcuaaguuaagaauggugacaggacugaggaacauuccauccauccagucacggggccucuuuggcgccaucgcaggguucauugagggagguuggaccggcauggucgaugggugguacggauaucaccaccagaaugaacaaggcagugguuacgcugccgaccagaaaagcacgcagaacgcgauaaaugggaucacuaacaagguaaauuccguuauugagaaaaugaacacacaguuuaccgccgugggcaaggaguucaacaaacuugaacgccgaauggagaaucugaacaaaaaggucgaugacggauucaucgauguguggacuuacaaugcagaauugcuaguacugcucgagaacgaaagaacacuggacuuucaugacucuaauguuaaaaaccuuuaugagaaggugaaaaaucaacugaagaacaaugcuaaggagauaggcaacgggugcuucgaauuuuaccacaaauguaaugaugagugcauggaaagcgucaagaacggaaccuaugacuaccccaaauauucagaggagaguaaguuguccagggagaaaauugauggugugaagcucgaaagcaugggcgucuaccagauccuggccaucuauucuacgguggcuucaaguuuaguucugcuagugagccucggggccauuuccuucuggaugugcucuaauggaucgcugcagugucggaucugcauuuga

SEQ ID NO: 136967 - RNA, 1698 nt, Artificial Sequence
  derived and/or modified CDS sequence (opt3) from hemagglutinin__InfluenzaA__AFJ78639
augaaggugaaacugcucguccuucugugcaccuucacagccacuuacgcugacacgaucuguauuggcuaucacgcaaacaauagcaccgauacaguugacacuguguuggagaagaacguaaccgugacacauuccgucaauuuacuggaaaacucucacaaugggaaacuaugccuccugaagggaauagcgccccuucagcuggguaacuguucaguggccggcuggaucuuggggaauccugagugcgaacuccugauuaguaaagagagcugguccuacaucguugaaaagccaaacccggagaauggaaccuguuaucccggccauuuugcugauuacgaggaacugagagagcaacucucuucggugagcucauucgaaagguuugagauuuucccuaaggagaguuccuggccaaaccacacugucacaggugugucugccagcugcucccauaauggggaaucaaguuuuuaucggaacuuacuguggcuuaccggaaagaauggcuuguaccccaaccugagcaagucuuaugcaaauaacaaagagaaggaaguucuaguacucuggggcgugcaccacccuccauccaucucaaaccagaaaacgcuguaccauacugagaaugccuacgucagcguggugaguucucacuauucccgcaaguucacccccgaaauagcuaagcgaccuaaaguccgugaccaggaggggagaaucaacuacuauuggacacuucuggagccaggagauacuauuaucuuugaagcaaaugguaacuugauugccccgagguacgcuuucgcccucagccggggcuuugggucgggaaucauaaauucuaacgcgcccauggacaagugugaugcaaaaugccagaccccucaaggcgccauuaauuccucacugccauuccagaacguucaucccgugacaaucggugaguguccuaaguauguacgcagugcuaaauuaagaauggugaccgggcugaggaauauuccaagcauccagucccggggacucuuuggcgccaucgcaggcuucauugaagggggauggacggguauggucgacggcugguacggguaucaccaccagaacgagcaaggaucuggcuacgcugccgaucagaaaagcacucagaaugcgauaaacgguaucacaaauaaagugaacucaguuauugaaaagaugaauacccaguuuacugccguggggaaggaguucaacaaacuugagcgccgaauggaaaaccugaauaagaaagucgacgauggcuucaucgacauauggacauacaacgcagaguugcuagugcugcucgaaaaugagagaacccuggauuuucaugacaguaacguaaagaaucuuuaugaaaaaguuaagucccaacugaagaacaaugcuaaagagauuggaaacggcugcuucgaguuuuaccacaaguguaaugacgaaugcauggagagcgugaaaaacgggacguaugauuaccccaaguauucugaagagucaaaauugaauagggagaagaucgacggagucaagcucgaaaguauggguguguaccagauccuggccauuuauagcaccgucgcuuccucuuuagugcugcuaguuucgcucggcgccaucagcuucuggaugugcuccaacgggucacugcagugucggauuugcauauga

SEQ ID NO: 136968 - RNA, 1698 nt, Artificial Sequence; identical to SEQ ID NO: 136967
  derived and/or modified CDS sequence (opt3) from hemagglutinin__InfluenzaA__AFJ78650

SEQ ID NO: 136969 - RNA, 1701 nt, Artificial Sequence; identical to SEQ ID NO: 130717
  derived and/or modified CDS sequence (opt3) from hemagglutinin__InfluenzaA__AFJ78661

SEQ ID NO: 136970 - RNA, 1701 nt, Artificial Sequence
  derived and/or modified CDS sequence (opt3) from hemagglutinin__InfluenzaA__AFJ78681
augaaggccauccuggugguccuccuuuacaccuucgcuacaguuaacgcagacacucugugcauuggcuaucacgccaauaacagcacggauaccguggacacaguauuggagaaaaaugugacugucacccauuccgugaacuuacuggaagauaagcacaaugggaaacuauguaagcucagaggaguugcgccccugcaucuugguaaaugcaacauagcuggcuggauccuggggaauccugagugugaaucuuugucaacagccaguagcugguccuacauuguggagaccucuucgucagacaacggaacuugcuauccaggcgauuuuaucgacuacgaggagcucagggagcagcugagcagugucuccucuuucgaacgguuugagauuuucccgaagacaagcuccuggcccaaucacgauucaaacaagggugugaccgcagccuguccucaugcuggggcaaaaaguuuuuauaagaaucugaucuggcucguaaagaagggaaacagcuacccaaaauuaucuaaguccuauauaaaugacaagggcaaagaaguucuggugcuuuggggcauccaccaccccucaacgagcgccgaucaacagaguuuguaccagaacgcugacgccuacgucuucguggggacuucucgcuauuccaagaaauuuaagccugagauugcgauccgaccaaaagugcgugaucaggagggaagaaugaauuacuauuggacccuggucgaacccggugacaagauuacauucgaggcaacuggcaaccuaguugugccuagguacgccuuugcuauggaacggaacgccgggagcggaaucauaauuucggauaccccaguacaugacugcaauacaaccugucaaacgccgaaaggcgcaaucaacacuucucuccccuuccagaauauucacccuaucacaaucgguaagugcccaaaguaugugaaauccaccaagcugcgccuugcuacugggcugagaaacguccccucaauucagaguaggggauuguuuggcgccauagcgggcuucaucgaagggggauggacagguaugguggacggcugguacggguaucaucaccagaaugaacaaggaagcggcuacgccgcagaucucaaauccacccagaacgcuauugacgagaucacgaauaagguuaacucugugauagagaaaaugaauacccaguuuacagccgucgguaaggaguucaaccaccuggaaaagcggauugaaaauuuaaacaaaaagguggaugacggguuccuggauaucuggacuuacaaugcugagcuccuuguacuguuggaaaacgagcgcacccuagacuaucaugauagcaauguuaaaaaccuguacgagaaggugcgaucacagcucaaaaacaaugccaaggaaaucggcaacggauguuuugaguucuaucacaagugcgacaauacauguauggaaagugucaaaaacggcacuuacgauuauccuaaguacuccgaggaagcaaaacugaauagagaggagauugacggggugaaacuugaaagcaccaggaucuaucaaauucuggccauauacucuacagucgcuucaaguuuggugcucguugugagccugggagcgaucuccuuuuggaugugcucuaacgguucguuacagugccggauuuguaucuga

SEQ ID NO: 136971 - RNA, 1701 nt, Artificial Sequence; identical to SEQ ID NO: 130717
  derived and/or modified CDS sequence (opt3) from hemagglutinin__InfluenzaA__AFJ78691

SEQ ID NO: 136972 - RNA, 1701 nt, Artificial Sequence; identical to SEQ ID NO: 130717
  derived and/or modified CDS sequence (opt3) from hemagglutinin__InfluenzaA__AFJ78701

SEQ ID NO: 136973 - RNA, 1701 nt, Artificial Sequence; identical to SEQ ID NO: 135245
  derived and/or modified CDS sequence (opt3) from hemagglutinin__InfluenzaA__AFJ78711

SEQ ID NO: 136974 - RNA, 1701 nt, Artificial Sequence; identical to SEQ ID NO: 130717
  derived and/or modified CDS sequence (opt3) from hemagglutinin__InfluenzaA__AFJ78721

SEQ ID NO: 136975 - RNA, 1701 nt, Artificial Sequence
  derived and/or modified CDS sequence (opt3) from hemagglutinin__InfluenzaA__AFJ78731
augaaggccauccuggugguccuccuuuacaccuucgcuacagcaaacgccgacacucugugcauuggcuaucacgcgaauaacagcacggauaccguugacacaguguuggagaaaaauguaacugugacccauuccgucaacuuacuggaagauaagcacaaugggaaacuauguaagcucagaggaguggcuccccugcaucuugguaaaugcaacauagccggcuggauccuggggaauccugagugugaaucuuugucaacagcaaguagcugguccuacauuguugagaccucuucgucagacaacggaacuugcuauccaggcgauuuuaucgacuacgaggagcucagggagcagcugagcaguguguccucuuucgaacgguuugagauuuucccgaagacaagcuccuggcccaaucacgauucaaacaagggugucaccgccgcuuguccucaugcaggggccaaaaguuuuuauaagaaucugaucuggcucgugaaaaagggaaacagcuacccaaaauuaucuaaguccuauauaaaugacaagggcaaagaaguacugguucuuuggggcauccaccaccccucaacgagcgcugaucaacagaguuuguaccagaacgccgacgcguacguguucgucgggacuucucgcuauuccaagaaauuuaagccugagauugcaauccgaccaaaagugcgugaucaggagggaagaaugaauuacuauuggacccugguggaacccggugacaagauuacauucgaggccacuggcaaccuagucguuccuagguacgcuuuugccauggaacggaacgcagggagcggaaucauaauuucggauaccccagugcaugacugcaauacaaccugucaaacgccgaaaggcucuaucaacacuucccuccccuuccagaauauucacccuaucacaaucgguaagugcccaaaguauguaaaaucaaccaagcugcgccuugcuacugggcugagaaacgugcccaguauucagagcaggggauuguuuggcgccauagcgggcuucaucgaagggggauggacagguauggucgacggcugguacggguaucaucaccagaaugaacaaggauccggcuacgccgcagaucucaaaucuacccagaacgcuauugacgagaucacgaauaaggugaacagcguuauagagaaaaugaauacccaguuuacagccguggguaaggaguucaaccaccuggaaaagcggauugaaaauuuaaacaaaaaggucgaugacggguuccuggauaucuggacuuacaaugcugagcuccuugugcuguuggaaaacgagcgcacccuagacuaucaugauucaaauguaaagaaccuguacgagaagguucgaagucagcucaaaaacaaugccaaggaaaucggcaacggauguuuugaguucuaucacaagugcgacaauacauguauggaauccgugaaaaacggcacuuacgauuauccuaaguacagcgaggaagcaaaacugaauagagaggagauugacggggucaaacuugaaucuaccaggaucuaucaaauucuggccauauacucaacaguggcuaguagcuugguccucgugguuucccugggagcgaucucuuuuuggaugugcucgaacgguagcuuacagugccggauuuguaucuga

SEQ ID NO: 136976 - RNA, 1701 nt, Artificial Sequence; identical to SEQ ID NO: 131881
  derived and/or modified CDS sequence (opt3) from hemagglutinin__InfluenzaA__AFJ78741

SEQ ID NO: 136977 - RNA, 1701 nt, Artificial Sequence; identical to SEQ ID NO: 130717
  derived and/or modified CDS sequence (opt3) from hemagglutinin__InfluenzaA__AFJ78751

SEQ ID NO: 136978 - RNA, 1701 nt, Artificial Sequence; identical to SEQ ID NO: 130717
  derived and/or modified CDS sequence (opt3) from hemagglutinin__InfluenzaA__AFJ78761

SEQ ID NO: 136979 - RNA, 1701 nt, Artificial Sequence; identical to SEQ ID NO: 130717
  derived and/or modified CDS sequence (opt3) from hemagglutinin__InfluenzaA__AFJ78771

SEQ ID NO: 136980 - RNA, 1701 nt, Artificial Sequence; identical to SEQ ID NO: 130717
  derived and/or modified CDS sequence (opt3) from hemagglutinin__InfluenzaA__AFJ78781

SEQ ID NO: 136981 - RNA, 1701 nt, Artificial Sequence; identical to SEQ ID NO: 130717
  derived and/or modified CDS sequence (opt3) from hemagglutinin__InfluenzaA__AFJ78791

SEQ ID NO: 136982 - RNA, 1701 nt, Artificial Sequence; identical to SEQ ID NO: 130717
  derived and/or modified CDS sequence (opt3) from hemagglutinin__InfluenzaA__AFJ78801

SEQ ID NO: 136983 - RNA, 1701 nt, Artificial Sequence; identical to SEQ ID NO: 131578
  derived and/or modified CDS sequence (opt3) from hemagglutinin__InfluenzaA__AFJ78811

SEQ ID NO: 136984 - RNA, 1701 nt, Artificial Sequence; identical to SEQ ID NO: 130717
  derived and/or modified CDS sequence (opt3) from hemagglutinin__InfluenzaA__AFJ78821

SEQ ID NO: 136985 - RNA, 1701 nt, Artificial Sequence; identical to SEQ ID NO: 130717
  derived and/or modified CDS sequence (opt3) from hemagglutinin__InfluenzaA__AFJ78831

SEQ ID NO: 136986 - RNA, 1701 nt, Artificial Sequence; identical to SEQ ID NO: 131915
  derived and/or modified CDS sequence (opt3) from hemagglutinin__InfluenzaA__AFJ78841

SEQ ID NO: 136987 - RNA, 1701 nt, Artificial Sequence; identical to SEQ ID NO: 130717
  derived and/or modified CDS sequence (opt3) from hemagglutinin__InfluenzaA__AFJ78851

SEQ ID NO: 136988 - RNA, 1701 nt, Artificial Sequence
  derived and/or modified CDS sequence (opt3) from hemagglutinin__InfluenzaA__AFJ78861
augaaggccauccuggugguccuccuuuacaccuucgcuacagcaaacgccgacacucugugcauuggcuaucacgcgaauaacagcacggauaccguugacacaguguuggagaaaaauguaacugugacccauuccgucaacuuacuggaagauaagcacaaugggaaacuauguagacucaggggaguggcuccccugcaucuugguaagugcaacauagccggcuggauccuggggaauccugagugugaaucuuugucaacagcaaguagcugguccuacauuguugagaccucuucgucagacaacggaacuugcuauccaggcgauuuuaucgacuacgaggagcuccgggagcagcugagcaguguguccucuuucgaacgcuuugagauuuucccgaaaacaagcuccuggcccaaucacgauucaaacaagggugucaccgccgcuuguccucaugcaggggccaagaguuuuuauaaaaaucugaucuggcucgugaagaaaggaaacagcuacccaaaguuaucuaaauccuauauaaaugacaagggcaaggaaguacugguucuuuggggcauccaccaccccucaacgagcgcugaucaacagaguuuguaccagaacgccgacgcguacguguucgucgggacuucucgauauuccaaaaaguuuaaaccugagauugcaauccguccaaaggugagagaucaggagggaaggaugaauuacuauuggacccugguggaacccggugacaaaauuacauucgaggccacuggcaaccuagucguuccucgguacgcuuuugccauggaacgcaacgcagggagcggaaucauaauuucggauaccccagugcaugacugcaauacaaccugucaaacgccgaagggcgcuaucaacacuucucuccccuuccagaauauucacccuaucacaaucgguaaaugcccaaaguauguaaaguccaccaaacugagacuugccacugggcugaggaacgugcccucaauucagagucggggauuguuuggcgcgauagccggcuucaucgaagggggauggacagguauggucgacggcugguacggguaucaucaccagaaugaacaaggaagcggcuacgcagcugaucucaaguccacccagaacgccauugacgagaucacgaauaaagugaacucuguuauagagaagaugaauacccaguuuacagcuguggguaaagaguucaaccaccuggaaaagcgcauugaaaauuuaaacaagaaagucgaugacggguuccuggauaucuggacuuacaaugccgagcuccuugugcuguuggaaaacgagcgaacccuagacuaucaugauagcaauguaaagaaccuguacgagaaaguuagaucacagcucaagaacaaugcaaaagaaaucggcaacggauguuuugaguucuaucacaagugcgacaauacauguauggaaagugugaagaacggcacuuacgauuauccuaaauacuccgaggaagccaagcugaauagggaggagauugacggggucaaacuugaaagcacccggaucuaucaaauucuggcuauauacucuacaguggcgucaaguuugguccucgugguuagccugggagcaaucuccuuuuggaugugcucuaacgguucguuacagugccguauuuguaucuga

SEQ ID NO: 136989 - RNA, 1701 nt, Artificial Sequence
  derived and/or modified CDS sequence (opt3) from hemagglutinin__InfluenzaA__AFJ78881
augaaggccauccuggugguccuccuuuacaccuucgcuacagcaaacgccgacacucugugcauuggcuaucacgcgaauaacagcacggauaccguugacacaguguuggagaaaaauguaacugugacccauuccgucaacuuacuggaagauaagcacaaugggaaacuauguaagcucagaggaguggcuccccugcaucuugguaaaugcaacauagccggcuggauccuggggaauccugagugugaaucuuugucaacaaguagcuccuggucuuacauuguugagaccucgucaagcgacaacggaacuugcuauccaggcgauuuuaucgacuacgaggagcucagggagcagcugaguuccgugucuagcuucgaacgguuugagauuuucccgaagacauccucauggcccaaucacgauaguaacaagggugucaccgcagccuguccucaugcuggggcaaagagcuuuuauaagaaucugaucuggcucgugaaaaagggaaacucuuacccaaaauuauccaagucauauauaaaugacaagggcaaagaaguacugguucuuuggggcauccaccaccccagcacgagugccgaucaacagucuuuguaccagaacgcugacgccuacguguucgucgggacuucccgcuauagcaagaaauuuaagccugagauugcgauccgaccaaaagugcgugaucaggagggaagaaugaauuacuauuggacccugguggaacccggugacaagauuacauucgaggcaacuggcaaccuagucguuccuagguacgccuuugcuauggaacggaacgccgggucgggaaucauaauuucugauaccccagugcaugacugcaauacaaccugucaaacgccgaaaggcgcaaucaacacuucccuccccuuccagaauauucacccuaucacaaucgguaagugcccaaaguauguaaaaucaaccaagcugcgccuugcuacugggcugagaaacgugcccaguauucagagcaggggauuguuuggcgccauagcgggcuucaucgaagggggauggacagguauggucgacggcugguacggguaucaucaccagaaugaacaaggauccggcuacgccgcagaucucaaaucuacccagaacgcuauugacgagaucacgaauaaggugaacagcguuauagagaaaaugaauacccaguuuacagccguggguaaggaguucaaccaccuggaaaagcggauugaaaauuuaaacaaaaaggucgaugacggguuccuggauaucuggacuuacaaugcugagcuccuugugcuguuggaaaacgagcgcacccuagacuaucaugauucaaauguuaaaaaccuguacgagaagguacgaagucagcucaaaaacaaugccaaggaaaucggcaacggauguuuugaguucuaucacaagugcgacaauacauguauggaauccgugaaaaacggcacuuacgauuauccuaaguacagcgaggaagcaaaacugaauagagaggagauuaacggggucaaacuugaaucuaccaggaucuaucaaauucuggccauauacucaacagcugcgaguagcuuggugcucgucgugucccugggagcaaucucuuuuuggaugugcucgaaugguagcuuacagugccggauuuguaucuga

SEQ ID NO: 136990 - RNA, 1701 nt, Artificial Sequence; identical to SEQ ID NO: 130717
  derived and/or modified CDS sequence (opt3) from hemagglutinin__InfluenzaA__AFJ78891

SEQ ID NO: 136991 - RNA, 1701 nt, Artificial Sequence; identical to SEQ ID NO: 130717
  derived and/or modified CDS sequence (opt3) from hemagglutinin__InfluenzaA__AFJ78901

SEQ ID NO: 136992 - RNA, 1701 nt, Artificial Sequence; identical to SEQ ID NO: 130717
  derived and/or modified CDS sequence (opt3) from hemagglutinin__InfluenzaA__AFJ78911

SEQ ID NO: 136993 - RNA, 1701 nt, Artificial Sequence; identical to SEQ ID NO: 130717
  derived and/or modified CDS sequence (opt3) from hemagglutinin__InfluenzaA__AFJ78921

SEQ ID NO: 136994 - RNA, 1701 nt, Artificial Sequence
  derived and/or modified CDS sequence (opt3) from hemagglutinin__InfluenzaA__AFJ97567
augaaggccauccuggugguccuccuuuacaccuucgcuacagcaaacgccgacacucugugcauuggcuaucacgcgaauaacagcacggauaccguugacacaguguuggagaaaaauguaacugugacccauuccgucgauuuacuggaagacaagcacaacgggaaacuauguaagcucagaggaguggcuccccugcaucuugguaaaugcaauauagccggcuggauccuggggaacccugagugugaaucuuugucaacagcaaguagcugguccuacauuguugagaccucuucgucagauaauggaacuugcuauccaggcgacuuuaucgauuacgaggagcucagggagcagcugagcaguguguccucuuucgaacgguuugagauuuucccgaagacaagcuccuggcccaaccacgacucaaauaagggugucaccgccgcuuguccucaugcaggggccaaaaguuuuuauaagaaccugaucuggcucgugaaaaagggaaauagcuacccaaaauuaaacaagucuuauauaaaugauaagggcaaagaaguacugguucuuuggggcauccaccaccccuccacgucaacugaccaacagagcuuguaccagaacgcugaugccuacguguucgucgggaccagucgcuauucuaagaaauuuaagccugagauugcgauccgaccaaaagugcgugaccaggagggaagaaugaauuacuauuggacacugguggaacccggugauaagauuacuuucgaggcaaccggcaaccuagucguuccuagguacgccuuuacaauggaacggaacgcuggguccggaaucauaauuagcgacaccccagugcaugacugcaauacgacuugucaaacaccgaaaggcgccaucaacaccucguuccccuuucagaauauucacccuaucacuaucgguaagugcccaaaguauguaaaaucuacaaagcuccgccuggcaaccgggcuuagaaacgugcccuccauucagucaaggggacuguucggcgcuauagccggcuuuaucgaagggggauggacggguauggucgauggcugguacggguaucaucaccagaaugaacaaggaaguggcuacgcggccgacuugaaaagcacccagaacgcaauugaugagaucacaaauaaggugaacuccguuauagagaaaaugaauacucaguucaccgcuguggguaaggaguucaaccaccucgaaaagcggauugaaaaucugaacaaaaaggucgacgauggguuuuuagacaucuggacauacaaugccgagcugcucgugcuucuggaaaacgagcgcacuuuggauuaucaugacucuaauguuaaaaaccuauacgagaagguacgaagccagcugaaaaacaaugcuaaggaaaucggcaacggauguuucgaguuuuaucacaagugcgauaauaccuguauggaaucagugaaaaacggcacauacgacuauccuaaguacagugaggaagccaaacucaauagagaggagauugauggggucaagcuggaauccaccaggaucuaucaaauucuugcaauauacagcacuguggccucuucacuggucuuggugguuagucucggagcuaucagcuucuggaugugcuccaacgguucucugcagugccggauuuguaucuga

SEQ ID NO: 136995 - RNA, 1701 nt, Artificial Sequence; identical to SEQ ID NO: 130717
  derived and/or modified CDS sequence (opt3) from hemagglutinin__InfluenzaA__AFK14115

SEQ ID NO: 136996 - RNA, 1701 nt, Artificial Sequence; identical to SEQ ID NO: 130717
  derived and/or modified CDS sequence (opt3) from hemagglutinin__InfluenzaA__AFK14131

SEQ ID NO: 136997 - RNA, 1701 nt, Artificial Sequence; identical to SEQ ID NO: 132399
  derived and/or modified CDS sequence (opt3) from hemagglutinin__InfluenzaA__AFK14139

SEQ ID NO: 136998 - RNA, 1701 nt, Artificial Sequence
  derived and/or modified CDS sequence (opt3) from hemagglutinin__InfluenzaA__AFK14148
augaaggccauccuggugguccuccuuuacaccuucgcuacagcaaacgccgacacucugugcauuggcuaucacgcgaauaacagcacggauaccguugacacaguguuggagaaaaauguaacugugacccauuccgucaacuuacuggaagauaagcacaaugggaaacuauguaagcucagaggaguggcuccccugcaucuugguaaaugcaacauagccggcuggauccuggggaauccugagugugaaucuuugucaacagcaaguagcugguccuacauuguugagaccucuucgucagacaacggaacuugcuauccaggcgauuuuaucgacuacgaggagcucagggagcagcugagcaguguguccucuuucgaacgguuugagauuuucccgaagacaagcuccuggcccaaucacgauucaaacaagggugucaccgccgcuuguccucaugcaggggccaaaaguuuuuauaagaaucugaucuggcucgugaaaaagggaaacagcuacccaaaauuaucuaaguccuauauaaaugacaagggcaaagaaguacugguucuuuggggcauccaccaccccucaacgagcgcugaucaacagaguuuguaccagaacgccgacgcguacguguucgucgggacuucucgcuauuccaagaaauuuaagccugagauugcaauccgaccaaaagugcgugaucaggagggaagaaugaauuacuauuggacccugguggaacccggugacaagauuacauucgaggccacuggcaaccuagucguuccuagguacgcuuuugccauggaacggaacgcagggagcggaaucauaauuucggauaccccagugcaugacugcaauacaaccugucaaacgccgaaaggcgcuaucaacacuucucuccccuuccagaauauucacccuaucacaaucgguaagugcccaaaguauguaaaauccaccaagcugcgccuugccacugggcugagaaacgugcccucaauucagaguaggggauuguuuggcgcgauagccggcuucaucgaagggggauggacagguauggucgacggcugguacggguaucaucaccagaaugaacaaggaagcggcuacgcagcugaucucaaauccacccagaacgccauugacaagaucacgaauaaagugaacucuguuauagagaagaugaauacccaguuuacagcuguggguaaggaguucaaccaccuggaaaaacggauugagaauuuaaacaagaaagucgaugacggguuccuggauaucuggacuuacaaugccgaacuccuugugcuguuggagaacgaacgcacccuagacuaucaugauagcaauguaaagaaccuguacgagaaaguucgaaaccagcucaagaauaacgcaaaggagaucggcaauggauguuuugaguucuaucacaaaugcgacaacacauguauggaaucagugaagaauggcacuuacgauuauccuaaauacagugaagaggccaagcugaacagagaagagauugacggggucaaacuugaguccaccaggaucuaucaaauucuggcuauauacagcacaguggcgucuucauugguccucgugguuagucugggagcaaucagcuuuuggaugugcuccaaugguucuuuacagugccggauuuguaucuga

SEQ ID NO: 136999 - RNA, 1701 nt, Artificial Sequence; identical to SEQ ID NO: 132344
  derived and/or modified CDS sequence (opt3) from hemagglutinin__InfluenzaA__AFK14157

SEQ ID NO: 137000 - RNA, 1701 nt, Artificial Sequence; identical to SEQ ID NO: 130717
  derived and/or modified CDS sequence (opt3) from hemagglutinin__InfluenzaA__AFK14166

SEQ ID NO: 137001 - RNA, 1701 nt, Artificial Sequence; identical to SEQ ID NO: 132045
  derived and/or modified CDS sequence (opt3) from hemagglutinin__InfluenzaA__AFK14175

SEQ ID NO: 137002 - RNA, 1701 nt, Artificial Sequence; identical to SEQ ID NO: 133622
  derived and/or modified CDS sequence (opt3) from hemagglutinin__InfluenzaA__AFK14184

SEQ ID NO: 137003 - RNA, 1701 nt, Artificial Sequence; identical to SEQ ID NO: 131070
  derived and/or modified CDS sequence (opt3) from hemagglutinin__InfluenzaA__AFK14193

SEQ ID NO: 137004 - RNA, 1701 nt, Artificial Sequence; identical to SEQ ID NO: 132314
  derived and/or modified CDS sequence (opt3) from hemagglutinin__InfluenzaA__AFK14202

SEQ ID NO: 137005 - RNA, 1701 nt, Artificial Sequence; identical to SEQ ID NO: 131070
  derived and/or modified CDS sequence (opt3) from hemagglutinin__InfluenzaA__AFK14211

SEQ ID NO: 137006 - RNA, 1701 nt, Artificial Sequence
  derived and/or modified CDS sequence (opt3) from hemagglutinin__InfluenzaA__AFK14220
augaaggccauccuggugguccuccuuuacaccuucgcuacagcaaacgccgacacucugugcauuggcuaucacgcgaauaacagcacggauaccguugacacaguguuggagaaaaauguaacugugacccauuccgucaacuuacuggaagauaagcacaaugggaaacuauguaagcucagaggaguggcuccccugcaucuugguaaaugcaacauagccggcuggauccuggggaauccugagugugaaucuuugucaacagcaaguagcugguccuacauuguugagaccucuucgucagacaacggaacuugcuauccaggcgauuuuaucgacuacgaggagcucagggagcagcugagcagugccuccucuuucgaacgguaugagauuuuuccgaagacaagcuccuggcccaaucacgauucaaacaagggugugaccgcugcauguccucaugccggggcuaaaaguuucuacaagaaucugaucuggcucgucaaaaagggaaacagcuauccaaaauuaucuaaguccuacauaaaugacaagggcaaagaagugcugguacuuuggggcauccaccaccccucaacgagcgccgaucaacagaguuuguaccagaacgcggacgcauauguuuuuguggggacuucucgcuacuccaagaaauucaagccugagauugccauccgaccaaaaguccgugaucaggagggaagaaugaauuauuacuggacccugguggaacccggugacaagauuacauuugaggcuacuggcaaccuaguggucccuagguaugccuucgcaauggaacggaacgcugggagcggaaucauaauuucggauaccccaguucaugacugcaauacaaccugucaaacgccgaaaggcgccaucaacacuucucuccccuuucagaauauucacccuaucacaaucgguaagugcccaaaguacgugaaauccaccaagcugcgccuugcgacugggcugagaaacguacccucaauucagaguaggggauuguucggcgccauagcaggcuuuaucgaagggggauggacagguaugguggacggcugguauggguaccaucaccagaaugaacaaggaagcggcuacgcugccgaucucaaauccacccagaacgcuauugacaagaucacgaauaaagucaacucugugauagagaagaugaauacccaguucacagccguugguaaggaguuuaaccaccuggaaaaacggauugagaauuuaaacaagaaaguggaugacggguuccuggauaucuggacuuauaaugcagaacuccuuguccuguuggagaacgaacgcacccuagacuaccaugauagcaaugugaagaaccuguaugagaaaguacgaaaccagcucaagaauaacgccaaggagaucggcaauggauguuucgaauuuuaccacaaaugcgacaacacauguauggagucaguuaagaauggcacuuaugauuacccuaaauauagugaagaggcuaagcugaacagagaagagauugacggggugaaacuugaguccaccaggaucuaccaaauucuggcgauauacagcacagucgcaucuucauuggugcucgucgugagucugggagccaucagcuucuggaugugcuccaaugguucuuuacagugccggauuuguaucuga

SEQ ID NO: 137007 - RNA, 1701 nt, Artificial Sequence; identical to SEQ ID NO: 132344
  derived and/or modified CDS sequence (opt3) from hemagglutinin__InfluenzaA__AFK14229

SEQ ID NO: 137008 - RNA, 1701 nt, Artificial Sequence; identical to SEQ ID NO: 135482
  derived and/or modified CDS sequence (opt3) from hemagglutinin__InfluenzaA__AFK14238

SEQ ID NO: 137009 - RNA, 1701 nt, Artificial Sequence
  derived and/or modified CDS sequence (opt3) from hemagglutinin__InfluenzaA__AFK14247
augaaggccauccuggugguccuccuuuacaccuucgcuacagcaaacgccgacacucugugcauuggcuaucacgcgaauaacagcacggauaccguugacacaguguuggagaaaaauguaacugugacccauuccgucaacuuacuggaagauaagcacaaugggaaacuauguaagcucagaggaguggcuccccugcaucuugguaaaugcaacauagccggcuggauccuggggaauccugagugugaaucuuugucaacagcaaguagcugguccuacauuguugagaccucuucgucagacaacggaacuugcuauccaggcgauuuuaucgacuacgaggagcucagggagcagcugagcaguguguccucuuucgaacgguuugagauuuucccgaagacaagcuccuggcccaaucacgauucaaacaagggugucaccgccgcuuguccucaugcaggggccaaaaguuuuuauaagaaucugaucuggcucgugaaaaagggaaacagcuacccaaaauuaucuaaguccuauauaaaugacaagggcaaagaaguacugguucuuuggggcauccaccaccccucaacgagcgcugaucaacagaguuuguaccagaacgccgacgcguacguguucgucgggacuucucgcuauuccaagaaauuuaagccugagauugcaauccgaccaaaagugcgugaucaggagggaagaaugaauuacuauuggacccugguggaacccggugacaagauuacauucgaggccacuggcaaccuagucguuccuagguacgcuuuugccauggaacggaacgcagggagcggaaucauaauuucggauaccccagugcaugacugcaauacaaccugucaaacgccgaaaggcgcuaugaacacuucucuccccuuccagaauauccacccuauuacaaucgguaagugcccaaaguauguaaaauccaccaagcugcgcauggccacugggcuuagaaacgugcccucaauccagaguaggggacuguuuggcgcgauugccggcuucauagaagggggauggacagguauggucgacggcugguacggguaucaucaccagaaugaacaaggaagcggcuacgcagcugauuugaaauccacccagaacgccaucgacgagauuacgaauaaggugaacucuguuaucgagaaaaugaauacccaguuuacagcuguggguaaggaguucaaccaccucgaaaagcggauagaaaaucugaacaaaaaggucgaugacggguucuuagauauuuggacuuacaaugccgagcugcucgugcuucuggaaaacgagcgcaccuuggacuaucaugauagcaauguuaaaaaccuauacgagaagguacgaucacagcugaaaaacaaugcaaaggaaaucggcaacggauguuuugaguucuaucacaagugcgacaauacauguauggaaagugugaaaaacggcacuuacgauuauccuaaguacuccgaggaagccaaacucaauagagaggagaucgacggggucaagcuggaaagcaccaggauuuaucaaauccuugcuauuuacucuacaguggcgucaagucuggucuuggugguuagccucggagcaauauccuuuuggaugugcucuaacgguucgcugcagugccggaucuguauuuga

SEQ ID NO: 137010 - RNA, 1701 nt, Artificial Sequence
  derived and/or modified CDS sequence (opt3) from hemagglutinin__InfluenzaA__AFK14272
augaaggccauccugauugugcuccuuuacaccuucgcuacagcaaacgccgacacucugugcauaggcuaucacgcgaauaacagcacggauaccgucgacacaguuuuggagaagaaugugacuguaacccauuccgugaacuuacuggaagauaagcacaaugggaaacuauguaagcucacaggagucgcuccccugcaucuugguaaaugcgacaucgccggcuggauucuggggaacccugagugugaaucuuugucaaccgcaaguagcugguccuacaucguggagacuucuucgucagauaauggaacaugcuauccaggcgacuuuauugauuacgaggagcucagagagcagcugagcaguguuuccucuuucgaaagguuugagaucuucccgaagaccagcuccuggcccaaccacgacucaaauaagggugugacggccgcuuguccucaugcaggggccaaaaguuuuuauaagaaccugauauggcucgucaaaaagggaaauagcuacccaaaauuaucuaaguccuauaucaacgauaagggcaaagaagugcugguacuuuggggcauucaccaccccucaacuagcgcugaccaacagaguuuguaccagaaugccgaugcguacguuuucguggggaccucucgguauuccaagaaauuuaagccugagaucgcaauucgcccaaaaguccgagaccaggagggacguaugaacuacuauuggacacugguggaacccggugauaagaucacuuucgaggccaccggcaaucuaguggucccuagauacgcuuuugccauggaaaggaacgcagggagcggaauaauuaucucggacacaccaguucaugacugcaacaccacgugucaaacuccgaaaggcgcuauuaauacaucucuccccuuccagaacauccacccuaucaccauugguaagugcccaaaguaugugaaauccacuaagcugcggcuugccacagggcugcgcaauguacccucaauacagaguagaggauuguuuggcgcgaucgccggcuucauugaagggggauggaccgguaugguggauggcugguacggguaucaucaccagaacgaacaaggaagcggcuacgcagcugaccucaaauccacgcagcacgccaucgaugagauaaccaauaaggucaacucugugauugagaaaaugaauacacaguuuacugcuguugguaaggaguucaaccaucuggaaaagaggaucgaaaauuuaaacaaaaagguggacgauggguuccuggacaucuggaccuacaaugccgagcuccuuguccuguuggaaaacgagcggacacuagauuaucacgacagcaaugugaaaaaccuguacgagaagguacgcucacagcucaaaaauaacgcaaaggaaauuggcaacggauguuuugaguucuaucauaagugcgauaauacuuguauggaaaguguuaaaaacggcaccuacgacuauccuaaguacuccgaggaagccaaacugaaucgagaggagaucgauggggugaaacuugaaagcacaagaauuuaucaaauacuggcuaucuacucuaccgucgcgucaaguuuggugcucgucgugagccugggagcaauuuccuuuuggaugugcucuaacgguucguuacagugcaggaucuguaucuga

SEQ ID NO: 137011 - RNA, 1701 nt, Artificial Sequence; identical to SEQ ID NO: 131070
  derived and/or modified CDS sequence (opt3) from hemagglutinin__InfluenzaA__AFK14314

SEQ ID NO: 137012 - RNA, 1701 nt, Artificial Sequence
  derived and/or modified CDS sequence (opt3) from hemagglutinin__InfluenzaA__AFK14323
augaaggccauccuggugguccuccuuuacaccuucgcuacagcaaacgccgacacucugugcauuggcuaucacgcgaauaacagcacggauaccguugacacaguguuggagaaaaauguaacugugacccauuccgucaacuuacuggaagauaagcacaaugggaaacuauguaagcucagaggaguggcuccccugcaucuugguaaaugcaacauagccggcuggauccuggggaauccugagugugaaucuuugucaacagcaaguagcugguccuacauuguugagaccucuaacucggacaauggaacuugcuauccaggcgauuuuaucaacuacgaggagcucagggagcagcugucaagcgugaguuccuucgaacgguuugagauuuucccgaagacaucuagcuggcccaaucacgacuccaacaagggugucaccgccgcuuguccucaugcaggggccaaaucauuuuauaagaaucugaucuggcucgugaaaaagggaaacaguuacccaaaauuaagcaagucuuauauaaaugauaagggcaaagaaguacugguucuuuggggcauccaccaccccuccacgucagcugaccaacagagcuuguaccagaacgccgaugcguacguguucgucgggaccagucgcuauucuaagaaauuuaagccugagauugcaauccgaccaaaagugcgugaccaggagggaagaaugaacuacuauuggacucugguggaacccggugauaagauuacauucgaggccacuggcaaucuagucguuccuagguacgcuuuugccauggaacggaacgcaggguccggaaucauaauuagcgacaccccagugcaugauugcaauacaaccugucaaacgccgaaaggcgcuaucaacacuucgcuccccuuccagaauauucacccuaucacaaucgguaagugcccaaaguauguaaaaucuaccaagcugcgccuugccacugggcugagaaacgugcccuccauucagucaaggggauuguuuggcgcgauagccggcuucaucgaagggggauggacagguauggucgacggcugguacggguaucaucaccagaaugaacaaggaaguggcuacgcagcugaccucaaaagcacccagaacgccauugauaagaucacgaauaaagugaacuccguuauagagaagaugaauacccaguuuacagcuguggguaaggaguucaaccaccuggaaaaacggauugagaauuuaaacaagaaagucgacgauggguuccuggacaucuggacuuacaaugccgaacuccuugugcuguuggagaacgaacgcacccuagauuaucaugacucuaacguaaagaaucuguacgagaaaguucgaagccagcucaagaacaaugcaaaggagaucggcaacggauguuuugaguucuaucacaaaugcgauaauacauguauggaaucagugaagaacggcacuuacgacuauccuaaauacagugaagaggccaagcugaauagagaagagauugauggggucaaacuugaguccaccaggaucuaucaaauucuggcuauauacagcacaguggcgucuucauugguccucgugguuagucugggagcaaucagcuuuuggaugugcuccaacgguucuuuacagugccggauuuguaucuga

SEQ ID NO: 137013 - RNA, 1701 nt, Artificial Sequence; identical to SEQ ID NO: 135482
  derived and/or modified CDS sequence (opt3) from hemagglutinin__InfluenzaA__AFK14332

SEQ ID NO: 137014 - RNA, 1701 nt, Artificial Sequence
  derived and/or modified CDS sequence (opt3) from hemagglutinin__InfluenzaA__AFK14341
augaaggccauccuggugguccuccuuuacaccuucgcuacagcaaacgccgacacucugugcauuggcuaucacgcgaauaacagcacggauaccguugacacaguguuggagaaaaauguaacugugacccauuccgucaacuuacuggaagauaagcacaaugggaaacuauguaagcucagaggaguggcuccccugcaucuugguaaaugcaacauagccggcuggauccuggggaauccugagugugaaucuuugucaacagcaaguagcugguccuacauuguugagaccucuucgucagacaacggaacuugcuauccaggcgauuuuaucgacuacgaagaacucagggagcagcugagcaguguguccucuuucgaacgguuugagauuuucccgaagacaagcuccuggcccaaucacgauucaaacaagggugucaccgccgcuuguccucaugcaggggccaaaaguuuuuauaagaaucugaucuggcucgugaaaaagggaaacagcuacccaaaauuaucuaaguccuauauaaaugacaagggcaaagaaguacugguucuuuggggcauccaccaccccucaacgagcgcugaucaacagaguuuguaccagaacgccgacgcguacguguucgucgggacuucucgcuauuccaagaaauuuaagccugagauugcaauccgaccaaaagugcgugagcaggaaggaagaaugaauuacuauuggacccugguggagcccggugauaagauuacauucgaagccacuggcaaccuagucguuccuagguacgcuuuugccauggagcggaacgcagggagcggaaucauaauuucggacaccccagugcaugauugcaauacaaccugucaaacgccgaaaggcgcuaucaacacuucucuccccuuccagaauauucacccuaucacaaucgguaagugcccaaaguauguaaaauccaccaagcugcgccuugccacugggcugagaaacgugcccucaauucagaguaggggauuguuuggcgcgauagccggcuucaucgaagggggauggacagguauggucgacggcugguacggguaucaucaccagaaugagcaaggaagcggcuacgcagcugaccucaaauccacccagaacgccauugaugagaucacgaauaaggugaacucuguuauagagaaaaugaauacccaguuuacagcuguggguaaggaguucaaccaccuggaaaagcggauugagaauuuaaacaaaaaggucgacgauggguuccuggacaucuggacuuacaaugccgaacuccuugugcuguuggagaacgagaaaacccuagauuaucaugacagcaauguaaagaaccuguacgaaaaaguucgcucacagcucaagaacaaugcaaaggagaucggcaacggauguuuugaguucuaucacaaaugcgauaauacauguauggaaagugugaagaacggcacuuacgacuauccuaaauacuccgaagaggccaagcugaaucgagaggaaauugauggggucaaacuugagagcaccagaaucuaucaaauucuggcuauauacucuacaguggcgucaaguuugguccucgugguuagccugggagcaaucuccuuuuggaugugcucuaacgguucguuacagugcaggauuuguaucuga

SEQ ID NO: 137015 - RNA, 1701 nt, Artificial Sequence; identical to SEQ ID NO: 132137
  derived and/or modified CDS sequence (opt3) from hemagglutinin__InfluenzaA__AFK14350

SEQ ID NO: 137016 - RNA, 1701 nt, Artificial Sequence
  derived and/or modified CDS sequence (opt3) from hemagglutinin__InfluenzaA__AFK14358
augaaggccauccuggugguccuccuuuacaccuucgcuacagcaaacgccgacacucugugcauuggcuaucacgcgaauaacagcacggauaccguugacacaguguuggagaaaaauguaacugugacccauuccgucaacuuacuggaagauaagcacaaugggaaacuauguaagcucagaggaguggcuccccugcaucuugguaaaugcaacauagccggcuggauccuggggaauccugagugugaaucuuugucaacagcaaguagcugguccuacauuguugagaccucuucgucagacaacggagccugcuauccaggcgauuuuaucgacuacgaagaacucagggagcagcugagcaguguguccucuuucgaacgguuugagauuuucccgaagacuagcuccuggcccaaucacgauucaaacaagggugucacagcugcauguccucaugccggggcuaaaaguuuuuauaagaaucugaucuggcucgugaaaaagggaaacagcuacccaaaauuaucuaaguccuauauaaaugacaagggcaaagaaguacugguucuuuggggcauccaccaccccucaaccagcgccgaucaacagaguuuguaccagaacgcggacgcauacguguucgucgggacgucucgcuauuccaagaaauuuaagccugagauugccauccgaccaaaagugcgugagcaggaaggaagaaugaauuacuauuggacucugguggagcccggugauaagauuaccuucgaagcuacaggcaaccuagucguuccuagguacgccuuugcaauggagcggaacgcugggagcggaaucauaauuucggacacuccagugcaugauugcaauaccacaugucaaaccccgaaaggcgccaucaacacgucucuccccuuccagaauauucacccuaucacuaucgguaagugcccaaaguauguaaaauccacaaagcugcgccuugcgaccgggcugagaaacgugcccucaauucagaguaggggauuguuuggcgccauagcaggcuucaucgaagggggauggacugguauggucgacggcugguacggguaucaucaccagaaugagcaaggaagcggcuacgcugccgaccucaaauccacacagaacgcuauugaugagaucaccaauaaggugaacucuguuauagagaaaaugaauacgcaguuuaccgccguggguaaggaguucaaccaccuggaaaagcggauugagaauuuaaacaaaaaggucgacgauggguuccuggacaucuggacauacaaugcagaacuccuugugcuguuggagaacgagaaaacucuagauuaucaugacagcaauguaaagaaccuguacgaaaaaguucgcucacagcucaagaacaaugccaaggagaucggcaacggauguuuugaguucuaucacaaaugcgauaauaccuguauggaaagugugaagaacggcacauacgacuauccuaaauacuccgaagaggcuaagcugaaucgagaggaaauugauggggucaaacuugagagcacuagaaucuaucaaauucuggcgauauacucuaccguggcaucaaguuugguccucgugguuagccugggagccaucuccuuuuggaugugcucuaacgguucguuacagugcaggauuuguaucuga

SEQ ID NO: 137017 - RNA, 1701 nt, Artificial Sequence
  derived and/or modified CDS sequence (opt3) from hemagglutinin__InfluenzaA__AFK14395
augaaggccauccuggugguccuccuuuacaccuucgcuacagcaaacgccgacacucugugcauuggcuaucacgcgaauaacagcacggauaccguugacacaguguuggagaaaaauguaacugugacccauuccgucaacauauuagaagauaagcacaaugggaaacuguguaagcuaagaggaguggcuccccuccaucuggguaaaugcaacaucgccggcuggauucuugggaauccugagugugaaucucugucaacagcaaguagcugguccuacaucguugagaccucuucgucagaaaacggaaugugcuguccaagggacuuuauugauuaugaggaguugcgggaacagcucagcaguguguccucuuucgagcgcuuugaaaucuucccgaagacuagcuccuggcccaaucacgacucaaacaagggcgucacagccgcuugcccucaugcaggcgccaaaaguuuuuacaagaaucugauauggcuggugaaaaaggggaacagcuauccaaaacucucuaaguccuacaucaaugauaagggaaaagagguauuaguucuguggggcauucaccaccccucaaccagcgcugaccaacagagucuuuaucagaacgccgaugcguacguguucgucgguucuucccgauacagcaagaaauuuaagccugagaucgcaauucguccaaaagugagagaccaggaagggaggaugaauuauuacuggacguugguggagcccggagauaagaucacuuucgaagccaccgguaaccuggucguuccucgguaugcuuuugccauggagcgcaacgcaggcucggggauaauuaucucugacacaccagugcaugauuguaauacuaccugccaaacaccgaaaggagcuauuaacaccucccuacccuuccagaauauccacccuaucacgauuggcaaguguccaaaguacguaaaaucaacuaagcucagacuggccacaggucuuaggaacgugcccaguauacagagccgggggcuguuuggagcgaucgccggcuucauugaaggcggguggaccggaauggucgacgguugguauggcuaccaucaccagaaugagcaaggguccggauaugcagcugacuugaaaucuacucagaacgccaucgaugagauaacaaauaaggugaacagcguuauugaaaagaugaauacccaguuuacggcugugggcaaagaguucaaccaccucgaaaagcgcaucgagaaucugaacaaaaaggucgacgaugguuucuuagacaucuggaccuacaaugccgaacugcucgugcuucuggagaacgagcgaacauuggauuaccaugacucaaauguuaaaaaccuauaugaaaagguaagaagucagcugaaaaacaaugcaaaggagguggggaacggcugcuuugaguucuaccacaagugugauaauacuugcauggaauccgucaaaaacggaaccuaugacuacccuaaguauagcgaagaggccaaacucaauagggaggaaauugauggcgugaagcuggagucuacacggaucuaccaaauucuugcuauauauucaacugcggcaaguagccuggucuuggugguuucccucggggccaucucuuuuuggaugugcucgaacggaagccugcagugucguauuugcaucuga

SEQ ID NO: 137018 - RNA, 1701 nt, Artificial Sequence
  derived and/or modified CDS sequence (opt3) from hemagglutinin__InfluenzaA__AFK14431
augaaggccauccuggugguccuccuuuacaccuucgcuacagcaaacgccgacacucugugcauuggcuaucacgcgaauaacagcacggauaccguugacacaguguuggagaaaaauguaacugugacccauuccgucaacuuacuggaagauaagcacaaugggaaacuauguaagcucagaggaguggcuccccugcaucuugguaaaugcaacauagccggcuggauccuggggaauccugagugugaaucuuugucaacagcaaguagcugguccuacauuguugagaccucuaacucggacaauggaacuugcuauccaggcgauuuucucgacuacgaggaacugaggaagcagcugucaagcgugaguuccuucgagcgggucgaaaucuuuccgaagacaucuagcuggcccaaccacgauuccaauaaaggugugaccgccgcuuguccucaugcaggggccaagucauucuauaaaaaccucauuugguuaguaaagaaaggaaauaguuacccaaagcugagcaagucuuauaucaacgacaaaggcaaggagguucuuguguuguggggcauacaccaccccuccacgucagcugaucaacagagccuguaccagaaugccgacgcguacgucuuuguggggacuagccgcuauucuaaaaaguucaaaccugaaaucgcaauucgaccaaaggugcgugaucaggagggaagaaugaacuacuauuggacccuagucgagcccggugacaaaaucacauuugaagccacuggcaaccucguugugccuagguacgcuuucgccauggagcggaaugcaggguccggaauuaucauaagcgauaccccaguacaugacugcaacacaaccugucaaacgccgaagggcgcuauuaauacuucgcugcccuuucagaacauccacccuauuacaaucgguaagugcccaaaauaugugaagucuaccaaacuucgccuggccacuggguugagaaauguccccuccauccagucaaggggacucuucggcgcgauugccggcuuuauagaagggggauggacagguaugguggacggcugguacggguaucaucaccagaacgagcaaggaaguggcuacgcagcugauuuaaagagcacccagaaugccaucgacaaaauuacgaacaagguuaauuccgugaucgaaaagaugaacacccaguucacagcugucgguaaagaguuuaaucaccuggagaagcggauagaaaaccugaauaaaaagguggaugacggguuccucgauauuuggacuuacaacgccgagcuucugguauugcuagaaaaugagcgcacccuggacuaucaugauucuaacguuaaaaaccucuacgaaaaggugcgaagccagcugaagaauaacgcaaaagagaucggcaauggauguuucgaguuuuaucacaagugcgacaacacauguauggaaucagucaaaaauggcacuuacgauuauccuaaguacagugaggaagccaaacuuaacagagaggaaaucgacggggugaagcuggaguccaccaggauuuaucaaaucuuggcuauuuacagcacagucgcgucuucacucgugcugguugugaguuuaggagcaauaaguuucuggaugugcuccaaugguucucugcagugccggaucuguauuuga

SEQ ID NO: 137019 - RNA, 1701 nt, Artificial Sequence; identical to SEQ ID NO: 130717
  derived and/or modified CDS sequence (opt3) from hemagglutinin__InfluenzaA__AFK14456

SEQ ID NO: 137020 - RNA, 1701 nt, Artificial Sequence; identical to SEQ ID NO: 130717
  derived and/or modified CDS sequence (opt3) from hemagglutinin__InfluenzaA__AFK14465

SEQ ID NO: 137021 - RNA, 1701 nt, Artificial Sequence
  derived and/or modified CDS sequence (opt3) from hemagglutinin__InfluenzaA__AFK14536
augaaggccauccuggugguccuccuuuacaccuucgcuacagcaaacgccgacacucugugcauuggcuaucacgcgaauaacagcacggauaccguugacacaguguuggagaaaaauguaacugugacccauuccgucaacuuacuggaagauaagcacaaugggaaacuauguaagcucagaggaguggcuccccugcaucuugguaaaugcaacauagccggcuggauccuggggaauccugagugugaaucuuugucaacagcaaguagcugguccuacauuguugagaccuauucuucggacaacggaacuugcuacccaggcgauuuuaucgacuaugaggagcucagggagcagcugucaagcgugaguuccuucgaacgguuugagauuuucccgaagacaucuagcuggcccaaucacgauuccaacaagggugucaccgccgcuuguccucaugcaggggccaaaucauuuuacaagaaucugaucuggcucgugaaaaagggaaacaguuauccaaaauuaagcaagucuuacauaaaugacaagggcaaagaaguacugguucuuuggggcauccaccaccccuccacgucagcugaucaacagagcuuguaccagaacgccgacgcguauguguucgucgggacuucccgcuacucuaagaaauuuaagccugagauugcaauccgaccaaaagugcgugaucaggagggaagaaugaauuauuacuggacccugguggaacccggugacaagauuacauucgaggccacuggcaaccuagucguuccuagguaugcuuuugccauggaacggaacgcaggguccggaaucauaauuagcgauaccccagugcaugacugcaauacaaccugucaaacgccgaaaggcgcuaucaacacuucgcuccccuuccagaauauucacccuaucacaaucgguaagugcccaaaguacguaaaaucuaccaagcugcgccuugccacugggcugagaaacgugcccuccauucagucaaggggauuguuuggcgcgauagccggcuucaucgaagggggauggacagguauggucgacggcugguauggguaccaucaccagaaugaacaaggaaguggcuacgcagcugaucucaaaagcacccagcacgccauugacgagaucacgaacaaggugaauaguguuauagagaaaaugaacacccaguuuacagcuguggguaaggaguucaaucaucuggaaaagcggauugaaaacuuaaauaaaaaggucgaugacggguuccuggauaucuggacuuauaacgccgagcuccuugugcuguuggaaaaugagcgcacccuagacuaccacgauucuaacguaaagaaucuguaugagaagguucgaagccagcucaaaaacaacgcaaaggaaaucggcaauggauguuuugaguucuaccauaagugcgacaacacauguauggaaucagugaaaaauggcacuuaugauuacccuaaguauagugaggaagccaaacugaacagagaggagauugacggggucaaacuugaauccaccaggaucuaccaaauucuggcuauauacagcacaguggcgucuucauugguccucgugguuagucugggagcaaucagcuuuuggaugugcuccaaugguucuuuacagugccggauuuguaucuga

SEQ ID NO: 137022 - RNA, 1701 nt, Artificial Sequence; identical to SEQ ID NO: 130717
  derived and/or modified CDS sequence (opt3) from hemagglutinin__InfluenzaA__AFK14571

SEQ ID NO: 137023 - RNA, 1701 nt, Artificial Sequence; identical to SEQ ID NO: 135226
  derived and/or modified CDS sequence (opt3) from hemagglutinin__InfluenzaA__AFK14586

SEQ ID NO: 137024 - RNA, 1701 nt, Artificial Sequence
  derived and/or modified CDS sequence (opt3) from hemagglutinin__InfluenzaA__AFK14595
augaaggccauccuggugguccuccuuuacaccuucgcuacagcaaacgccgacacucugugcauuggcuaucacgcgaauaacagcacggauaccguugacacaguguuggagaaaaauguaacugugacccauuccgucaacuuacuggaagauaagcacaaugggaaacuauguaagcucaaaggaguggcuccccugcaucuugguaagugcaacauagccggcuggauccuggggaauccuaagugugagucuuugucaacagcaaguagcugguccuacauuggagaaaccucuucgucaaacaauggcacuugcuauccagguaacuuuaucgacuucgaggaacucaaaaagcagcugagcaguguuuccucuuuugagagauucgagauuuuuccgaaaacaagcuccuggcccaaucacgauucaaacaagggggugaccgccgcuuguccucaugcaggagccaaaaguuucuacaagaaucugaucuggcucgucaagaaaggcaacagcuauccaaaguuaucuaaauccuacauaaaugacaagggcaaagaagugcugguacuuugggggauccaccaccccucaacgagcgcugaucaacagaguuuguaucagaacgccgacgcguacguuuuugugggaacuucuagguacuccaagaaauucaagccugagauugcaauccggccaaagguccgcgaucaggaaggucgaaugaacuauuacuggacccugguggagcccggcgacaaaauuacauuugaggccacugggaaucuaguggucccucguuaugcuuucgccauggaaagaaacgcaggaagcggcaucauaauuucggauaccccaguucaugacugcaauacaaccugucaaacgccgaagggugcuaucaacacuucucuccccuuucagaauauucacccuaucacaaucgggaaaugcccaaaguacgugaaauccaccaagcugaggcuugccacuggacugcggaacguacccucaauucagagucgcggcuuguucggcgcgauagccggguuuaucgagggagguuggacaggcaugguggaugggugguauggauaccaucaccagaaugaacaaggcagcgguuaugcagcugaccucaaguccacccagaacgccauugacgagaucacgaauaaagucaacucugugauagaaaagaugaauacccaguucacagcuguugggaaagaguucaaccaccuggagaagagaauugaaaauuuaaacaaaaagguggaugacggcuuucuggauaucuggacuuacaaugccgagcuccuuguccuguuggaaaacgagaggacccuagacuaccaugauagcaacgugaagaaucuguaugaaaaaguacggucacagcucaagaacaaugcaaaagagaucggaaacggcuguuucgaguuuuaccacaagugcgacaauacauguauggaaaguguuaaaaacgggacuuaugauuacccuaaguauuccgaggaagccaagcugaaucgcgaggaaauugacggagugaaacuugagagcacccgaaucuaccaaauucuggcuauauauucuacagucgcgucaaguuuggugcucgucgugagccugggugcaaucuccuucuggaugugcucuaacggcucguuacagugcagaauuuguaucuga

SEQ ID NO: 137025 - RNA, 1701 nt, Artificial Sequence; identical to SEQ ID NO: 135226
  derived and/or modified CDS sequence (opt3) from hemagglutinin__InfluenzaA__AFK14612

SEQ ID NO: 137026 - RNA, 1701 nt, Artificial Sequence; identical to SEQ ID NO: 130717
  derived and/or modified CDS sequence (opt3) from hemagglutinin__InfluenzaA__AFK14621

SEQ ID NO: 137027 - RNA, 1701 nt, Artificial Sequence
  derived and/or modified CDS sequence (opt3) from hemagglutinin__InfluenzaA__AFK14630
augaaggccauccuggugguccuccuuuacaccuucgcuacagcaaacgccgacacucugugcauuggcuaucacgcgaauaacagcacggauaccguugacacaguguuggagaaaaauguaacugugacccauuccgucaacuuacuggaagauaagcacaaugggaaacuauguaagcucagaggaguggcuccccugcaucuugguaaaugcaacauagccggcuggauccuggggaauccugagugugaaucuuugucaacagcaaguagcugguccuacauuguugagaccucuucgucagacaacggaacuugcuauccaggcgauuuuaucgacuacgaggagcucagggagcagcugagcaguguguccucuuucgaacgguuugagauuuucccgaagacaagcuccuggcccaaucacgauucaaacaagggugucaccgccgcuuguccucaugcaggggccaaaaguuuuuauaagaaucugaucuggcucgugaaaaagggaaacagcuacccaaaauuaucuaaguccuauauaaaugacaagggcaaagaaguacugguucuuuggggcauccaccaccccucaacgcgcgcugauuugcaaagcauuaaccagaaugccgacgcguacguguucgucgggacuucccgauacucuaagaaauuuaagccugagaucgcaauucguccaaaagugagagaucaggagggaaggaugaacuauuacuggacccugguggaacccggugacaagaucacauucgaggccacuggcaaccuagucguuccucgguaugcuuuugccauggaacgcaaugcaggguccggaauaauuaucagcgauaccccagugcaugacugcaacacaaccugucagacgccgaaaggcgcuauuaauacuucgcuccccuuccaaaacauccacccuaucacaauugguaagugcccaaaguacguaaaaucuaccaagcugagacuugccacugggcugaggaaugugcccuccauacagucacggggauuguuuggcgcgaucgccggcuucauugaagggggauggacagguauggucgacggcugguauggguaccaucaccagaacgaacagggaaguggcuaugcagcugaucucaaaagcacccaaaaugccaucgacgagauaacgaacaaggugaauaguguuauugagaaaaugaacacccaguuuacagcuguggguaaggaguucaaucaccuggaaaagcgcaucgaaaacuuaaauaaaaaggucgaugacggguuccuggauaucuggacuuacaacgccgagcuccuugugcuguuggaaaaugagcgaacccuagacuaccaugauucuaacguaaagaaccuguaugagaagguuagaagccagcucaaaaauaacgcaaaggaaauuggcaauggauguuuugaguucuaccacaagugcgacaacacauguauggaaucagugaaaaauggcacuuaugauuacccuaaguauagugaggaagccaaacugaacagggaggagaucgacggggucaaacuugaauccacccggauuuaccagauacuggcuaucuauagcacaguggcgucuucauugguccucgugguuagucugggagcaauuagcuuuuggaugugcuccaaugguucuuuacaaugccguaucuguaucuga

SEQ ID NO: 137028 - RNA, 1701 nt, Artificial Sequence
  derived and/or modified CDS sequence (opt3) from hemagglutinin__InfluenzaA__AFK14639
augaaggccauccuggugguccuccuuuacaccuucgcuacagcaaacgccgacacucugugcauuggcuaucacgcgaauaacagcacggauaccguugacacaguguuggagaaaaauguaacugugacccauuccgucaacauauuagaagauaagcacaaugggaaacuguguaagcuaagaggaguggcuccccuccaucuggguaaaugcaacaucgccggcuggauucuugggaauccugagugugaaucucugucaacagcaaguagcugguccuacaucguugagaccucuucgucagacaacggaacuugcuauccaggcgauuuuauugacuacgaagaguugagggagcagcucagcaguguguccucuuucgaacgguuugagaucuucccgaagacaagcuccuggcccaaucacgauucaaacaagggugucaccgccgcuuguccucaugcaggggccaaaaguuuuuauaagaaucugauauggcuggugaaaaagggaaacagcuacccaaaacucucuaaguccuauaucaaugacaagggcaaagaaguauuaguucuguggggcauucaccaccccucaacgagcgcugaucaacagagucuuuaccagaacgccgacgcguacguguucgucgggucuucccgcuauagcaagaaauuuaagccugagaucgcaauucgaccaaaagugcgugaucaggagggaagaaugaauuacuauuggacuuugguggaacccggugacaagaucaccuucgaggccacaggcaaccuggucguuccuagguacgcuuuugccauggaacggaacgcagggucgggaauaauuaucucugauacuccagugcaugacugcaauaccacaugucaaaccccgaaaggcgcuauuaacacgucccuacccuuccagaauauccacccuaucacuauugguaagugcccaaaguauguaaaaucaacaaagcuccgccuggccaccgggcuuagaaacgugcccaguauacagagcaggggacuguuuggcgcgaucgccggcuucauugaagggggauggacugguauggucgacggcugguacggguaucaucaccagaaugaacaaggauccggcuacgcagcugauuugaaaucuacacagaacgccaucgacgagauaaccaauaaggugaacagcguuauugagaaaaugaauacgcaguuuaccgcuguggguaaggaguucaaccaccucgagaagcggaucgaaaaucugaacaaaaaggucgaugacggguucuuagauaucuggacauacaaugccgagcugcucgugcuucuggaaaacgagcgcacuuuggacuaucaugauucaaauguuaaaaaccuauacgagaagguacgaggccagcugaaaaacaaugcaaaggaaauuggaaacggcuguuuugaguucuaucacaagugcgacaauaccuguauggaaagugugaaaaacgggacauacgauuauccuaaguacuccgaggaagccaaacucaauagagaggagaucgacggagucaagcuggaaagcacuaggauuuaucaaauacuugcuaucuacucuaccguggcgucaagucuggucuuggugguuagccucggugcaauuuccuuuuggaugugcucuaacggcucgcugcagugccggaucuguaucuga

SEQ ID NO: 137029 - RNA, 1701 nt, Artificial Sequence; identical to SEQ ID NO: 130717
  derived and/or modified CDS sequence (opt3) from hemagglutinin__InfluenzaA__AFK14661

SEQ ID NO: 137030 - RNA, 1701 nt, Artificial Sequence; identical to SEQ ID NO: 135226
  derived and/or modified CDS sequence (opt3) from hemagglutinin__InfluenzaA__AFK14670

SEQ ID NO: 137031 - RNA, 1701 nt, Artificial Sequence; identical to SEQ ID NO: 135226
  derived and/or modified CDS sequence (opt3) from hemagglutinin__InfluenzaA__AFK14678

SEQ ID NO: 137032 - RNA, 1701 nt, Artificial Sequence
  derived and/or modified CDS sequence (opt3) from hemagglutinin__InfluenzaA__AFK14688
augaaggccauccuggugguccuccuuuacaccuucgcuacagcaaacgccgacacucugugcauuggcuaucacgcgaauaacagcacggauaccguugacacaguguuggagaaaaauguaacugugacccauuccgucaacuuacuggaagauaagcacaaugggaaacuauguaagcucagaggaguggcuccccugcaucuugguaaaugcaacauagccggcuggauccuggggaauccugagugugaaucuuugucaacagcaaguagcugguccuacauuguugagaccucuucgucagacaacggaacuugcuauccaggcgauuuuauccacgacgaggagcucaggaagcagcugagcaguguguccucuuucgagcgguuugaaauuuucccgaagacaagcuccuggcccaaucaugauucaaacaaaggugucaccgccgcuuguccucacgcaggggccaagaguuuuuacaaaaaucugaucuggcucgugaagaaaggaaacagcuauccaaaguuaucuaaguccuacauaaaugacaaaggcaaggagguacugguucuuuggggcauccaccaucccucaacgagcgcugaucaacagaguuuguaucagaacgccgacgcguacguguucgucgggacuucucgcuacuccaaaaaguuuaaaccugaaauugcaauccgaccaaaggugcgugaucaggagggaagaaugaauuauuacuggacccugguggagcccggugacaaaauuacauucgaagccacuggcaaccuagucguuccuagguaugcuuuugccauggagcggaaggcagggagcggaaucauaauucucgauaccccagugcacgacuggaacacaaccugcgaaacgccgaagggcgcuguaaauacuucgcugcccuuccaaaacauccauccuauuacaaucgguaaauguccaaaguacgugaaaucuaccaagcugcgccuugccacuggguugagaaauguccccuccauccagucaaggggacucuuuggcgcgauugccggcuucauagaagggggauggacagguaugguggacggcugguauggguaccaccaccagaacgaacagggaaguggcuaugcagcugaucugaaaagcacccaaaaugccaucgacgagauuacgaacaagguuaauuccgugaucgagaagaugaacacccaguuuacagcugucgguaaagaguucaaucauuuagaaaagcggauagaaaaccugaauaaaaagguggaugacggguuccucgauauuuggacuuacaacgccgagcuucugguauugcuagaaaaugagcgcacccuggacuaccacgauucuaacguuaaaaaucucuaugagaaggugcgaagccagcugaagaacaacgcaaaagaaaucggcaauggaugcuuugaguucuaccauaagugugacaacacaugcauggaaucagucaaaaauggcacuuaugauuacccuaaguauagugaggaagccaaacuuaacagagaggagaucgacggggugaagcuggaauccaccaggauuuaccagaucuuggcuauuuauagcacagucgcgucuucacucgugcugguugugaguuuaggagcaaucagcuuuuggauguguuccaaugguucucugcaaugccggauaugcauuuga

SEQ ID NO: 137033 - RNA, 1701 nt, Artificial Sequence; identical to SEQ ID NO: 135226
  derived and/or modified CDS sequence (opt3) from hemagglutinin__InfluenzaA__AFK14697

SEQ ID NO: 137034 - RNA, 1701 nt, Artificial Sequence; identical to SEQ ID NO: 135226
  derived and/or modified CDS sequence (opt3) from hemagglutinin__InfluenzaA__AFK14713

SEQ ID NO: 137035 - RNA, 1701 nt, Artificial Sequence; identical to SEQ ID NO: 135226
  derived and/or modified CDS sequence (opt3) from hemagglutinin__InfluenzaA__AFK14722

SEQ ID NO: 137036 - RNA, 1701 nt, Artificial Sequence
  derived and/or modified CDS sequence (opt3) from hemagglutinin__InfluenzaA__AFK14731
augaaggccauccuggugguccuccuuuacaccuucgcuacagcaaacgccgacacucugugcauuggcuaucacgcgaauaacagcacggauaccguugacacaguguuggagaaaaauguaacugugacccauuccgucaacuuacuggaagauaagcacaaugggaaacuauguaagcucagaggaguggcuccccugcaucuugguaaaugcaacauagccggcuggauccuggggaauccugagugugaaucuuugucaacagcaaguagcugguccuacauuguugagaccucuucgucagacaacggaacuugcuauccaggcgauuuuaucgacuacgaggaacucaggaagcagcugagcaguguguccucuuucgagcgggucgaaauuuuuccgaagacaagcuccuggcccaaucacgauucaaacaaaggugugaccgccgcuuguccucaugcaggggccaagaguuucuauaaaaaucugaucuggcucguaaagaaaggaaacagcuacccaaaguuaucuaaguccuauauaaaugacaaaggcaaggagguucuggugcuuuggggcauccaccaccccucaacgagcgcugaucaacagaguuuguaccagaacgccgacgcguacgucuuuguggggacuucucgcuauuccaaaaaguucaaaccugaaauugcaauccgaccaaaggugcgugaucaggagggaagaaugaauuacuauuggacccuggucgagcccggugacaaaauuacauuugaagccacuggcaaccuaguugugccuagguacgcuuucgccauggagcggaacgcagggagcggaaucauaauuucggauaccccaguacaugacugcaauacaaccugucaaacgccgaagggcgcugugaacacuucucuccccuuucagaauauccacccuauuacaaucgguaagugcccaaaauaugucaaguccaccaaacugcgccuugccacugggcugagaaacgugcccucaauccagaguaggggauuguucggcgcgauugccggcuuuauagaagggggauggacagguaugguugacggcugguacggguaucaucaccagaaugagcaaggaagcggcuacgcagcugaucucaaguccacccagaacgccaucgacgaaauuacgaauaaagugaacucugucaucgagaagaugaauacccaguucacagcuguggguaaggaguuuaaccaccuggaaaaacggauagagaauuuaaacaagaaaguagaugacggguuccuggauauuuggacuuacaaugccgaacuccuuguucuguuggagaacgaacgcacccuagacuaucaugauagcaaugugaagaaccuguacgagaaaguccgaucacagcucaagaacaaugcaaaggagaucggcaacggauguuucgaauuuuaucacaaaugcgacaauacauguauggagagugugaagaacggcacuuacgauuauccuaaauacuccgaagaggccaagcugaauagagaagagaucgacggggucaaacuugagagcaccaggauuuaucaaauccuggcuauuuacucuacaguggcgucaaguuugguucucgugguaagccugggagcaauauccuucuggaugugcucuaacgguucguuacagugccggaucuguauuuga

SEQ ID NO: 137037 - RNA, 1701 nt, Artificial Sequence; identical to SEQ ID NO: 135226
  derived and/or modified CDS sequence (opt3) from hemagglutinin__InfluenzaA__AFK14740

SEQ ID NO: 137038 - RNA, 1701 nt, Artificial Sequence; identical to SEQ ID NO: 135226
  derived and/or modified CDS sequence (opt3) from hemagglutinin__InfluenzaA__AFK14749

SEQ ID NO: 137039 - RNA, 1701 nt, Artificial Sequence; identical to SEQ ID NO: 135226
  derived and/or modified CDS sequence (opt3) from hemagglutinin__InfluenzaA__AFK14756

SEQ ID NO: 137040 - RNA, 1701 nt, Artificial Sequence; identical to SEQ ID NO: 135226
  derived and/or modified CDS sequence (opt3) from hemagglutinin__InfluenzaA__AFK14764

SEQ ID NO: 137041 - RNA, 1701 nt, Artificial Sequence
  derived and/or modified CDS sequence (opt3) from hemagglutinin__InfluenzaA__AFK14779
augaaggccauccuggugguccuccuuuacaccuucgcuacagcaaacgccgacacucugugcauuggcuaucacgcgaauaacagcacggauaccguugacacaguguuggagaagaauguaacugugacccauuccgucaacuuacuggaagauaagcacaaugggaaacuauguaagcucggagguguggcuccccugcaucuuggcaaaugcaacauagccggguggauccugggaaauccugagugugaaucuuugucaacagcaaguagcugguccuacauuguugagaccucuucgucagacaacggcacuugcuauccagguaauuuuaucgauuacgaagaacucagagagcagcugagcaguguguccucuuucgaaagguuugagauuuucccgaagacaagcuccuggcccaaccacgacucaaauaagggggucaccgccgcuuguccucaugcaggagccaaaaguuuuuauaagaaccugaucuggcucgugaaaaagggcaauagcuacccaaaauuaucuaaguccuauauaaacgauaagggcaaagaaguacugguucuuugggggauccaccaccccucaacgagcgcugaccaacagaguuuguaccagaaugccgaugcguacguguucgucggaacuucucgguauuccaagaaauuuaagccugagauugcaauccgcccaaaagugcgagaccaggagggucguaugaacuacuauuggacccugguggaacccggcgauaagauuacauucgaggccacugggaaccuagucguuccuagauacgcuuuugccauggaaaggaaugcaggaagcggcaucauaauuucggacaccccagugcaugauugcaacacaaccugucaaacgccgaaaggugcuaucaauacuucucuccccuuccagaacauucacccuaucacaaucgggaagugcccaaaguauguaaaauccaccaagcugcggcuugccacuggacugcgcaaugugcccucaauucagaguagaggcuuguuuggcgcgauagccggguucaucgagggagguuggacaggcauggucgacgggugguacggauaucaucaccagaacgaacaaggcagcgguuacgcagcugaccucaaauccacccagaaugccauugaugagaucacgaacaagguaaauucuguuauagagaaaaugaacacccaguuuacagcuguggggaaggaguucaaucaccuggagaagaggauugaaaacuuaaauaaaaaggucgacgauggcuuccuggacaucuggacuuacaacgccgagcuccuugugcuguuggaaaaugagcggacccuagauuaucaugacagcaacgugaaaaaccuguacgagaagguucgcucacagcucaaaaauaacgcaaaggaaaucggaaauggcuguuuugaguucuaucacaagugcgauaacacauguauggaaagugugaaaaaugggacuuacgacuauccuaaguacuccgaggaagccaaacugaaccgagaggagauugauggagucaaacuugaaagcaccagaaucuaucaaauucuggcuauauacucuacaguggcgucaaguuugguccucgugguuagccugggugcaaucuccuuuuggaugugcucuaauggcucguuacagugcaggauuuguaucuga

SEQ ID NO: 137042 - RNA, 1701 nt, Artificial Sequence
  derived and/or modified CDS sequence (opt3) from hemagglutinin__InfluenzaA__AFK14788
augaaggccauccuggugguccuccuuuacaccuucgcuacagcaaacgccgacacucugugcauuggcuaucacgcgaauaacagcacggauaccguugacacaguguuggagaaaaauguaacugugacccauuccgucaacauauuagaagauaagcacaaugggaaacuguguaagcuaagaggaguggcuccccuccaucuggguaaaugcaacaucgccggcuggauucuugggaauccugagugugaaucucugucaacagcaaguagcugguccuacaucguugagaccucuucgucagacaacggaacuugcuauccaggcgauuuuauugacuacgaagaguugagggagcagcucagcaguguguccucuuucgaacgguuugagaucuucccgaagacaagcuccuggcccaaucacgauucaaacaagggugucaccgccgcuuguccucaugcaggggccaaaaguuuuuauaagaaucugauauggcuggugaaaaagggaaacagcuacccaaaacuccgcaagucuuauaucaaugacaagggcaaagaaguauuaguucuguggggcauucaccaccccuccacgucagcugaucaacagagccuuuaccagaacgccgacgcguacguguucgucgggaguucucgauauuccaagaaauuuaagccugagaucgcaauucguccaaaagugagagaucaggagggaaggaugaauuacuauuggacuuugguggaacccggugacaagaucaccuucgaggccacaggcaaccuggucguuccucgguacgcuuuugccauggaacgcaacgcagggagcggaauaauuaucucggauacuccagugcaugacugcaauaccacaugucaaaccccgaaaggcgcuauuaacacgucucuacccuuccagaauauccacccuaucacuauugguaagugcccaaaguauguaaaauccacaaagcucagacuggccaccgggcuuaggaacgugcccucaauacagagucggggacuguuuggcgcgaucgccggcuucauugaagggggauggacugguauggucgacggcugguacggguaucaucaccagaaugaacaaggaagcggcuacgcagcugauuugaaauccacacagaacgccaucgacgagauaaccaauaaggugaacucuguuauugagaaaaugaauacgcaguuuaccgcuguggguaaggaguucaaccaccucgagaagcgcaucgaaaaucugaacaaaaaggucgaugacggguucuuagauaucuggacauacaaugccgagcugcucgugcuucuggaaaacgagcgaacuuuggacuaucaugauagcaauguuaaaaaccuauacgagaagguaagaucacagcugaaaaacaaugcaaaggaagugggcaacggauguuuugaguucuaucacaagugcgacaauaccuguauggaaagugucaaaaacggcacauacgauuauccuaaguacuccgaggaagccaaacucaauagggaggagauugacggggugaagcuggaaagcacucggaucuaucaaauucuugcuauauacucuaccgcggcaucaagucuggucuuggugguuagccucggagccaucuccuuuuggaugugcucuaacgguucgcugcagugccguauuuguaucuga

SEQ ID NO: 137043 - RNA, 1701 nt, Artificial Sequence
  derived and/or modified CDS sequence (opt3) from hemagglutinin__InfluenzaA__AFK14798
augaaggccauccuggugguccuccuuuacaccuucgcuacagcaaacgccgacacucugugcauuggcuaucacgcgaauaacagcacggauaccguugacacaguguuggagaaaaauguaacugugacccauuccgucaacuuacuggaagauaagcacaaugggaaacuauguaagcucagaggaguggcuccccugcaucuugguaaaugcaacauagccggcuggauccuggggaauccugagugugaaucuuugucaacagcaaguagcugguccuacauuguugagaccucuucgucagacaacggaacuugcuauccaggcgauuuuaucaauuacgaggaacucaggaagcagcugagcaguguguccucuuucgagcgggucgaaauuuuuccgaagacaagcuccuggcccaaccacgacucaaauaaaggugugaccgccgcuuguccucaugcaggggccaagaguuucuauaaaaaccugaucuggcucguaaagaaaggaaauagcuacccaaaguuaucuaaguccuauauaaacgauaaaggcaaggagguucuggugcuuuggggcauccaccaccccucaacgagcgcugaccaacagaguuuguaccagaaugccgaugcguacgucuuuguggggacuucucgcuauuccaaaaaguucaaaccugaaauugcaauccgaccaaaggugcgugaccaggagggaagaaugaacuacuauuggacccuggucgagcccggugauaaaauuacauuugaagccacuggcaaccuaguugugccuagguacgcuuucgccauggagcggaaugcagggagcggaaucauaauuucggacaccccaguacaugauugcaacacaaccugucaaacgccgaauggcgcuaucaacacuucucuccccuuucagaauauucacccuaucacaaucgguaagugcccaaaguaugugaaauccaccaagcugcgccuugccacugggcugagaaacguccccucaauucagaguaggggauuguucggcgcgauagccggcuuuaucgaagggggauggacagguaugguggacggcugguacggguaucaucaccagaaugagcaaggaagcggcuacgcagcugaccucaaauccacccagaacgccauugauaagaucacgaauaaaguuaacucugugauagaaaagaugaauacccaguucacagcugucgguaaggaguuuaaccaccuggagaaacggauugaaaauuuaaacaagaaaguggacgauggguuccuggacaucuggacuuacaaugccgagcuccuuguacuguuggaaaacgagcgcacccuagauuaucaugacagcaacguuaagaaucuguacgaaaaagugcgaucacagcucaagaacaaugcaaaggagaucggcaacggauguuucgaguuuuaucacaaaugcgauaauacauguauggaaagugucaagaacggcacuuacgacuauccuaaauacuccgaggaagccaagcugaauagagaggaaauugauggggugaaacuugagagcaccaggaucuaucaaauucuggcuauauacucuacagucgcgucaaguuuggugcucguugugagccugggagcaaucuccuucuggaugugcucuaacgguucguuacagugccggauuuguaucuga

SEQ ID NO: 137044 - RNA, 1701 nt, Artificial Sequence
  derived and/or modified CDS sequence (opt3) from hemagglutinin__InfluenzaA__AFK14814
augaaggccauccuggugguccuccuuuacaccuucgcuacagcaaacgccgacacucugugcauuggcuaucacgcgaauaacagcacggauaccguugacacaguguuggagaaaaauguaacugugacccauuccgucaacuuacuggaagauaagcacaaugggaaacuauguaagcucagaggaguggcuccccugcaucuugguaaaugcaacauagccggcuggauccuggggaauccugagugugaaucuuugucaacagcaaguagcugguccuacauuguugagaccucuucgucagacaacggaacuugcuauccaggcgauuuuaucgacuacgaagaacucagggagcagcugagcaguguguccucuuaugaacgguacgagauuuucccgaagacaagcuccuggcccaaucacgauucaaacaagggugucaccgccgcuuguccucaugcaggggccaaaaguuuuuauaagaaucugaucuggcucgugaaaaagggaaacagcuacccaaaauuaucuaaguccuacauaaaugacaagggcaaagaaguacugguucuuuggggcauccaccaccccucaacgagcgcugaucaacagaguuuguaucagaacgccgacgcguacguguucgucgggacuucucgcuauuccaagaaauuuaagccugagauugcaauccgaccaaaagugcgugagcaggaaggaagaaugaauuacuauuggacccugguggagcccggugauaagauuacauucgaagccacuggcaaccuagucguuccuagguacgcuuuugccauggagcggaacgcagggagcggaaucauaauuucggacaccccagugcaugauugcaauacaaccugucaaacgccgaaaggcgcuaucaacacuucucuccccuuccagaauauucacccuaucacaaucgguaagugcccaaaguauguaaaauccaccaagcugcgccuugccacugggcugagaaacgugcccucaauucagaguaggggauuguuuggcgcgauagccggcuucaucgaagggggauggacagguauggucgacggcugguacggguaccaucaccagaaugagcaaggaagcggcuaugcagcugaccucaaauccacccagaacgccauugaugagaucacgaauaaggugaacucuguuauagaaaagaugaauacccaguuuacagcuguggguaaggaguucaaccaccuggaaaagcggauugagaauuuaaacaaaaaggucgacgauggguuucuggacaucuggacuuacaaugccgaacuccuugugcuguuggagaacgagcgcacccuagauuaucaugacagcaauguuaaaaaccuguacgaaaagguacgaucacagcucaaaaacaaugcaaaggagaucggcaacggauguuucgaguucuaucacaagugcgauaauacauguauggagagugugaaaaacggcacuuacgacuauccuaaguacuccgaagaggccaaacugaauagagaggaaauugauggggucaaacuugagagcaccaggaucuaccaaauucuggcuauauauucuacaguggcgucaaguuugguccucgugguuagccugggagcaaucuccuuuuggaugugcucuaacgguucguuacagugccggauuuguaucuga

SEQ ID NO: 137045 - RNA, 1701 nt, Artificial Sequence
  derived and/or modified CDS sequence (opt3) from hemagglutinin__InfluenzaA__AFK14831
augaaggccauccuggugguccuccuuuacaccuucgcuacagcaaacgccgacacucugugcauuggcuaucacgcgaauaacagcacggauaccguugacacaguguuggagaaaaauguaacugugacccauuccgucaacuuacuggaagauaagcacaaugggaaacuauguaagcucagaggaguggcuccccugcaucuugguaaaugcaacauagccggcuggauccuggggaauccugagugugaaucuuugucaacagcaaguagcugguccuacauuguugagaccucuucgucagacaacggaacuugcuauccaggcgauuuuagcgacuacgaggagcucagggagcagcugaguuccgugucuagcuucgaacgguuugagaucuucccgaagacauccucauggcccaaucacgauaguaacaagggugucaccgccgcuuguccucaugcaggggccaagagcuuuuauaagaaucugauuuggcucgugaaaaagggaaacucuuacccaaaauuauccaagucauauaucaaugacaagggcaaagaaguacugguucuuuggggcauacaccaccccagcacgagugcugaucaacagucuuuguaccagaacgccgacgcguacguguucgucgggacuucccgcuauagcaagaaauuuaagccugagaucgcaauucgaccaaaagugcgugaucaggagggaagaaugaauuacuauuggacccugguggaacccggugacaagaucacauucgaggccacuggcaaccuagucguuccuagguacgcuuuugccauggaacggaacgcagggucgggaauuaucauaucugauaccccagugcaugacugcaauacaaccugucaaacgccgaaaggcgcuauuaacacuucccuccccuuccagaauauccacccuauuacaaucgguaagugcccaaaguauguaaaaucaaccaagcugcgccuugccacugggcugagaaacgugcccaguauccagagcaggggauuguuuggcgcgauugccggcuucauagaagggggauggacagguauggucgacggcugguacggguaucaucaccagaaugaacaaggauccggcuacgcagcugaucucaaaucuacccagaacgccaucgacgagauuacgaauaaggugaacagcguuaucgagaaaaugaauacccaguuuacagcuguggguaaggaguucaaccaccuggaaaagcggauagaaaauuuaaacaaaaaggucgaugacggguuccuggauauuuggacuuacaaugccgagcuccuugugcuguuggaaaacgagcgcacccuagacuaucaugauucaaauguuaaaaaccuguacgagaagguacgaagucagcucaaaaacaaugcaaaggaaaucggcaacggauguuuugaguucuaucacaagugcgacaauacauguauggaauccgugaaaaacggcacuuacgauuauccuaaguacagcgaggaagccaaacugaauagagaggagaucgacggggucaaacuugaaucuaccaggauuuaucaaauccuggcuauuuacucaacaguggcgaguagcuugguccucgugguuucccugggagcaauaucuuuuuggaugugcucgaacgguagcuuacagugccggaucuguauuuga

SEQ ID NO: 137046 - RNA, 1701 nt, Artificial Sequence; identical to SEQ ID NO: 130717
  derived and/or modified CDS sequence (opt3) from hemagglutinin__InfluenzaA__AFK14839

SEQ ID NO: 137047 - RNA, 1701 nt, Artificial Sequence
  derived and/or modified CDS sequence (opt3) from hemagglutinin__InfluenzaA__AFK14847
augaaggccauccuggugguccuccuuuacaccuucgcuacagcaaacgccgacacucugugcauuggcuaucacgcgaauaacagcacggauaccguugacacaguguuggagaagaauguaacugugacccauuccgucaacuuacuggaagauaagcacaaugggaaacuauguaagcucagaggaguggcuccccugcaucuugguaaaugcaacauagccggcuggauccuggggaauccugagugugaaucuuugucaacagcaaguagcugguccuacauuguugagaccucuucgucagacaacggaacuugcuauccaggcgauuuuaucgacuacgaggagcucagggagcagcugagcagugccuccucuuucgaacgguaugagauuuuuccgaagacaagcuccuggcccaaucacgauucaaacaagggugugaccgcugcauguccucaugccggggcuaaaaguuucuacaagaaucugaucuggcucgucaaaaagggaaacagcuauccaaaauuaucuaaguccuacauaaaugacaagggcaaagaagugcugguacuuuggggcauccaccaccccucaacgagcgccgaucaacagaguuuguaccagaacgcggacgcauauguuuuuguggggacuucucgcuacuccaagaaauucaagccugagauugccauccgaccaaaaguccgugaucaggagggaagaaugaauuauuacuggacccugguggaacccggugacaagauuacauuugaggcuacuggcaaccuaguggucccuagguaugccuucgcaauggaacggaacgcugggagcggaaucauaauuucggauaccccaguucaugacugcaauacaaccugucaaacgccgaaaggcgccaucaacacuucucuccccuuucagaauauucacccuaucacaaucgguaagugcccaaaguacgugaaauccaccaagcugcgccuugcgacugggcugagaaacguacccucaauucagaguaggggauuguucggcgccauagcaggcuuuaucgaagggggauggacagguaugguggacggcugguauggguaccaucaccagaaugaacaaggaagcggcuacgcugccgaucucaaauccacccagaacgcuauugacgagaucacgaauaaggucaacucugugauagagaaaaugaauacccaguucacagccguugguaaggaauuuaaccaccuggagaagcggauugaaaauuuaaacaaaaagguggaugacggguuccuggauaucuggacuuauaaugcagagcuccuuguccuguuggaaaacgagcgcacccuagacuaccaugauagcaaugugaaaaaccuguaugagaagguacgaucacagcucaaaaacaaugccaaggaaaucggcaacggauguuucgaguuuuaccacaagugcgacaauacauguauggaaaguguuaaaaacggcacuuaugauuacccuaaguauuccgaggaagcuaaacugaauagagaggagauugacggggugaaacuugaaagcaccaggaucuaccaaauucuggcgauauacucuacagucgcaucaaguuuggugcucgucgugagccugggagccaucuccuucuggaugugcucuaacgguucguuacagugccggauuuguaucuga

SEQ ID NO: 137048 - RNA, 1701 nt, Artificial Sequence; identical to SEQ ID NO: 135226
  derived and/or modified CDS sequence (opt3) from hemagglutinin__InfluenzaA__AFK14868

SEQ ID NO: 137049 - RNA, 1701 nt, Artificial Sequence; identical to SEQ ID NO: 131881
  derived and/or modified CDS sequence (opt3) from hemagglutinin__InfluenzaA__AFK14884

SEQ ID NO: 137050 - RNA, 1701 nt, Artificial Sequence; identical to SEQ ID NO: 131881
  derived and/or modified CDS sequence (opt3) from hemagglutinin__InfluenzaA__AFK14892

SEQ ID NO: 137051 - RNA, 1701 nt, Artificial Sequence; identical to SEQ ID NO: 131881
  derived and/or modified CDS sequence (opt3) from hemagglutinin__InfluenzaA__AFK14901

SEQ ID NO: 137052 - RNA, 1701 nt, Artificial Sequence; identical to SEQ ID NO: 131881
  derived and/or modified CDS sequence (opt3) from hemagglutinin__InfluenzaA__AFK14910

SEQ ID NO: 137053 - RNA, 1701 nt, Artificial Sequence; identical to SEQ ID NO: 130717
  derived and/or modified CDS sequence (opt3) from hemagglutinin__InfluenzaA__AFK14919

SEQ ID NO: 137054 - RNA, 1701 nt, Artificial Sequence; identical to SEQ ID NO: 130717
  derived and/or modified CDS sequence (opt3) from hemagglutinin__InfluenzaA__AFK14929

SEQ ID NO: 137055 - RNA, 1701 nt, Artificial Sequence; identical to SEQ ID NO: 136234
  derived and/or modified CDS sequence (opt3) from hemagglutinin__InfluenzaA__AFK25599

SEQ ID NO: 137056 - RNA, 1701 nt, Artificial Sequence
  derived and/or modified CDS sequence (opt3) from hemagglutinin__InfluenzaA__AFK25601
augaaggccauccuggugguccuccuuuacaccuucgcuacagcaaacgccgacacucugugcauuggcuaucacgcgaauaacagcacggauaccguugacacaguguuggagaaaaauguaacugugacccauuccgucaacuuacuggaagauaagcacaaugggaaacuauguaagcucagaggaguggcuccccugcaucuugguaaaugcaacauagccggcuggauccuggggaauccugaguguguuacauugucuaccgcaucaaguuggagcuacauuguggaaacuuccucuucggacaacggaacaugcuauccaggcgauuuuaucgacuacgaggaacucagggagcagcugucaagcgucaguuccuucgagcgguuugaaauuuucccgaagaccucuagcuggcccaaucacgauuccaacaagggugugacggccgcuuguccucaugcaggggccaaaggauuuuauaagaaucugaucuggcucguuaaaaagggcaacucauacccaaaauuaaguaagagcuauauaaaugacaagggcaaagagguacuggugcuuugggggauccaccaccccucuacuaccgcugaucaacaguccuuguaccagaacgccgacacauacgucuucgugggaacuucacgcuauagcaagaaauuuaagccugaaauugcgauccgaccaaaagugcgugaucaggaggguagaaugaauuacuauuggacccuggucgagcccggcgacaagauuacauucgaagcaaccgggaaccuaguugugccuagguacgccuuugcuauggagcgggaugccggaaguggcaucauaauuucugacacgccaguacaugacugcaacacuacaugucaaaccccgaaaggugcaaucaauacuucccuccccuuccagaacauucacccuaucacaaucgggaagugcccaaaguaugugaaaagcaccaagcugcgccuugcuacgggacugagaaauguccccucgauucagucuaggggcuuguuuggcgccauagcgggguucaucgaaggagguuggaccggcaugguggaugggugguacggauaucaucaccagaacgagcaaggcuccgguuacgccgcagaccucaaaucaacacagaaugcuauugauaagaucacuaacaaaguuaauagugugauagaaaagaugaacacccaguuuacagccgucgggaaggaguucaaucaccuggagaaacggauugaaaacuuaaauaagaaaguggacgauggcuuccuggacaucuggacuuacaacgcugagcuccuuguacuguuggaaaaugagcgcacccuagauuaucaugacagcaacguuaagaaucuguacgaaaaagugcgaaaccagcucaagaacaaugccaaggagaucggaaacggcuguuuugaguucuaucacaaaugcgauaauacauguauggaauccgucaagaacgggaccuacgacuauccuaaauacucugaggaagcaaagcugaauagagaggaaauugauggagugaaacuugagagcacuaggaucuaucaaauucuggccauauacucaacggcugcgaguuccuugguccucgugguuagccugggugcaaucucuuuuuggaugugcucaaacggcaguuuacagugccggauuuguaucuga

SEQ ID NO: 137057 - RNA, 1701 nt, Artificial Sequence; identical to SEQ ID NO: 136234
  derived and/or modified CDS sequence (opt3) from hemagglutinin__InfluenzaA__AFK25603

SEQ ID NO: 137058 - RNA, 1701 nt, Artificial Sequence
  derived and/or modified CDS sequence (opt3) from hemagglutinin__InfluenzaA__AFK25605
augaaggccauccuggugguccuccuuuacaccuucgcuacagcaaacgccgacacucugugcauuggcuaucacgcgaauaacagcacggauaccguugacacaguguuggagaaaaauguaacugugacccauuccgucaacuuacuggaagauaagcacaaugggaaacuauguaagcucagaggaguggcuccccugcaucuugguaaaugcaacauagccggcuggauccuggggaauccugagugugaaacauugucuaccgcaucaaguuggagcuacauuguugagacuuccucuucggacaacggaacaugcuauccaggcgauuuuaucgacuacgaagaacucagggagcagcugucaagcgugaguuccuucgaacgguuugagauuuucccgaagaccucuagcuggcccaaucacgauuccaacaagggugucacggccgcuuguccucaugcaggggccaaaggauuuuauaagaaucugaucuggcucgugaaaaagggcaacucauacccaaaauuaaguaagagcuauauaaaugacaagggcaaagaaguacugguucuuugggggauccaccaccccucuacuaccgcugaucaacaguccuuguaccagaacgccgacacauacguguucgucggaacuucacgcuauagcaagaaauuuaagccugagauugcgauccgaccaaaagugcgugaucaggaggguagaaugaauuacuauuggacccugguggaacccggcgacaagauuacauucgaggcaaccgggaaccuagucguuccuagguacgccuuugcuauggaacgggaugccggaaguggcaucauaauuucugacacgccagugcaugacugcaacacuacaugucaaaccccgaaaggugcaaucaauacuucccuccccuuccagaacauucacccuaucacaaucgggaagugcccaaaguauguacgcagcaccaaacugagacuugcuacgggacugaggaaugugcccucgauucagucucggggcuuguuuggcgccauagcgggguucaucgagggagguuggaccggcauggucgaugggugguacggauaucaucaccagaacgaacaaggcuccgguuacgccgcagaccucaagucaacacagaaugcuauugauaaaaucacuaacaaggugaauaguguuauagagaaaaugaacacccaguuuacagccguggggaaggaguucaaucaccuggaaaagcgcauugagaacuuaaauaaaaaggucgacgauggcuuccuggacaucuggacuuacaacgcugaacuccuugugcuguuggagaaugaacgaacccuagauuaucaugacagcaacguaaagaaucuguacgagaagguuagaaaccagcucaaaaacaaugccaaggagaucggaaacggcuguuuugaguucuaucacaagugcgauaauacauguauggaguccgugaaaaacgggaccuacgacuauccuaaguacucugaagaggcaaaacugaauagggaagagauugauggagucaaacuugagagcacucggaucuaucaaauucuggccauauacucaacggcugcgaguuccuuggugcucgucgugagccugggugcaaucucuuuuuggaugugcucaaacggcaguuuacagugccguauuuguaucuga

SEQ ID NO: 137059 - RNA, 1701 nt, Artificial Sequence; identical to SEQ ID NO: 136462
  derived and/or modified CDS sequence (opt3) from hemagglutinin__InfluenzaA__AFK74526

SEQ ID NO: 137060 - RNA, 1701 nt, Artificial Sequence; identical to SEQ ID NO: 130717
  derived and/or modified CDS sequence (opt3) from hemagglutinin__InfluenzaA__AFK74534

SEQ ID NO: 137061 - RNA, 1701 nt, Artificial Sequence; identical to SEQ ID NO: 130717
  derived and/or modified CDS sequence (opt3) from hemagglutinin__InfluenzaA__AFK74544

SEQ ID NO: 137062 - RNA, 1701 nt, Artificial Sequence; identical to SEQ ID NO: 130717
  derived and/or modified CDS sequence (opt3) from hemagglutinin__InfluenzaA__AFK74554

SEQ ID NO: 137063 - RNA, 1701 nt, Artificial Sequence; identical to SEQ ID NO: 130959
  derived and/or modified CDS sequence (opt3) from hemagglutinin__InfluenzaA__AFK74564

SEQ ID NO: 137064 - RNA, 1701 nt, Artificial Sequence; identical to SEQ ID NO: 133272
  derived and/or modified CDS sequence (opt3) from hemagglutinin__InfluenzaA__AFK74575

SEQ ID NO: 137065 - RNA, 1701 nt, Artificial Sequence; identical to SEQ ID NO: 130704
  derived and/or modified CDS sequence (opt3) from hemagglutinin__InfluenzaA__AFK74585

SEQ ID NO: 137066 - RNA, 1701 nt, Artificial Sequence
  derived and/or modified CDS sequence (opt3) from hemagglutinin__InfluenzaA__AFK74595
augaaggccauccuggugguccuccuuuacaccuucgcuacagcaaacgccgacacucugugcauuggcuaucacgcgaauaacagcacggauaccguugacacaguguuggagaaaaauguaacugugacccauuccgucaacuuacuggaagauaagcacaaugggaaacuauguaagcucagaggaguggcuccccugcaucuugguaaaugcaacauagccggcuggauccuggggaauccugagugugaaucuuugucaacagcaaguagcugguccuacauuguugagaccucuucgucagacaacggaacuugcuauccaggcgauuuuaucgacuacgaggagcucagggagcagcugagcaguguguccucuuucgaacgguuugagauuuucccgaagacaagcuccuggcccaaucacgaucugaacaagggugucaccgccgcuuguccucaugcaggggccaaaucauuuuauaagaaucucaucugguuagugaaaaagggaaacaguuacccaaaacugagcaagucuuauauaaaugacaagggcaaagaaguacuuguuuuguggggcauccaccaccccuccacgucagcugaucaacagagccuguaccagaacgccgacgcguacguguucgucgggaccagucgcuauucuaagaaauuuaagccugagauugcaauccgaccaaaagugcgugaucaggagggaagaaugaauuacuauuggacucuaguggaacccggugacaagauuacauucgaggccacuggcaaccucgucguuccuagguacgcuuuugccauggaacggaacgcaggguccggaaucauaauuagcgauaccccagugcaugacugcaauacaaccugucaaacgccgaaaggcgcuaucaacacuucgcugcccuuccagaauauucacccuaucacaaucgguaagugcccaaaguauguaaaaucuaccaaacuucgccuggccacuggguugagaaacgugcccuccauucagucaaggggacucuuuggcgcgauagccggcuucaucgaagggggauggacagguauggucgacggcugguacggguaucaucaccagaaugaacaaggaaguggcuacgcagcugaucugaaaagcacccagaacgccauugacgagaucacgaauaaggugaacuccguuauagagaaaaugaauacccaguuuacagcuguggguaaggaguucaaccacuuagaaaagcggauugaaaaucugaacaaaaaggucgaugacggguuccucgauaucuggacuuacaaugccgagcuucugguguugcuagaaaacgagcgcacccuggacuaucaugauucuaauguaaagaaccucuacgagaagguucgaagccagcugaaaaacaaugcaaaggaaaucggcaacggauguuuugaguucuaucacaagugcgacaauacauguauggaaucagugaaaaacggcacuuacgauuauccuaaguacagugaggaagccaaacuuaauagagaggagauugacggggucaagcuggaauccaccaggaucuaucaaauuuuggcuauauacagcacaguggcgucuucacucguccuggugguuaguuuaggagcaaucagcuuuuggaugugcuccaacgguucucugcagugccggauuuguaucuga

SEQ ID NO: 137067 - RNA, 1701 nt, Artificial Sequence; identical to SEQ ID NO: 130717
  derived and/or modified CDS sequence (opt3) from hemagglutinin__InfluenzaA__AFK74605

SEQ ID NO: 137068 - RNA, 1701 nt, Artificial Sequence; identical to SEQ ID NO: 130959
  derived and/or modified CDS sequence (opt3) from hemagglutinin__InfluenzaA__AFK74615

SEQ ID NO: 137069 - RNA, 1701 nt, Artificial Sequence; identical to SEQ ID NO: 130959
  derived and/or modified CDS sequence (opt3) from hemagglutinin__InfluenzaA__AFK74625

SEQ ID NO: 137070 - RNA, 1701 nt, Artificial Sequence; identical to SEQ ID NO: 131819
  derived and/or modified CDS sequence (opt3) from hemagglutinin__InfluenzaA__AFK74635

SEQ ID NO: 137071 - RNA, 1701 nt, Artificial Sequence; identical to SEQ ID NO: 131819
  derived and/or modified CDS sequence (opt3) from hemagglutinin__InfluenzaA__AFK74645

SEQ ID NO: 137072 - RNA, 1701 nt, Artificial Sequence; identical to SEQ ID NO: 130717
  derived and/or modified CDS sequence (opt3) from hemagglutinin__InfluenzaA__AFK74655

SEQ ID NO: 137073 - RNA, 1701 nt, Artificial Sequence; identical to SEQ ID NO: 130717
  derived and/or modified CDS sequence (opt3) from hemagglutinin__InfluenzaA__AFK74665

SEQ ID NO: 137074 - RNA, 1701 nt, Artificial Sequence; identical to SEQ ID NO: 130717
  derived and/or modified CDS sequence (opt3) from hemagglutinin__InfluenzaA__AFK74675

SEQ ID NO: 137075 - RNA, 1701 nt, Artificial Sequence; identical to SEQ ID NO: 130717
  derived and/or modified CDS sequence (opt3) from hemagglutinin__InfluenzaA__AFK74685

SEQ ID NO: 137076 - RNA, 1701 nt, Artificial Sequence; identical to SEQ ID NO: 133272
  derived and/or modified CDS sequence (opt3) from hemagglutinin__InfluenzaA__AFK74695

SEQ ID NO: 137077 - RNA, 1701 nt, Artificial Sequence; identical to SEQ ID NO: 130717
  derived and/or modified CDS sequence (opt3) from hemagglutinin__InfluenzaA__AFK74705

SEQ ID NO: 137078 - RNA, 1701 nt, Artificial Sequence; identical to SEQ ID NO: 130717
  derived and/or modified CDS sequence (opt3) from hemagglutinin__InfluenzaA__AFK74715

SEQ ID NO: 137079 - RNA, 1701 nt, Artificial Sequence; identical to SEQ ID NO: 130717
  derived and/or modified CDS sequence (opt3) from hemagglutinin__InfluenzaA__AFK74725

SEQ ID NO: 137080 - RNA, 1701 nt, Artificial Sequence; identical to SEQ ID NO: 130717
  derived and/or modified CDS sequence (opt3) from hemagglutinin__InfluenzaA__AFK74735

SEQ ID NO: 137081 - RNA, 1701 nt, Artificial Sequence; identical to SEQ ID NO: 130717
  derived and/or modified CDS sequence (opt3) from hemagglutinin__InfluenzaA__AFK74745

SEQ ID NO: 137082 - RNA, 1701 nt, Artificial Sequence; identical to SEQ ID NO: 130717
  derived and/or modified CDS sequence (opt3) from hemagglutinin__InfluenzaA__AFK74755

SEQ ID NO: 137083 - RNA, 1701 nt, Artificial Sequence; identical to SEQ ID NO: 133272
  derived and/or modified CDS sequence (opt3) from hemagglutinin__InfluenzaA__AFK74765

SEQ ID NO: 137084 - RNA, 1701 nt, Artificial Sequence; identical to SEQ ID NO: 130717
  derived and/or modified CDS sequence (opt3) from hemagglutinin__InfluenzaA__AFK74775

SEQ ID NO: 137085 - RNA, 1701 nt, Artificial Sequence; identical to SEQ ID NO: 130717
  derived and/or modified CDS sequence (opt3) from hemagglutinin__InfluenzaA__AFK74785

SEQ ID NO: 137086 - RNA, 1701 nt, Artificial Sequence; identical to SEQ ID NO: 130717
  derived and/or modified CDS sequence (opt3) from hemagglutinin__InfluenzaA__AFK74795

SEQ ID NO: 137087 - RNA, 1701 nt, Artificial Sequence; identical to SEQ ID NO: 130717
  derived and/or modified CDS sequence (opt3) from hemagglutinin__InfluenzaA__AFK74805

SEQ ID NO: 137088 - RNA, 1701 nt, Artificial Sequence; identical to SEQ ID NO: 130717
  derived and/or modified CDS sequence (opt3) from hemagglutinin__InfluenzaA__AFK74815

SEQ ID NO: 137089 - RNA, 1701 nt, Artificial Sequence; identical to SEQ ID NO: 130717
  derived and/or modified CDS sequence (opt3) from hemagglutinin__InfluenzaA__AFK74825

SEQ ID NO: 137090 - RNA, 1701 nt, Artificial Sequence; identical to SEQ ID NO: 130717
  derived and/or modified CDS sequence (opt3) from hemagglutinin__InfluenzaA__AFK74835

SEQ ID NO: 137091 - RNA, 1701 nt, Artificial Sequence; identical to SEQ ID NO: 130717
  derived and/or modified CDS sequence (opt3) from hemagglutinin__InfluenzaA__AFK74845

SEQ ID NO: 137092 - RNA, 1701 nt, Artificial Sequence; identical to SEQ ID NO: 130717
  derived and/or modified CDS sequence (opt3) from hemagglutinin__InfluenzaA__AFK74895

SEQ ID NO: 137093 - RNA, 1701 nt, Artificial Sequence; identical to SEQ ID NO: 130717
  derived and/or modified CDS sequence (opt3) from hemagglutinin__InfluenzaA__AFK74905

SEQ ID NO: 137094 - RNA, 1701 nt, Artificial Sequence; identical to SEQ ID NO: 130717
  derived and/or modified CDS sequence (opt3) from hemagglutinin__InfluenzaA__AFK74915

SEQ ID NO: 137095 - RNA, 1701 nt, Artificial Sequence
  derived and/or modified CDS sequence (opt3) from hemagglutinin__InfluenzaA__AFK74925
augaaggccauccuggugguccuccuuuacaccuucgcuacagcaaacgccgacacucugugcauuggcuaucacgcgaauaacagcacggauaccguugacacaguguuggagaaaaauguaacugugacccauuccgucaacuuacuggaagauaagcacaaugggaaacuauguaagcucagaggagugguuccccugcaucuugguaaaugcaacauagcuggcuggauccuggggaauccugagugugaaucuuugucaacagccaguagcugguccuacauuguggagaccucuucgucagacaacggaacuugcuauccaggcgauuuuaucgacuacgaggagcucagggagcagcugagcagugucuccucuuucgaacgguuugagauuuucccgaagacaagcuccuggcccaaucacgauucaaacaagggugugaccgcagccuguccucaugcuggggcaaaaaguuuuuauaagaaucugaucuggcucguaaagaagggaaacagcuacccaaaauuaucuaaguccuauauaaaugacaagggcaaagaaguucuggugcuuuggggcauccaccaccccucaacgagcgccgaucaacagaguuuguaccagaacgcugacgccuacgucuucguggggacuucucgcuauuccaagaaauuuaagccugagauugcgauccgaccaaaagugcgugaucaggagggaagaaugaauuacuauuggacccuggucgaacccggugacaagauuacauucgaggcaacuggcaaccuaguugugccuagguacgccuuuaccauggaacggaacgcugggagcggaaucauaauuucggauacaccaguacaugacugcaauaccacgugucaaacuccgaaaggcgccaucaacacaucucuccccuuccagaauauucacccuaucaccaucgguaagugcccaaaguaugugaaauccacuaagcugcgccuugcaacagggcugagaaacguccccucaauucagaguaggggauuguuuggcgcuauagccggcuucaucgaagggggauggaccgguaugguggacggcugguacggguaucaucaccagaaugaacaaggaagcggcuacgcggccgaucucaaauccacgcagaacgcaauugacgguaucaccaauaagguuaacucugugauagagaaaaugaauacacaguuuacugcugucgggaaggaguucaaccaccuggaaaagcggauugagaauuuaaacaaaaagaucgaugacggcuuccuggauaucuggaccuacaaugccgaacuccuugugcuguuggagaacgaacgcacacuagacuaucaugauagcaauguuaaaaaccuguacgagaagguacgaucacagcucaaaaacaaugcuaaggagauuggaaacggcuguuuugaguucuaucacaagugcgacaauacuuguauggaaagugugaaaaacgggaccuacgauuauccuaaguacuccgaagaggccaaacugaauagagaagagaucgacggagucaaacuugagagcacaaggauuuaucaaauacuggcaaucuacucuaccguggccucaaguuugguccucgugguuagccugggugcuauuuccuuuuggaugugcucuaacggcucguuacagugccggaucuguaucuga

SEQ ID NO: 137096 - RNA, 1701 nt, Artificial Sequence; identical to SEQ ID NO: 131819
  derived and/or modified CDS sequence (opt3) from hemagglutinin__InfluenzaA__AFK74935

SEQ ID NO: 137097 - RNA, 1701 nt, Artificial Sequence; identical to SEQ ID NO: 130717
  derived and/or modified CDS sequence (opt3) from hemagglutinin__InfluenzaA__AFK74945

SEQ ID NO: 137098 - RNA, 1701 nt, Artificial Sequence; identical to SEQ ID NO: 130717
  derived and/or modified CDS sequence (opt3) from hemagglutinin__InfluenzaA__AFK74955

SEQ ID NO: 137099 - RNA, 1701 nt, Artificial Sequence; identical to SEQ ID NO: 130717
  derived and/or modified CDS sequence (opt3) from hemagglutinin__InfluenzaA__AFK74965

SEQ ID NO: 137100 - RNA, 1701 nt, Artificial Sequence; identical to SEQ ID NO: 130808
  derived and/or modified CDS sequence (opt3) from hemagglutinin__InfluenzaA__AFK74975

SEQ ID NO: 137101 - RNA, 1701 nt, Artificial Sequence; identical to SEQ ID NO: 130717
  derived and/or modified CDS sequence (opt3) from hemagglutinin__InfluenzaA__AFK74985

SEQ ID NO: 137102 - RNA, 1701 nt, Artificial Sequence; identical to SEQ ID NO: 133272
  derived and/or modified CDS sequence (opt3) from hemagglutinin__InfluenzaA__AFK74995

SEQ ID NO: 137103 - RNA, 1701 nt, Artificial Sequence; identical to SEQ ID NO: 130717
  derived and/or modified CDS sequence (opt3) from hemagglutinin__InfluenzaA__AFK75005

SEQ ID NO: 137104 - RNA, 1701 nt, Artificial Sequence
  derived and/or modified CDS sequence (opt3) from hemagglutinin__InfluenzaA__AFK75015
augaaggccauccuggugguccuccuuuacaccuucgcuacagcaaacgccgacacucugugcauuggcuaucacgcgaauaacagcacggauaccguugacacaguguuggagaaaaauguaacugugacccauuccgucaacuuacuggaagauaagcacaaugggaaacuauguaagcucagaggaguggcuccccugcaucuugguaaaugcaacauagccggcuggauccuggggaauccugagugugaaucuuugucaacagcaaguagcugguccuacauuguugagaccucuucgucagacaacggaacuugcuauccaggcgauuuuaucgacuacgaggagcucagggagcagcugagcaguguguccucuuucgaacgguuugagauuuucccgaagacaagcuccuggcccaaucacgauucaaacaagggugucaccgccgcuuguccucaugcaggggccaaaaguuuuuauaagaaucugaucuggcucgugaaaaagggaaacagcuacccaaaauuaucuaaguccuauauaaaugacaagggcaaagaaguacugguucuuuggggcauccaccaccccucaacgagcgcugaucaacagaguuuguaccagaacgccgacgcguacguguucgucgggacuucucgcuauuccaagaaauuuaagccugagauugcaauccgaccaaaagugcgugaucaggagggaagaaugaauuacuauuggacccugguggaacccggugacaagauuacauucgaggccacuggcaaccuagucguuccuagguacgcuuuugccauggaacggaacgcagggagcggaaucauaauuucggauaccccagugcaugacugcaauacaaccugucaaacgccgaaaggcgcuaucaacacuucucuccccuuccagaauauucacccuaucacaaucgguaagugcccaaaguauguaaaauccaccaagcugcgccuugccacugggcugagaaacgugcccucaauucagaguaggggauuguuuggcgcgauagccggcuucaucgaagggggauggacagguauggucgacggcugguacggguaucaucaccagaaugaacaaggaagcggcuacgcagcugaucucaaauccacccagaacgccauugacgagaucacgaauaaggugaacucuguuauagagaaaaugaauacccaguuuacagcuguggguaaggaguucaaccaccuggaaaagcggauugaaaauuuaaacaaaaaggucgaugacggguuccuggauaucuggacuuacaaugccgagcuccuugugcuguuggaaaacgagcgcacccuagacuaucaugauagcaauguaaagaaccuguacgagaagguucgaucacagcucaaaaacaaugcaaaggaaaucggcaacggauguuuugaguucuaucacaagugcgacaauacauguauggaaagugugaaaaacggcacuuacgauuauccuaaguacuccgaggaagccaaacugaauagagaggagauugacggggucaaacuugaaagcaccaggaucuaucaaauucuggcuauauacucuacaguggcgucaaguuugguccucgugguuagccugggagcaaucuccuuuuggaugugcucuaacgguucguuacagugccggauuuguguguga

SEQ ID NO: 137105 - RNA, 1701 nt, Artificial Sequence; identical to SEQ ID NO: 130959
  derived and/or modified CDS sequence (opt3) from hemagglutinin__InfluenzaA__AFK75025

SEQ ID NO: 137106 - RNA, 1701 nt, Artificial Sequence; identical to SEQ ID NO: 130959
  derived and/or modified CDS sequence (opt3) from hemagglutinin__InfluenzaA__AFK75035

SEQ ID NO: 137107 - RNA, 1701 nt, Artificial Sequence; identical to SEQ ID NO: 130959
  derived and/or modified CDS sequence (opt3) from hemagglutinin__InfluenzaA__AFK75045

SEQ ID NO: 137108 - RNA, 1701 nt, Artificial Sequence; identical to SEQ ID NO: 130959
  derived and/or modified CDS sequence (opt3) from hemagglutinin__InfluenzaA__AFK75055

SEQ ID NO: 137109 - RNA, 1701 nt, Artificial Sequence; identical to SEQ ID NO: 130717
  derived and/or modified CDS sequence (opt3) from hemagglutinin__InfluenzaA__AFK75065

SEQ ID NO: 137110 - RNA, 1701 nt, Artificial Sequence; identical to SEQ ID NO: 130717
  derived and/or modified CDS sequence (opt3) from hemagglutinin__InfluenzaA__AFK75075

SEQ ID NO: 137111 - RNA, 1701 nt, Artificial Sequence; identical to SEQ ID NO: 131881
  derived and/or modified CDS sequence (opt3) from hemagglutinin__InfluenzaA__AFK75085

SEQ ID NO: 137112 - RNA, 1701 nt, Artificial Sequence; identical to SEQ ID NO: 131881
  derived and/or modified CDS sequence (opt3) from hemagglutinin__InfluenzaA__AFK75095

SEQ ID NO: 137113 - RNA, 1701 nt, Artificial Sequence; identical to SEQ ID NO: 130717
  derived and/or modified CDS sequence (opt3) from hemagglutinin__InfluenzaA__AFK75105

SEQ ID NO: 137114 - RNA, 1701 nt, Artificial Sequence; identical to SEQ ID NO: 130959
  derived and/or modified CDS sequence (opt3) from hemagglutinin__InfluenzaA__AFK77857

SEQ ID NO: 137115 - RNA, 1701 nt, Artificial Sequence; identical to SEQ ID NO: 130959
  derived and/or modified CDS sequence (opt3) from hemagglutinin__InfluenzaA__AFK77867

SEQ ID NO: 137116 - RNA, 1701 nt, Artificial Sequence; identical to SEQ ID NO: 136245
  derived and/or modified CDS sequence (opt3) from hemagglutinin__InfluenzaA__AFK77877

SEQ ID NO: 137117 - RNA, 1701 nt, Artificial Sequence; identical to SEQ ID NO: 130717
  derived and/or modified CDS sequence (opt3) from hemagglutinin__InfluenzaA__AFK77887

SEQ ID NO: 137118 - RNA, 1701 nt, Artificial Sequence
  derived and/or modified CDS sequence (opt3) from hemagglutinin__InfluenzaA__AFK77897
augaaggccauccuggugguccuccuuuacaccuucgcuacagcaaacgccgacacucugugcauuggcuaucacgcgaauaacagcacggauaccguugacacaguguuggagaaaaauguaacugugacccauuccauaaacuuacuggaagauaagcacaaugggaaacuauguaagcucagaggagucgcuccccugcaucuugguaaaugcaacaucgccggcuggauucuggggaauccugagugugaaucuuugucaacagcaaguagcugguccuacaucguggagaccucuucgucagacaacggaacuugcuauccaggcgauuuuauuaauuacgaggagcucagggagcagcugagcaguguuuccucuuucgaacgguuugagaucuucccgaagacaagcuccuggcccaaccacgacucaaauaagggugugaccgccgcuuguccucaugcaggggccaaaaguuuuuauaagaaccugauauggcucgucaaaaagggaaauagcuacccaaaauuaucuaaguccuauaucaacgauaagggcaaagaagugcugguacuuuggggcauucaccaccccucaacgagcgcugaccaacagaguuuguaccagaaugccgaugcguacguuuucguggggacuucuaaguauuccaaaaaguuuaaaccugagaucgcaguccgcccaaaggugcgagaccaggagggacguaugaacuacuauuggacccugguggaacccggugauaaaauuacauucgaggccacuggcaaccuacucgucccuagauacgcuuuugccauggaaaggaaugcagggagcggaaucauaauuucggacaccccaguucaugauugcaacacaaccugucaaacgccgaagggcgcuaucaauacuucucugcccuuccagaacauucacccuaucacaaucgguaagugcccaaaauaugugaaguccaccaaacuucggcuggccacuggguugcgcaauguacccucaauucagaguagaggacucuuuggcgcgauagccggcuucaucgaagggggauggacagguaugguggacggcugguacggguaucaucaccagaacgaacaaggaagcggcuacgcagcugaccugaaguccacccagaaugccauugauaaaaucacgaacaaggucaauucugugauagagaagaugaacacccaguuuacagcuguugguaaagaguucaaucacuuagaaaagaggauugagaaccugaauaaaaagguggacgauggguuccucgacaucuggacuuacaacgccgaacuucuggucuugcuagagaaugaacggacccuggauuaucaugacagcaacgugaaaaaccucuacgagaagguacgcucacagcugaagaauaacgcaaaagagaucggcaauggauguuuugaguucuaucacaagugcgauaacacauguauggaaaguguuaaaaauggcacuuacgacuauccuaaguacuccgaagaggccaaacuuaaccgagaagagauugauggggugaagcuggagagcaccagaaucuaucaaauuuuggcuauauacucuacagucgcgucaagucucgugcuggucgugagcuuaggagcaaucuccuuuuggaugugcucuaaugguucgcugcagugcaggauuuguaucuga

SEQ ID NO: 137119 - RNA, 1701 nt, Artificial Sequence; identical to SEQ ID NO: 135098
  derived and/or modified CDS sequence (opt3) from hemagglutinin__InfluenzaA__AFK78028

SEQ ID NO: 137120 - RNA, 1701 nt, Artificial Sequence; identical to SEQ ID NO: 130959
  derived and/or modified CDS sequence (opt3) from hemagglutinin__InfluenzaA__AFK78187

SEQ ID NO: 137121 - RNA, 1701 nt, Artificial Sequence; identical to SEQ ID NO: 134903
  derived and/or modified CDS sequence (opt3) from hemagglutinin__InfluenzaA__AFM45476

SEQ ID NO: 137122 - RNA, 1701 nt, Artificial Sequence
  derived and/or modified CDS sequence (opt3) from hemagglutinin__InfluenzaA__AFM45487
augaagaccaucauugcccugagcuacauacucugccuuguguucgcucagaaacugcccggcaacgacaauuccacagcaacuuuguguuuagggcaccaugccgucccuaacggaacgaucguuaagaccauuacaaaugaucaaaucgaggugacuaacgcgaccgaacugguacagucuucaaguacaggugagauuugcgacagcccacaccagauccuagauggcgaaaauuguacccucauagacgcucugcuuggggauccgcagugcgacggauuucaaaacaaaaagugggaucuguucguggagagauccaaagccuauucuaauuguuaccccuaugacgucccugauuacgcaucguugaggucacucguggccagcaguggcacucuggaauuuaacaaugaguccuucaacuggacagguguuacccagaaugggacgucuagcgcuugcauccggcgcuccaacucaaguuucuuuagccgacugaauuggcucacucauuuaaacuuuaaguauccagcacugaaugugaccaugcccaacaacgagcaguucgacaagcuguacauuuggggaguccaccauccuggcacagauaaagaccagaucuuuuuguaugcccaaucuuccggccguauuacugugucaaccaagagaagccagcaggcuguaaucccaaauauagggaguaggccccggauucgcaacaucccuucuagaauuuccaucuacuggacaaucguuaaaccaggagauauucugcuaauaaauagcaccgguaaccucaucgccccgaggggcuacuucaagauucggucggggaaaucuuccaucaugcgcucagacgcgcccauaggaaaguguaauagugaaugcauuacgccuaacggcagcaucccaaaugacaagcccuuucagaacgugaaucgaaucacuuauggugcauguccuagauacgucaaacaauccacacugaaacuugccaccgggaugaggaacgugccagagaagcagacucggggaauuuucggcgcuaucgccggcuuuauugaaaaugggugggagggaaugguggaugguugguauggcuuccgucaccagaacucugaggggcgcggacaagcagcugaccuuaagagcacacaggccgcgauagaucagaucaauggcaaauugaacagacucauugguaagaccaaugaaaaauuccaccagaucgagaaggaauuuucagaggucgaagggaggauccaagaccuggagaaguacguugaggauacgaaaauugacuuauggaguuauaacgccgaacugcucguggcacuugagaaccagcauaccauagaucugacagacuccgaaaugaauaaguuguucgagaaaacuaagaaacagcuacgggaaaacgcugaggauaugggcaauggaugcuuuaagaucuaccacaagugugacaacgccugcauuggcagcauccgaaaugggaccuauaaccaugauguauaccgcgacgaggcucugaauaacagauuccagauuaaaggaguggaacucaagucugguuacaaagacuggauccuguggauaucauuugccaucaguugcuuccuucugugugucgcauugcucggcuuuauuaugugggccugccaaaaggggaauaucagguguaacauuugcaucuga

SEQ ID NO: 137123 - RNA, 1701 nt, Artificial Sequence; identical to SEQ ID NO: 134903
  derived and/or modified CDS sequence (opt3) from hemagglutinin__InfluenzaA__AFM45489

SEQ ID NO: 137124 - RNA, 1701 nt, Artificial Sequence; identical to SEQ ID NO: 137122
  derived and/or modified CDS sequence (opt3) from hemagglutinin__InfluenzaA__AFM45494

SEQ ID NO: 137125 - RNA, 1701 nt, Artificial Sequence
  derived and/or modified CDS sequence (opt3) from hemagglutinin__InfluenzaA__AFM68954
augaaggccagacugcucgugcuucugugcgcuuuggcagccaccgacgcggauacaaucuguauuggcuaccacgcuaacaauagcacugacacggucgauaccuuacuggagaaaaacguuacagugacucauuccguaaaucuacucgaagacucucacaacgggaagcugugcaaacuuaagggaauagccccgcugcaguuggguaaauguaauaucgcaggcuggcuccuggggaacccugagugcgauucacugcucccagccaggaguuggagcuauauuguggaaacccccaauuccgagaacggagcuuguuaccccggcgacuucaucgauuaugaagaguuaaaggagcaacugucuucggucucaagccuugaacgguuugagauuuucccuaaggaaaguuccuggccaaaucauaacacauugaaaggugugaccgcaucuugcagccacgggggaaaguccucauuuuaccgcaaucugcuauggcucacuaaaacagaggacaguuaucccaagcugagcaacucuuacguuaauaacaaaggcaaggaggugcuuguccuguggggcgugcaucacccuuccucaagcgaugaacagcagaguuuguaucacaauguaaacgccuacguuucuguggucuccagcaacuacaaugggcgauucaccccagagaucgcugcccgucccaaggugagaaaccagccuggaaggaugaauuauuacuggacgcuccuggaaccaggugacacuauaaucuuugaggcgaccggcaacuuaauugcaccgugguaugccuucgcucugucgcggggguuuggaucuggcaucauuacauccaaugccucaaugcaugaauguaacacuaaaugccaaacaccccagggugcaaucaauaguagccucccuuuccagaacauacacccagugaccauuggggagugucccaaguacguccgcuccaccaaacuuagaaugguuacgggacugaggaauaucccuucuauucaguuucggggcuuguucggcgcuaucgccggguuuaucgagggagguuggacuggcaugauugaugggugguauggauaccaucaccaaaacgaacagggcagcgguuaugcggccgaccagaagucaacacagaaugcaauaaacgggaucaccaauaaagugaacaguguaauugagaagaugaauacucaauucacagcuguguccaaagaauuuaacaaccuagagaagcgcauggaaaaucugaacaagaaagucgaugacggcuuccucgacaucuggaccuacaaugccgagcugcuugugcuguuggagaacgaacgaacgcucgauuuccacgaccugaauguuaagaacuuauacgagaaagucaagagccagcugaaaaauaacgcuaaggaaauaggaaauggcugcuuugaguucuaucauaagugugauaacaaaugcauggaaucugugagaaaugggaccuacgacuauccaaaguacucagaggagaguaaacuaaacagggaaaagauugauggagugaaacucgagagcauggguguauaucagauccuggccaucuacuccacaguugcaucuucgcuuguguugcuggucagccucggcgccauuuccuuuuggaugugcucaaaugggagucugcaaugucggaucugcauuuga

SEQ ID NO: 137126 - RNA, 1701 nt, Artificial Sequence
  derived and/or modified CDS sequence (opt3) from hemagglutinin__InfluenzaA__AFM68965
augaagaccaucauugcccugagcuacauauucugccaggugcucgcucaaaaccuucccggcaaugacaacuccacagcaacucuguguuuggggcaccaugccgucccuaauggaacguuaguuaaaaccaucacaaacgaucagauugaggugacuaaugcgaccgaacugguacagucuucaaguacagguagaaucugcgacagcccacacaggauucuagauggcaagaacuguacccucaucgacgcucugcuuggggauccgcauugcgacggauuucagaaugagaaaugggaucuguucguggaacgguccaaggccuuuucuaacuguuaucccuacgacgucccugauuaugcaucguugcgcucacucguggccagcaguggcacucuggaguucauaaaugaagguuuuaacuggacagggguuacccaaaauggaggcuccuacgcuugcaaacgaggcccagacaacucuuucuuuagccgucugaauuggcucuauaaguccgagucaacguaccccguguuaaacgucacuaugccuaauaacgauaacuucgacaagcuguauaucuggggagugcaccauccaaguaccgauaaagagcagacaaaucuuuacguacaggcaagcgggagaguuacugugucuaccaagaggucccagcaaacaauuauccccaacgucgguucacggccuugggugcgcggcuugagcagugggauuucuaucuacuggaccauagugaaaccaggagacauucugcuaaucaauuccaacggcaaucucauugccccgagagguuauuuuaagaucaggacggggaaaagcucgaucaugcggucugacgcucccauuggaacuuguuccucagaaugcauaacaccuaacggcaguaucccaaaugauaagcccuuccagaacgucaauaagauuaccuacggcgccuguccuaaauauguuaagcagaacacucugaaacuugcgacagggaugcgcaaugugccagagaagcagacccgaggaaucuuuggugcaaaagccggcuucauagaaaacgggugggagggaaugauugacggcugguacgguuuuagacaccaaaauagcgaggggacgggccaggcugccgaucugaaguccacccaggcagcuaucgaccaaaucaacggaaaauugaauaggguaauugaaaagacaaacgagaaguuccaccagaucgaaaaagaguucucugaaguggagggccggauucaggaucucgagaaguaugucgaagacacuaaaauagaucuguggagcuacaacgccgaguuacugguggcgcucgaaaaucagcauaccaucgaccuuacagauucagagaugaacaagcuguuugagaaaacucgucgccaauugagagaaaaugccgaggacauggggaacggaugcuucaagauuuaucacaagugugauaaugcaugcaucgguaguaucaggaacggcaccuacgaccaugacguuuaccgggaugaagcucuaaauaaccgauuucagauuaaagggguggagcugaaguccggauauaaagacuggauacucuggaucagcuucgccauuucuugcuuucugcuuugugucgugcuguugggcuucaucaugugggcuugccagaaggguaauauucgcuguaacaucugcauauga

SEQ ID NO: 137127 - RNA, 1701 nt, Artificial Sequence
  derived and/or modified CDS sequence (opt3) from hemagglutinin__InfluenzaA__AFM68987
augaagaccaucauugcccugagcuacauauucugccucguguuugcucagaaccuucccggcaaugacaacuccacagcaacucuguguuuggggcaccaugccgucccuaauggaacguuaguuaaaaccaucacaaacgaucaaauugaggugacuaaugcgaccgaacugguacagucuucaaguacagguagaaucugcgacagcccacacaggauucuagauggcaagaacuguacccucaucgacgcucugcuuggggauccgcauugcgacggauuccagaaugagaaaugggaucuguuuguggaacgguccaaggccuucucuaacuguuaucccuacgacgucccugauuaugcaucguugcgcucacucguggccagcaguggcacucuggaguuuauaaaugaagguuucaacuggacagggguuacccaguccggaggcucuuacgcuugcaaacgaggcagcgacaaguccuuuuucucacgucugaauuggcucuaugagagugagagcaaguacccaguguuaaacgucacgaugcccaauaacgggaauuuugauaaacuguauaucuggggagugcaccauccuucuacugacaaggaacaaaccaaccuuuacguaagagcauccgguaggguuacagugucaacuaaacggagccagcagaccgucauuccaaacaucggcagucgccccugggugagaggguugucuuccaggauuagcaucuacuggacaauagugaagccuggagauauucugcuaaucaauucgaacggcaaucucauugccccacgggguuauuucaaaauccgcaccgggaagucuuccaucaugcgaucagacgcuccgauuggaacguguaguagcgagugcauaacucccaacggcuccaucccuaaugacaagccauuucagaacgucaauaaaauuacauacggcgccugucccaaguauguuaaacaaaacacccugaagcuggcgacugggaugagaaaugugccugaaaaacagacaaggggaaucuucggugcaauagccggcuuuauugagaacgggugggagggaaugguagauggcugguacgguuuccggcaccaaaauucugaagggaccggccaggcugccgaccuuaagagcacgcaggcagcuaucgaucagaucaacggaaaauugaaucgugugauugagaagaccaacgaaaaguuccaccagaucgagaaagaauuuucagaggucgagggccgcauucaagaccucgaaaaguauguggaggauacaaaaauagaccuguggaguuacaaugccgaauuacugguugcgcucgagaaccagcauacuaucgaucuuaccgacuccgaaaugaacaagcuguucgagaaaacaagaaggcaguugcgggagaaugccgaagauauggggaacggaugcuuuaagauuuaucacaagugugacaaugcaugcaucgguagcauccgaaacggcacuuacgaucaugacguguaccgcgacgaggcucuaaauaacagauuccagauuaaaggggucgaacugaagucuggauauaaagauuggauacucuggaucucauuugccauuaguugcuuccugcuuugugugguacuguugggcuuuaucaugugggcuugccaaaaggguaauauuagguguaacaucugcauauga

SEQ ID NO: 137128 - RNA, 1701 nt, Artificial Sequence
  derived and/or modified CDS sequence (opt3) from hemagglutinin__InfluenzaA__AFM71720
augaagaccaucauugcccugagcuacauauucugccucguguuugcucagaaacuucccggcaacgacaauuccacagcaacucuguguuuggggcaccaugccgucccuaacggaacguuaguuaagaccaucacaaaugaucaaauugaggugacuaacgcgaccgaacugguacagucuucaaguacagguagaaucugcgacagcccacacaggauucuagauggcaaaaauuguacccucaucgacgcucugcuuggggauccgcauugcgacggauuccagaacgagaagugggaucuguuuguggaacgguccaaagccuauucuaauuguuaccccuaugacgucccugauuacgcaucguugcgcucacucguggccagcaguggcacucuggaguucauaaacgaagacuuuaauuggacagguguuacccaguccgggggaucuuaugcuugcaagcgaggcagcgugaacuccuucuuuucacgucugaauuggcuccacgagagugaguacaaguauccagcauuaaacgucgccaugcccaauaacggcaaauucgauaagcuguacaucuggggagugcaucacccuauuacggacagagaacaaacuaaucuuuacguaagggcuagcgggcggguuaccgugucuacaaaacgcucccagcagacugucaucccaaacauugguucaagacccugggugaggggcuugagcagucggaucucuauauauuggaccauugugaagccuggggauauccuguuuauuaacuccacaggaaaucuaaucgccccacgcggcuacuucaaaauccgaaccgguaagagcucgauuaugagaucugacgcgccgauagggacguguuccucagagugcaucacucccaacggaaguauuccuaaugacaagccauuucagaacgucaauaaaaucacauauggcgcaugucccagguacguuaagcaaaacacccucaaacuggccacuggcaugcggaaugugccugaaaagcagacacgugggauauucggagcuauugccgguuuuaucgagaacggcugggaggggaugguagauggaugguauggcuuccgccaccagaauagcgaagguaccgggcaggcagcugaccuuaaauccacgcaagccgcgaucgaucagauuaacggcaagcugaauagauugaucgagaaaaccaacgaaaaguuccaucagauugagaaggaauuuucugagguggagggaaggauacaagaccucgaaaaauacgucgaggauacaaagaucgaccuguggagcuauaaugccgaauuacugguggcacucgagaaccagcacacuauugaucuuaccgacucagaaaugaauaaacuguucgagaagacacggaaacaguugcgagagaacgcugaagauaugggcaacgggugcuuuaagaucuaccauaagugugacaaugccugcaucggaaguauucgcaacgguacuuacgaucacgacguuuauagagacgaggcucuaaauaacagguuccagauaaaaggcguggaacugaaguccggguacaaagauuggauccucuggauuagcuuugccaucucuugcuuccugcuuugugucgugcuguugggauuuauuaugugggcaugccaaaagggcaauauccgguguaacauaugcaucuga

SEQ ID NO: 137129 - RNA, 1701 nt, Artificial Sequence
  derived and/or modified CDS sequence (opt3) from hemagglutinin__InfluenzaA__AFM71731
augaagaccaucauugcccugagcuacauacucugccuuguguucgcucagaaacugcccggcaacgacaauuccacagcaacuuuguguuuagggcaccaugccgucccuaacggaacgcugguuaagaccaucacaaaugaucaaauugaggugacuaacgcgaccgaacuuguacagucuucaaguacagguagaaucugcgacagcccacacaggauucucgauggcaaaaauuguacccugaucgacgcucuacugggggauccgcauugcgacggauuucagaacaaggagugggauuuguucguggaacgguccaaagccuauucuaauuguuaccccuaugacgucccugauuacgcaucgcuccgcucacugguggccagcaguggcacucuggaguuuauaaacgaagacuucaauuggacagguguugcucaguccggggagucuuaugcaugcaagcgaggaagcgugaaguccuuuuucucacgucucaacugguuacacaaaagugaguacaaguauccagcccugaaugucaccaugcccaacaauggcaaauuugauaaacuuuacaucuggggcgugcaucacccuagcacggacagagaacaaacuaacuuguacguaagggcuucugggcggguuaccguguccacaaagcgcucacagcagacugucauuccaaauaucggaagcagacccugggugaggggucugaguucucggauuuccaucuauuggaccauagugaagccuggcgauauucuacucaucaacagcacagggaaccugauugccccacgcggauacuucaagauccgaaccggcaaaucgucuaucaugagauccgacgcgccgauugguacguguucaagugagugcauaacucccaaugggagcaucccuaacgacaagccauuucagaaugucaacaggauuacauauggagcauguccccgguacguuaaacaaaauacccuuaagcuggccacuggcaugcguaacgugccugaaaaacagacacgcggcaucuucggggcuauagccggauuuauugagaaugguugggagggcaugguagaugggugguauggauucagacaccagaacuccgaaggcaccggucaggcagcugacuugaagucuacgcaagccgcgaucgaucagaucaaugggaaacucaacaggcugauugagaagaccaaugaaaaguuucaucagaucgagaaagaguucagcgaaguggagggccggauucaagacuuagaaaaguacgucgaggauacaaaaauagaccuguggucauauaacgccgaacuccuuguggcacuggagaaucagcacacuaucgauuugaccgacagugaaaugaacaagcuauucgagaaaacacgaaagcagcugcgcgagaaugcugaagauaugggaaacggcugcuuuaagauuuaccauaaaugugacaacgccugcaucggguccaucagaaauggaacuuacgaucacgacguuuauagggacgaggcucucaacaaucgguuccagauuaaggguguggaacugaaaagcggcuacaaggauuggauacuuuggaucucuuuugccauuucaugcuuccuguugugugucgugcuccugggguuuaucaugugggcaugccaaaaaggaaacauucgcuguaauaucugcauauga

SEQ ID NO: 137130 - RNA, 1701 nt, Artificial Sequence
  derived and/or modified CDS sequence (opt3) from hemagglutinin__InfluenzaA__AFM71754
augaagaccaucauugcccugagcuacauacucugccuuguguucgcucagaaacugcccggcaacgacaauuccacagcaacuuuguguuuagggcaccaugccgucccuaacggaacgaucguuaagaccauuacaaaugaucaaaucgaggugacuaacgcgaccgaacugguacagucuucaaguacaggugagauuugcgacagcccacaccagauccuagauggcaaaaauuguacccucauagacgcucugcuuggggauccgcagugcgacggauuucaaaacaagaaaugggaucuguucguggaaagauccaaggccuauucuaauuguuaccccuaugacgucccugauuacgcaucguugaggucacucguggccagcaguggcacucuggaguuuaacaaugaauccuucaacuggacagguguuacccagaaugggacgucuagcgcuugcauccggcgcuccaagaacucauuuuucagucgacugaauuggcucacucauuuaaacuuuaaauauccagcacugaaugugaccaugcccaacaacgagcaguucgacaaacuuuacauuuggggaguccaccauccuggcacagauaaagaccagaucuuuccauaugcccaagcuagcggccguauuacugugucuaccaagagaucccagcagacagccauccccaauauagggucaaggccucggguacgcaacauuccaagcagaaucaguauuuacuggaccaucguuaaaccgggagauaucuugcugauuaauucuacggguaaccuaauagcgcccaggggcuacuucaagauccgguccggaaagagcucgauuaugcgcucugacgcaccuaucgggaaauguaauuccgagugcauaacuccaaacggcucaauucccaaugacaagccuuuucagaacgugaaucgaaucacauauggugccuguccaagauacgucaaacaaaacacccucaagcuggcuacugggaugaggaaugugcccgaaaaacagacacggggaaucuucggcgccauugcaggcuuuaucgagaacgggugggaaggaaugguggaugguugguauggcuuccgucaccagaauagugaggggcgcggacaagcugccgaccuuaagagcacccaggcggccauugaucagauaaacggcaaacugaauagauugaucgguaagacgaacgagaaguuccaccagauugaaaaagaguuuuccgaagucgaggggaggauccaagaccucgaaaaguacguugaggauaccaaaaucgaccuguggucuuauaacgcagaguuacugguggcucucgaaaaucagcauacaauugaucuuacugacagcgagaugaacaagcuguucgaaaagaccaagaagcaguugcgggagaaugccgaagauaugggcaacggaugcuuuaaaauauaccacaagugugacaaugcuugcaucggcucaauucgaaacgggacauaugcccaugauguauaccgcgacgaggcacuaaauaacagauuccagaucaaaggaguggagcugaagagugguuacaaagacuggauucucuggaucuccuuugccauaagcugcuuccugcuuugugucgcucuguugggcuuuaucaugugggcgugccaaaaggggaauauuagguguaacaucugcauuuga

SEQ ID NO: 137131 - RNA, 1701 nt, Artificial Sequence
  derived and/or modified CDS sequence (opt3) from hemagglutinin__InfluenzaA__AFM71768
augaagaccaucauugcccugagcuacauacucugccuuguguucgcucagaaacugcccggcaacgacaauuccacagcaacuuuguguuuagggcaccaugccgucccuaacggaacgaucguuaagaccauuacaaaugaucaaaucgaggugacuaacgcgaccgaacugguacagucuucaaguacaggugagauuugcgacagcccacaccagauccuagauggcaaaaauuguacccucauagacgcucugcuuggggauccgcagugcgacgauuuucaaaacaagaaaugggaccuguucguggaaagauccaaggccuauucuaauuguuaccccuaugaugucccugacuacgcaucguugaggucacucguggccagcaguggaacucuggaguuuaacaaugaauccuucaacuggacaggcguuacccagaaugguacgucuagcgcuugcauccggcgcuccaagaacucauuuuucagucgacugaauuggcucacucauuuaaacuuuaaauauccagcacugaaugugaccaugcccaacaacgagcaguucgauaaacuuuacauuuggggaguccaccauccugggacagacaaagaucagaucuuuccauaugcccaagcuagcggccguauuacugugucuaccaagagaucccagcagacagccauccccaauauaggcucaaggccucggguacgcaacauuccaagcagaaucaguauuuacuggaccaucguuaaaccgggggacaucuugcugauuaauucuacgggaaaccuaauagcgcccagggguuacuucaagauccgguccggcaagagcucgauuaugcgcucugacgcaccuaucgggaaauguaauuccgagugcauaacuccaaacggaucaauucccaaugauaagccuuuucagaacgugaaucgaaucacauauggcgccuguccaagauacgucaaacaaaacacccucaagcuggcuacugguaugaggaaugugcccgaaaaacagacacgggggaucuucggagccauugcaggcuuuaucgagaacggcugggaagggaugguggacggaugguaugguuuccgucaccagaauagugagggccgcgggcaagcugccgaucuuaagagcacccaggcggccauugaccagauaaacggaaaacugaauagauugaucggcaagacgaacgagaaguuccaccagauugaaaaagaguuuuccgaagucgaggguaggauccaagaucucgaaaaguacguugaggacaccaaaaucgaucuguggucuuauaacgcagaguuacugguggcucucgaaaaucagcauacaauugaccuuacugauagcgagaugaacaagcuguucgaaaagaccaagaagcaguugcgggagaaugccgaagacauggggaacggcugcuuuaaaauauaccacaagugugauaaugcuugcaucggaucaauucgaaacggcacauaugcccaugacguauaccgcgacgaggcacuaaauaacagauuccagaucaaagggguggagcugaagaguggauacaaagauuggauucucuggaucuccuuugccauaagcugcuuccugcuuugugucgcucuguuggguuuuaucaugugggcgugccaaaagggcaauauuagguguaacaucugcauuuga

SEQ ID NO: 137132 - RNA, 1701 nt, Artificial Sequence
  derived and/or modified CDS sequence (opt3) from hemagglutinin__InfluenzaA__AFM71791
augaagaccaucauugcccugagcuacacacucugccuuguguucgcucagaaacugcccggcaacgacaauuccacugcaacguuguguuuagggcaccaugccgucccuaacggaaccauaguuaagacaaucacuaaugaucaaauugaggugaccaacgcgacagaacugguacagucuucaaguaccggugagaucugcgacagcccacaccagauucuagauggcaaaaauuguacucucaucgacgcucugcuuggggauccgcagugcgacggauuucaaaacaagaaaugggaucuguucguggaaagauccaaggccuauucuaauuguuaccccuaugacgucccugauuacgcaucguugaggucacucguggccagcaguggcacacuggaguuuaacaaugaauccuucaacuggaccgguguuacgcagaaugggacuucuagcgcuugcauacggcgcuccaagaacucauuuuucagucgacugaauuggcucacccauuuaaacuuuaaauauccagcacugaaugugacaaugcccaacaacgagcaguucgacaaacuuuacaucuggggaguccaccauccuggcacugauaaggaccagauuuuuccauaugcccaagcuagcggccguaucaccgugucuacaaagagaucccagcagaccguaauucccaauaucgggucaaggccucggguucgcaacauaccaagcagaauuaguaucuacuggacgauugugaaaccgggagauaucuugcugaucaauucuacugguaaccuaauugcccccaggggcuacuucaagauacgguccggaaagagcucgaucaugcgcucugacgcgccuauugggaaauguaauuccgagugcaucacaccaaacggcucaauacccaaugacaagccuuuucagaacgucaaucgaauuaccuauggugcauguccaagauacgugaaacaaaacacucucaagcuggccacagggaugaggaaugugcccgaaaaacagacccggggaaucuucggcgcuaucgccggcuuuauugagaacgggugggaaggaauggucgaugguugguauggcuuccgucaccagaauagugaggggcgcggacaagcagcugaccuuaagagcacgcaggccgcgaucgaucagauuaacggcaaacugaauagauugauagguaagaccaacgagaaguuccaccagaucgaaaaagaguuuuccgaaguugaggggaggauucaagaccucgaaaaguacguggaggauacaaaaaucgaccuguggucuuauaacgccgaguuacugguagcacucgaaaaucagcauacuaucgagcuuaccgauagcgaaaugaacaagcuguucgagaaaacaaagaagcaguugcgggaaaaugcugaggacaugggcaacggaugcuuuaaaauuuaccacaagugugauaaugccugcauaggcucaauccgaaacgggacuuaugaccaugauguguaccgcgacgaggcucuaaauaacagauuccagauuaaaggagucgaacugaagagugguuacaaagacuggauccucuggauuuccuuugccaucagcugcuuccugcuuuguguggcacuguugggcuuuauaaugugggccugccaaaaggggaauaucagguguaacauuugcaucuga

SEQ ID NO: 137133 - RNA, 1701 nt, Artificial Sequence
  derived and/or modified CDS sequence (opt3) from hemagglutinin__InfluenzaA__AFM71824
augaagaccaucauugcccugagcuacauacucugccuuguguucgcucagaaacugcccggcaacgacaauuccacagcaacuuuguguuuagggcaccaugccgucccuaacggaacgaucguuaagaccauuacaaaugaucaaaucgaggugacuaacgcgaccgaacugguacagucuucaaguacaggugagauuugcgacagcccacaccagauccuagauggcaaaaauuguacccucauagacgcucugcuuggggauccgcagugcgacggauuucaaaacaagaaaugggaucuguucguggaaagauccaaggccuauucuaauuguuaccccuaugacgucccugauuacgcaucguugaggucacucguggccagcaguggcacucuggaguuuaacaaugaauccuucaacuggacagguguuacccaggacgggacgucuagcgcuugcauccggcgcuccaagaauagcuuuuucagucgacugaacuggcucacucauuuaaauuuuaaauauccagcacugaacgugaccaugcccaauaacgagcaguucgauaaacuuuacauuuggggaguccaccauccuggcacagacaaagaucagaucuuuccauaugcccaagcuagcggccguauuacugugucuaccaagagaucccagcagacagccauccccaacauagggucaaggccucggguacgcaauauuccaagcagaaucaguauuuacuggaccaucguuaaaccgggagacaucuugcugauuaacucuacggguaaucuaauagcgcccaggggcuacuucaagauccgguccgggaagucaucgauuaugcgcucugacgcaccuaucggaaaauguaacuccgagugcauaacuccaaauggcucaauucccaacgauaagccuuuucagaaugugaaccgaaucacauauggugccuguccaagauacgucaaacaaaauacccucaagcuggcuacugggaugaggaacgugcccgaaaaacagacacggggaaucuucggcgccauugcaggcuuuaucgagaaugggugggaaggaaugguggacgguugguauggcuuccgucaccagaacagugaggggcgcggacaagcugccgaucuuaagagcacccaggcggccauugaccagauaaauggcaaacugaacagauugaucgguaagacgaaugagaaguuccaccagauugaaaaagaguuuuccgaagucgaggggaggauccaagaucucgaaaaguacguugaggacaccaaaaucgaucuguggucuuauaacgcagaguuacugguggcucucgaaaaccagcauacaauugaccuuacugauagcgagaugaauaagcuguucgaaaagaccaagaagcaguugcgggagaacgccgaagacaugggcaauggaugcuuuaaaauauaccacaagugugauaacgcuugcaucggcucaauucgaaaugggacauaugaccaugacguauaccgcgaugaggcccuaaacaauagauuccagaucaaaggaguggagcugaagagugguuacaaagacuggauucucuggaucuccuuugcaauaagcugcuuccugcuuugugucgcccuguugggcuuuaucaugugggcuugccaaaaggggaacauuagguguaauaucugcauuuga

SEQ ID NO: 137134 - RNA, 1701 nt, Artificial Sequence
  derived and/or modified CDS sequence (opt3) from hemagglutinin__InfluenzaA__AFM71835
augaagaccaucauugcccugagcuacauacucugccuuguguucgcucagaaacugcccggcaacgacaauuccacagcaacuuuguguuuagggcaccaugccgucccuaacggaacgaucguuaagaccauuacaaaugaucaaaucgaggugacuaacgcgaccgaacugguacagucuucaaguacaggugagauuugcgacagcccacaccagauccuagauggcgaaaauuguacccucauagacgcucugcuuggggauccgcagugcgacggauuucaaaacaaaaagugggaucuguucguggagagauccaaagccuauucuucguguuaccccuaugacgucccugauuacgcaucauugaggagccucguggccaguuccggcacucuggaauuuaauucugagagcuucaacuggacagguguuacccagaaugggacguccucagcuugcauccggcgcaguuauaacagcuuuuucucucgacugaauuggcucacucauuuaaacuuuaaguacccagcacugaaugugaccaugcccaacaaugagcaguucgacaaacuuuauauuuggggaguccaccauccuggcacagauaaggaccagaucuuuccauacgcccaggcuuccggccguauuacugugucaaccaagagaagccaacaggccguaauccccaacauagggaguaggccucggguucgcaacauuccaucuagaaucuccauuuacuggacaaucgugaaaccgggagauaucuugcugauuaauagcaccgguaaccuaauagcgcccaggggcuauuucaagauccggucggggaaaucuuccauuaugcgcucagacgcaccuaucggaaaguguaauagugaaugcauaacgccaaacggcagcauucccaaugacaagccuuuucagaacgucaaucgaaucacuuacggugccuguccaagauauaucaaacaauccacacucaagcuggcuaccgggaugaggaacgugcccgagaaacagacucggggaauuuucggcgccaucgcaggcuuuauugaaaaugggugggagggaaugguggaugguugguacggcuuccgucaccagaacucugaggggcgcggacaagcugccgaccuuaagagcacacaggcggccauagaucagaucaauggcaaacugaacagauugauugguaagaccaaugaaaaauuccaccagaucgagaaggaauuuucagaggucgaagggaggauccaagaccucgagaaguauguugaggauacgaaaauugaccuguggaguuacaacgcagaauuacugguggcucucgagaaucagcauaccauagaucuuacagacuccgaaaugaacaagcuguucgagaaaacuaagaaacaguugcgggaaaacgccgaggauaugggcaauggaugcuuuaagaucuaucacaagugugacaacgcuugcauuggcagcauccgaaaugggaccuacgaucaugacguauaccgcgacgaggcccuaaacaauagauuccagauuaaaggaguggaacugaagucugguuauaaagauuggauccucuggauaucacuggcaaucaguugcuuucuucugugugucgccuugcucggcuucauuaugugggcuugccaaaaggggaacaucagguguaauauuugcaucuga

SEQ ID NO: 137135 - RNA, 1698 nt, Artificial Sequence
  derived and/or modified CDS sequence (opt3) from hemagglutinin__InfluenzaA__AFM71846
augaaggccaaccugcucgugcuucugugcgcuuuggcagccgcggacgcugauaccaucuguauuggcuaccacgccaauaacagcacagacacugucgauacgguuuuagagaaaaaugugaccguaacacauuccgugaaccugcuagaagacucucacaaugggaagcucugcagacugaaaggaauagcaccccuucagcuggguaaguguaacaucgccggcugguugcucgggaauccugagugcgauccacugcugccggucaggucauggaguuauauuguggaaacucccaacagcgagaauggaaucuguuacccuggcgacuucauugauuaugaagaacuccgggagcaauuauccucuguuucgucauuugaacgcuucgagaucuuuccaaaagaaagcaguuggcccaaccauaauaccaacggugugacagcugcaugcucccacgaggggaagucuagcuucuaccgaaaucugcuuugguugaccgagaaggaaggauccuauccuaaacugaagaacucauacgucaauaaaaagggcaaagaggugcuaguacucuggggcauacaucacccaaguaacagcaaggaacagcagaaccuguaucagaaugagaacgccuacguuucuguggucacuuccaauuacaaccguagauuuacacccgaaaucgcugagaggccuaaggugcgggaccaagccgggcgcaugaauuauuacuggacccuucugaaaccaggagauacgauuaucuucgaggcgaacgguaauuugauugcaccgauguaugccuuugcucucucaagaggcuucgggagcggaaucauaaccaguaacgccucuaugcacgaauguaauacuaagugccagacaccccugggcgcaauuaacuccagcuuaccuuaccagaauauccauccagugacuauuggugagugucccaaauaugucaggucggcuaagcugcggaugguuaccgggcuccgcaacaucccuucuauccagucccgaggacuuuuuggcgccauugcgggcuucauagaagggggauggacagguaugaucgacggcugguacggguaucaccaucaaaaugagcagggaucaggcuacgccgcagaucagaaaaguacccagaacgcuauuaaugguaucacgaacaaggugaacacuguaauagagaaaaugaauauucaauuuacagccguggggaaggaguucaacaagcuggagaaaagaauggaaaauuugaacaagaaagucgacgauggcuuucuagacaucuggaccuacaaugcugagcugcucgugcugcuugaaaacgagaggacucuggacuuccacgauagcaauguuaagaacuuguaugaaaaagugaagucccagcucaagaauaacgccaaagagaucggaaauggcugcuucgaguuuuaccacaagugugacaacgaaugcauggagucuguccggaaugggacauaugauuacccaaaauauagcgaagagucaaagcugaaccgugagaaaguggacggaguaaaguuagaaaguauggguauuuaccagauccuggcaauuuauuccaccguugccagcucucuagugcuccuggucucacuuggcgcuauaaguuucuggaugugcagcaauggguccuugcaaugucgcaucugcauuuga

SEQ ID NO: 137136 - RNA, 1701 nt, Artificial Sequence; identical to SEQ ID NO: 130366
  derived and/or modified CDS sequence (opt3) from hemagglutinin__InfluenzaA__AFM71857

SEQ ID NO: 137137 - RNA, 1701 nt, Artificial Sequence
  derived and/or modified CDS sequence (opt3) from hemagglutinin__InfluenzaA__AFM71868
augaagaccaucauugcccugagcuacauacucugccuuguguucgcucagaaacugcccggcaacgacaauuccacagcaacuuuguguuuagggcaccaugccgucccuaacggaacgaucguuaagaccauuacaaaugaucaaaucgaggugacuaacgcgaccgaacugguacagucuucaaguacagguggcauuugcgacagcccacaccagauccuagauggggagaauuguacccucauagacgcucugcuuggagauccgcagugcgacggcuuucaaaacaaaaagugggaucuguucguggaaagauccaaagccuauucuaauuguuaccccuaugacgucccugauuacgcaucguugaggucacucguggccagcagugguacucuggaguuuaacaaugaauccuucaacuggacagggguuacccagaauggaacgucuagcuccugcaagcggcgcucaaacaauagcuuuuucagucgacugaacuggcucacucauuuaaaguuuaaauauccagcucugaaugugaccaugcccaacaacgagaaguucgacaaacuuuacaucuggggcguccaccauccugugacagauaaugaccagauucguuuguaugcacaggccucuggcagaaucacuguauccaccaagaggucacaacagacaguuauuccaaacaucgggagccggccccgcgugagagauauaccuaguaggauuucuaucuacuggaccauugucaaaccaggagacauccugcuaaucaauuccacggguaaccucauugcuccgcggggcuacuuuaagauacgcagcgggaagucgucuaucaugcgauccgacgcccccauuggaaaauguaauucagagugcaucacuccuaacggcaguauaccaaaugauaagcccuuccagaacgugaauagaauuacauauggugcguguccuagguacgugaaacagaacacccugaaacuugcaacugggaugcggaaugucccagaaaagcaaacacguggaaucuuuggcgccaucgcuggcuucauugagaacgggugggaaggaaugguugacgguugguauggcuuucgccaccagaauagcgaggggaucggacaggccgcagaucugaaguccacccaagcugccauuaaccagauaaauggcaaauugaacagacucaucgguaagacgaacgagaaguuccaccagauugaaaaagaguucucugaaguggaggggaggauccaggaccuggaaaaguacguagaggauaccaaaaucgacuuauggagcuauaaugcggagcugcucguggcccuugaaaaccaacauacaauugaucugacugacucagagaugaauaaguuguuugaacggaccaaaaagcagcuacgagagaacgcagaagauaugggcaauggaugcuucaagauauaccacaaaugugacaacgcuugcaucggcaguauucgcaaugggacauaugaucaugacgucuacagagacgaggcccugaacaauagguuucagaucaagggaguggagcucaaauccgguuacaaggauuggauucuguggaucagcuucgcuauaucuugcuuucuucuguguguuguguugcucggcuucaucaugugggccugccagaaagggaacauucgguguaauaucugcauuuga

SEQ ID NO: 137138 - RNA, 1701 nt, Artificial Sequence; identical to SEQ ID NO: 135046
  derived and/or modified CDS sequence (opt3) from hemagglutinin__InfluenzaA__AFM71879

SEQ ID NO: 137139 - RNA, 1701 nt, Artificial Sequence
  derived and/or modified CDS sequence (opt3) from hemagglutinin__InfluenzaA__AFM71890
augaaggccagacugcucgugcuucugugcgcuuuggcagccaccgacgcggauacaaucuguauuggcuaccacgcuaacaauagcacugacacggucgauaccuuacuggagaaaaacguuacagugacucauuccguaaaucuacucgaagacucucacaacgggaagcugugcaaacuuaagggaauagccccgcugcaguuggguaaauguaauaucgcaggcuggcuccuggggaacccugagugcgauucacugcucccagccaggaguuggagcuauauuguggaaacccccaauuccgagaacggagcuuguuaccccggcgacuucaucgauuaugaagaguuaaaggagcaacugucuucggucucaagccuugaacgguuugagauuuucccuaaggaaaguuccuggccaaaucauaacacauugaaaggugugaccgcaucuugcagccacgggggaaaguccucauuuuaccgcaaucugcuauggcucacuaaaacagaggacaguuaucccaagcugagcaacucuuacguuaauaacaaaggcaaggaggugcuuguccuguggggcgugcaucacccuuccucaagcgaugaacagcagaguuuguaucacaauguaaacgccuacguuucuguggucuccagcaacuacaaucgacguuucaccccagagaucgcugccagacccaaggugaggaaccagccugggcggaugaauuauuacuggacgcuccuggaaccaggagacacuauaaucuuugaggcgaccgguaacuuaauugcaccgugguaugccuucgcucugucgcgcggcuuugggucuggaaucauuacauccaaugccucaaugcaugaauguaacacuaaaugccaaacaccccagggcgcaaucaauaguagccucccuuuccagaacauacacccagugaccauuggugagugucccaaguacgucagauccaccaaacuuaggaugguuacggggcugcggaauaucccuucuauucaguuucgcggauuguucggcgcuaucgccggcuuuaucgaagggggauggacugguaugauugauggcugguauggguaccaucaccaaaacgagcagggaagcggcuaugcggccgaccagaagucaacacagaaugcaauaaacgguaucaccaauaaagugaacaguguaauugagaagaugaauacucaauucacagcuguguccaaagaauuuaacaaccuagagaagcgaauggaaaaucugaacaagaaagucgaugacggguuccucgacaucuggaccuacaaugccgagcugcuugugcuguuggagaacgaaagaacgcucgauuuccacgaccugaauguuaagaacuuauacgagaaagucaagagccagcugaaaaauaacgcuaaggaaauaggcaauggaugcuuugaguucuaucauaagugugauaacaaaugcauggaaucugugaggaauggcaccuacgacuauccaaaguacucagaggagaguaaacuaaaccgggaaaagauugauggggugaaacucgagagcaugggaguauaucagauccuggccaucuacuccacaguugcaucuucgcuuguguugcuggucagccucggugccauuuccuuuuggaugugcucaaauggcagucugcaaugucguaucugcauuuga

SEQ ID NO: 137140 - RNA, 1701 nt, Artificial Sequence; identical to SEQ ID NO: 137125
  derived and/or modified CDS sequence (opt3) from hemagglutinin__InfluenzaA__AFM71901

SEQ ID NO: 137141 - RNA, 1701 nt, Artificial Sequence
  derived and/or modified CDS sequence (opt3) from hemagglutinin__InfluenzaA__AFM71923
augaagaccaucauugcccugagcuacauauucugccucgugcuuggccaggaccugcccgggaacgauaauuccacagcuacuuuguguuuaggacaccaugcagucccuaacgguacgcugguuaaaaccaucacaaaugaccaaauugaggugacuaacgccaccgagcuaguacagucuucaaguacaggcaagaucugcaauaacccacacaggauucucgaugggaucgacuguacccugauagaugcgcuucugggagacccgcauugcgauagcuuucagaaugaaacuugggacuuguucguggaaagauccaaggcuuuuucuaacuguuaucccuacgaugucccugacuaugccucgcuccggucacugguggcaagcaguggcacacuggaguucaucaaugaagguuuuaccuggacggggguuacucagaacggaggcuccaaugccugcaagcgcggcccagauucuggguucuuuagccgacucaacugguuauacaaauccggaucaaccuaucccgugcugaaugucacaaugccuaacaaugacaacuucgauaaacuuuacauuuggggugugcaccauccaaguacuaaccaagagcagaccagcuuguauguacaggcuucuggccguguuacaguguccaccaagagaucacagcaaacgaucauucccaauaucgggagcaggccuuggguccggggacugaguucucgcauauccauuuacuggacuaucgugaaaccaggcgacauucuagugaucaacagcaaugguaaccucaucgcaccgagaggguacuuuaagaugaggacaggaaaaucgucuauuaugcgguccgacgcccccauaggcaccuguaucucagagugcauuacuccuaauggcaguaucccaaacgauaagcccuuccagaaugucaacaaaauaacauauggggcuuguccuaaguacguuaagcagaauacccugaaacuugccacgggaaugcgcaacgugccagaaaagcagacccgaggucuguuuggcgcgauugcaggguucaucgagaauggaugggaaggcaugaucgacgguugguauggguuuagacaccaaaacagcgagggcacaggacaggccgcugauuugaaauccacucaggccgcaauugaccaaaucaauggcaagcucaacaggguaauugagaaaaccaaugaaaaguuccaccagauagagaaagaguucucugaaguggaagggcggauccaggaucuggagaaguacgucgaggacacaaagauugauuuauggagcuauaacgcugaacugcucguggcccuugagaaccagcauacuaucgaccugaccgauucagaaaugaauaaauuguuugagaagacacgucgccaacuaagagaaaacgcggaggacaugggaaaugguugcuucaggaucuaccacaaaugugauaacgccugcauuggcaguauacggaaugggaccuaugaccaugacguuuaccgagaugaggcacugaacaaucgcuuucagaucaagggaguggaacucaaauccggcuacaaggacuggauucuguggaucagcuucgcuauuucuugcuuucuucugugugucguguugcucgguuucaucaugugggccugccagaaggggaacauaagauguaauaucugcauuuga

SEQ ID NO: 137142 - RNA, 1701 nt, Artificial Sequence
  derived and/or modified CDS sequence (opt3) from hemagglutinin__InfluenzaA__AFM71934
augaagaccaucauugcccugagcuacauauucugccucgugcuuggccaggaccugcccgggaacgauaauuccacagcuacuuuguguuuaggacaccaugcagucccuaacgguacgcugguuaaaaccaucacaaaugaccaaauugaggugacuaacgccaccgagcuaguacagucuucaaguacaggcaagaucugcaauaacccacacaggauucucgaugggaucgacuguacccugauagaugcgcuucugggagacccgcauugcgauggcuuucagaaugaaacuugggacuuguucguggaaagaagcaaggcuuuuuccaacuguuaucccuacgaugucccugacuaugccucucuccggucgcugguggcaucaagcgguacacuggaguucaucaaugaaggguuuaccuggacgggaguuacucagaacggcggcaguaaugccugcaagcgcgggccagauuccggauucuuuucucgacucaacugguuauacaaaagcgguuccaccuaucccgugcugaaugucacaaugccuaacaaugacaacuucgauaaacuuuacauuuggggcgugcaccauccaucaacuaaccaagagcagaccaguuuguauguacaggcuagcgggcguguuacagugucuaccaagggaucccagcaaacgaucauucccaauaucggcucaagaccuugggucaggggucugagcagucggauaucuauuuacuggacuaucgugaaaccaggggacauucuagugaucaacuccaauggaaaccucaucgcaccgcgcggcuacuuuaagaugagaacaggcaaaagcucgauuaugaggucugacgcccccauagggaccuguaucuccgagugcauuacuccuaauggaucaaucccaaacgauaagcccuuccagaaugucaacaaaauaacauauggugcuuguccuaaguacguuaagcagaauacccugaaacuugccacgggcaugcggaacgugccagaaaagcagacccgcgggcuguuuggagcgauugcaggcuucaucgagaaugguugggaagggaugaucgacggcugguauggauuucgacaccaaaacagugagggcacagggcaggccgcugauuugaaaagcacucaggccgcaauugaccaaaucaauggaaagcucaacagaguaauugagaaaaccaaugaaaaguuccaccagauagagaaagaguucuccgaaguggaagguaggauccaggaucuggagaaguacgucgaggacacaaagauugauuuauggucuuauaacgcugaacugcucguggcccuugagaaccagcauacuaucgaccugaccgauagcgaaaugaauaaauuguuugagaagacacggcgucaacuacgcgaaaacgcggaggacaugggcaaugggugcuucagaaucuaccacaaaugugauaacgccugcauuggaucaauaaggaauggcaccuaugaccaugacguuuaccgggaugaggcacugaacaaucgauuucagaucaaggguguggaacucaaaaguggguacaaggacuggauucuguggaucuccuucgcuauuagcugcuuucuucugugugucguguugcucggcuucaucaugugggccugccagaagggaaacauacgcuguaauaucugcauuuga

SEQ ID NO: 137143 - RNA, 1701 nt, Artificial Sequence
  derived and/or modified CDS sequence (opt3) from hemagglutinin__InfluenzaA__AFM71945
augaagaccaucauugcccugagcuacauauucugccucgugcuuggccaggacuuucccgggaacgauaauuccacagcuacucuguguuugggacaccaugcagucccuaacgguacguuaguuaaaaccaucacaaaugaccaaauugaggugacuaacgccaccgaacugguacagucuucaaguacaggcaagaucugcaauaacccacacaggauucuagaugggaucaauuguacccucauagacgcgcugcuuggagauccgcauugcgacggcuuccagaacgagacuugggaucuguuuguggaaagaagcaaggcuuucuccaauuguuaucccuacgacgucccugauuaugccucuuugcggucgcucguggcaucaagcgguacacuggaguuuaucaacgaaggguucaccuggacgggaguuacucagaauggcggcaguaacgccugcaaacgcgggccagacuccggauuuuucucucgacugaauuggcucuacaaaagcgguuccgcuuaucccguguuaaacgucaccaugccuaauaacgauaacuuugacaagcuguacauuuggggcgugcaccauccaucaacagaucaagagcagacuaaucuuuauguacaggcaagugggcguguuaccgugagcacaaagagaucucagcaaaccaucauucccaacaucggauccaggccuuggguccggggcuugucaagccgcauaaguauuuacuggacgaucgugaaaccaggugacauucuggugaucaauucuaacgggaaucuaaucgccccgagaggauacuucaagaugaggacuggcaaauccagcauuaugcggucggacgcucccauaggcacauguaucucugagugcauuaccccuaacggguccaucccaaaugauaagcccuuucagaacgucaauaaaauaacuuauggagccuguccuaaguacguuaagcagaacacacucaaacuggcgaccgguaugcgcaaugugccagaaaagcagacgcgaggcauuuucggggcaaucgccggauuuaucgagaacggcugggaagguaugauugacgggugguauggcuucagacaccaaaauucagagggaaccggccaggcugccgaucuuaaaaguacacaggcagcuaucgaccaaauuaacgggaagcugaauaggguaauagagaaaacuaacgaaaaguuccaccagaucgagaaagaauuuagcgagguggaaggacggauucaggauuuggagaaguacgucgaggacaccaagaucgaucucugguccuauaacgccgaacuguuaguggcgcuggagaaucagcauacaaucgaccucacugauucugaaaugaacaaacuuuucgagaagacccgucgccaacugagagaaaaugccgaggacauggguaacggcugcuuuaaaauuuaccacaagugugauaaugcaugcauagggagcaucaggaacggaacauaugaccaugacguuuaccgggaugaggcuuugaauaaccgauuccagauuaaaggcguggaacuaaagucagguuacaaggacuggauccuguggauuaguuuugccaucuccugcuuccuccugugugucgugcuucugggguuuauaaugugggcuugccagaaaggcaauauccgcuguaacauuugcaucuga

SEQ ID NO: 137144 - RNA, 1701 nt, Artificial Sequence; identical to SEQ ID NO: 137143
  derived and/or modified CDS sequence (opt3) from hemagglutinin__InfluenzaA__AFM71956

SEQ ID NO: 137145 - RNA, 1704 nt, Artificial Sequence
  derived and/or modified CDS sequence (opt3) from hemagglutinin__InfluenzaA__AFM71978
augaagaccaucauugcccugagcuacauauucugccucguguuugcucaggaccuucccggcaacgauaauaacuccacagcaacucuguguuuggggcaccaugccgucccuaauggaacguuaguuaaaaccaucacaaacgaccaaauugaggugacuaaugcgaccgaacugguacagucuucaaguacagguaagaucugcaacaauccacacaggauucuagauggcaucaacuguacccucauagacgcucugcuuggggauccgcauugcgacggauuccagaaugagaaaugggaucuguuuguggaaagaagcaaggccuucuccaacuguuaucccuacgacgucccugauuaugcaucuuugcggucgcucguggccucaagcggcacucuggaguuuaucaaugaagguuucaacuggacagggguuacccagaauggaggcaguaacgcuugcaaacgcggcccagacuccggguuuuucucucgacugaauuggcucuacaagagcggauccacguaucccgugcaaaacgucacuaugccuaacaaugauaacucagacaaguuauacauuuggggugugcaccauccaaguaccgauaaagagcagacaaaucuguauguacaggcaagcggcaagguuacugugucuaccaaacguucccagcaaacaaucauucccaacgucgggucaagaccuugggugaggggacuuagcagucggaucucuauauacuggaccauugugaagccaggcgacaucuuggucauuaauuccaacgguaaucugaucgccccgcgcggguacuuuaaaaugagaacgggaaagagcucgaucaugaggucugacgcucccauuggcacuuguuccucagagugcauaacaccuaacggcaguaucccaaaugauaagcccuuccagaacguuaauaaaauuaccuauggggccuguccuaaguacgugaaacagaacacucuaaagcucgcgacaggaaugcggaauguaccagaaaaacagacccgcgguaucuuuggcgcaauagccggguucauugagaacggaugggaaggcaugaucgacgguugguauggguuucgacaccaaaauagcgagggcacgggacaggcugccgaucugaaguccacccaggcagcuaucgaccaaauuaacggcaaacuuaacagagugaucgagaagacaaaugaaaaguuccaccagauugagaaagaguucucugaagucgaagggaggauacaggaucuggagaaguacguggaggacacuaaaaucgauuuguggagcuauaacgccgaacuccugguugcguuagagaaucagcauaccauugaccugacagauucagaaaugaacaagcucuuugagaaaacucggcgucaacuucgcgaaaaugccgaggacaugggaaacgguugcuucaagaucuaccacaagugugauaaugcaugcaucggcaguauuagaaacgggaccuaugaccaugacguguacagggaugaggcucugaauaaccgguuucagauaaaaggagucgaauugaaguccggcuacaaagacuggauccuauggauuagcuucgccaucucuugcuuucugcucugugugguacugcuugguuucauuaugugggcuugccagaaggggaauauccgauguaacauaugcaucuga

SEQ ID NO: 137146 - RNA, 1701 nt, Artificial Sequence
  derived and/or modified CDS sequence (opt3) from hemagglutinin__InfluenzaA__AFM71989
augaagaccaucauugcccugagcuacauacucugccuuguguucgcucagaaacugcccggcaacgacaauuccacagcaacuuuguguuuagggcaccaugccgucccuaacggaacgaucguuaagaccauuacaaaugaucaaaucgaggugacuaacgcgaccgaacugguacagucuucaaguacaggugagauuugcaauagcccacaccagauccuagacggcgaaaacuguacccucauagaugcucugcuuggggacccgcagugcgauggauuucaaaauaaaaagugggaccuguucguggagagauccaaagcccauucuaacuguuaucccuacgaugucccugacuaugcaucguugaggucacucguggccagcaguggcacucuggaauuuaauaacgaguccuucaauuggacagguguuacccagaacgggacgucuagcgcuugcauccggcgcuccaauaacucauuuuucagucgacugaauuggcucacucacuuaaacuuuaaguacccagcacugaacgugaccaugcccaauaacgagcaguucgauaagcuguauauuuggggaguccaucacccuagcacagacaaagaucagaucuuuuuguacacucaagccgcuggccguauuaccgugucuacaaagagaucccagcaggccguaaucccaaauauaggcucaaggccccggguucgcaacauuccuagcagagugaguaucuauuggaccauugucaaaccaggggacauccugcuaaucaauucuacgggaaaccucauugcgccgagggguuacuucaagauacgguccggcaaaagcucgaucaugcgcucugaugcacccauugggaaguguaauuccgccugcaucacuccuaacggaucaauaccaaaugacaagcccuuucagaacgugaaucgaauuacauacggcgcuuguccuagauaugugaaacaaaacacccugaaacuugccacugguaugaggaaugucccagaaaaacagacacgggggaucuucggagcaaucgcuggcuuuauugagaacggcugggaagggaugguugacggaugguacgguuuccgucaccagaauagugagggccgcgggcaagccgcggaucuuaagagcacccaggccgcaaucgaccagauuaacggaaaauugaacagacucauaggcaagacgaaugagaaauuccaucagaucgaaaaggaguuuuccgaaguggaggguaggauucaagaucuggaaaaguauguagaggacaccaaaaucgauuuauggucuuacaacgcugagcugcucguggcccuugaaaaucagcacacaaucgaccugacugauagcgagaugaacaaguuguucgaaaagaccaagaaacagcuacgggagaaugcugaagacauggggaacggcugcuuuaagauuuaucauaagugugauaaugccugcauaggaucaauccgaaacggcacauacgaccacgaugucuaucgcgacgaggcacugaauaacagauuccagauuaaagggguggagcucaagaguggauacaaagacuggauccuguggauuuccuuugccaucagcugcuuccuucuguguguugcuuugcucgguuuuauaaugugggcgugccaaaagggcaauaucagguguaacauuugcaucuga

SEQ ID NO: 137147 - RNA, 1701 nt, Artificial Sequence
  derived and/or modified CDS sequence (opt3) from hemagglutinin__InfluenzaA__AFM72010
augaagaccaucauugcccugagcuacauauucugccaggugcucgcucaaaaccuucccggcaaugacaacuccacagcaacucuguguuuggggcaccaugccgucccuaauggaacguuaguuaaaaccaucacaaacgaucagauugaggugacuaaugcgaccgaacugguacagucuucaaguacagguagaaucugcgacagcccacacaggauucuagauggcaagaacuguacccucaucgacgcucugcuuggggauccgcauugcgacggauuucagaaugagaaaugggaucuguucguggaacgguccaaggccuuuucuaacuguuaucccuacgacgucccugauuaugcaucguugcgcucacucguggccagcaguggcacucuggaguucauaaaugaagguuuuaacuggacagggguuacccaaaauggaggcuccuacgcuugcaaacgaggcccagacaagucuuucuuuagccgucugaacuggcucuaugaguccgagucaacguaccccguguuaaaugucacuaugccuaacaaugauaacuucgacaagcuguauaucuggggagugcaccauccaaguaccgauaaagaacagacaaaacuuuacguacaggcaagcgggagaguuacugugucuaccaagaggucccagcaaacaauuauccccaacgucgguucacggccuugggugcgcggcuugagcaguagaauuucuaucuacuggaccauagugaagccaggggacauucugcuaaucaauuccaacggaaaucucauugccccgaggggcuauuuuaaaauccggacggguaagagcucgaucaugcgcucugacgcucccauugggacuuguuccucagagugcauaacaccuaacggaaguaucccaaaugauaagcccuuccagaacgucaauaaaauuaccuacggcgccuguccuaaguauguuaaacagaacacucugaaacuugcgacaggcaugcgaaaugugccagaaaagcagaccagagggaucuuuggagcaauagccgguuucauugagaacggcugggaggggaugaucgacggaugguacggcuuuaggcaccaaaauagcgaagguacggggcaggcugccgaucugaaguccacccaggcagcuaucgaccaaauuaacggcaaauugaaucggguaaucgagaagacaaacgaaaaguuccaccagauugagaaagaguucucugaaguggagggacguauacaggaucucgaaaaguaugucgaggacacuaaaaucgaucuguggagcuacaaugccgaauuacugguggcgcucgagaaccagcauaccauugaccuuacagauucagaaaugaacaagcuguuugagaaaacucgcagacaauugagggagaaugccgaagacaugggcaacgggugcuucaagaucuaucacaagugugauaaugcaugcaucggaaguauucggaacgguaccuacgaccaugacguuuaccgagaugaggcucuaaauaaccgcuuucagauaaaaggcguggaacugaaguccggguauaaagacuggauccucuggauuagcuucgccaucucuugcuuucugcuuugugucgugcuguugggauucauuaugugggcuugccagaagggcaauaucagauguaacauaugcaucuga

SEQ ID NO: 137148 - RNA, 1701 nt, Artificial Sequence; identical to SEQ ID NO: 128963
  derived and/or modified CDS sequence (opt3) from hemagglutinin__InfluenzaA__AFM72021

SEQ ID NO: 137149 - RNA, 1701 nt, Artificial Sequence
  derived and/or modified CDS sequence (opt3) from hemagglutinin__InfluenzaA__AFM72032
augaagaccaucauugcccugagcuacauguucugccucguguuugcucagaaccuucccggcaaugacaacuccacagcaacucuguguuuggggcaccaugccgucccuaauggaacguuaguuaaaaccauaacaaacgaucaaaucgaggugacuaaugcgaccgaacugguacagucuucaaguacagguagaauuugcgacagcccacacaggauccuagauggcaagaacuguacccucauugacgcucugcuuggggauccgcauugcgacggauuccagaaugagaaaugggaucuguuuguggaacgguccaaggccuucucuaacuguuaucccuacgacgucccugauuaugcaucguugcgcucacucguggccagcaguggcacucuggaguuuaucaaugaagguuucaacuggacagggguuacccaguccggaggcucuuacacgugcaaacgaggcagcaauaacuccuuuuucucacgucugaauuggcucuaugagagugagagcaaguacccaguguuaaacgucacuaugcccaauaacgggaaguuugacaaacuguauauauggggaauccaccauccuucuaccgauaaggaacaaacaaaccuuuacauuagagcuuccgguagggugacuguaucaaccaaacggagccagcagacaguuaucccaaauauuggcagucgccccugggugagaggguugucuuccaggaucagcauauacuggaccauugucaagccuggagacauccugcuaauuaacucgacgggcaaucucaucgcaccacgggguuauuucaaaauccgcacugggaagucuuccauuaugcgaucagaugccccgauaggaacauguaguagcgagugcaucacccccaacggcuccauuccuaaugacaagccauuucagaacgugaauaaaaucacuuacggcgcuugucccagauaugugaagcaaaacacacugaaacuugccaccgggaugaggaaugucccugaaaagcagacgcggggaauauucggugcgauugcaggcuuuaucgagaacgggugggagggaaugguugacggcugguacgguuuccgucaccaaaauucugaagggaccggccaggccgcugaucugaaaagcacacaggccgcaaucgaccagauuaacggaaaguugaaucgcgugaucgagaaaacuaacgaaaaguuccaccagauugagaaggaauuuucagagguagagggcagaauacaagaucucgaaaaauauguggaggacaccaagaucgaucuguggaguuacaaugcugaauuacuggucgcccucgagaaccagcauacaauugaccuuacugauuccgaaaugaacaaacuguucgagaagaccaggaaacaguugcgggagaaugcggaagacauggggaacggaugcuuuaagaucuaucacaagugugauaaugccugcaucgguagcauucgaaacggcacauacgaccaugauguguaccgcgacgaggcacuaaauaacagauuccagauaaaagggguugaacugaagucuggauauaaagacuggauccucuggauuucauuugcuaucaguugcuuccugcuuugugugguccuguugggcuuuauuaugugggccugccaaaaggguaauaucagguguaacauaugcaucuga

SEQ ID NO: 137150 - RNA, 1701 nt, Artificial Sequence
  derived and/or modified CDS sequence (opt3) from hemagglutinin__InfluenzaA__AFM72043
augaagaccaucauugcccugagcuacauguucugccucguguuugcucagaaccuucccggcaaugacaacuccacagcaacucuguguuuggggcaccaugccgucccuaauggaacguuaguuaaaaccauaacaaacgaucaaaucgaggugacuaaugcgaccgaacugguacagucuucaaguacagguagaauuugcgacagcccacacaggauccuagauggcaagaacuguacccucauugacgcucugcuuggggauccgcauugcgacggauuccagaaugagaaaugggaucuguuuguggaacgguccaaggccuucucuaacuguuaucccuacgacgucccugauuaugcaucguugcgcucacucguggccagcaguggcacucuggaguuuaucaaugaagguuucaacuggacagggguuacccaguccggaggcucuagcacgugcaaacgaggcuccaauaacucauuuuucagucgucugaauuggcucuacgagagcgagucuaaguauccaguguuaaacgucacuaugcccaauaacgggaaguuugacaaacuguacauauggggaauccaccauccuuccaccgauaaggaacaaacaaaccuuuauauuagagcuucagguagggugacuguaagcaccaaacggagucagcagacaguuaucccaaauauuggcucucgccccugggugagaggguuguccagcaggaucucgauauacuggaccauugucaagccuggagacauccugcuaauuaacucuacgggcaaucucaucgcaccacgggguuacuucaaaauccgcacugggaaguccucaauuaugcgaagugaugccccgauaggaacauguagcuccgagugcaucacccccaacggcucuauuccuaaugacaagccauuucagaacgugaauaaaaucacuuauggcgcuugucccagauacgugaagcaaaacacacugaaacuugccaccgggaugaggaaugucccugaaaagcagacgcggggaauauucggugcgauugcaggcuuuaucgagaacgggugggagggaaugguugacggcugguaugguuuccgucaccagaauagcgaagggaccggccaggccgcugaucugaaaucaacacaagccgcaaucgaccagauuaacggaaaguugaaucgcgugaucgagaaaacuaacgaaaaguuccaccagauugagaaggaauuuagugagguagagggcagaauacaagaucucgaaaaauacguggaggacaccaagaucgaucugugguccuauaaugcugaauuacuggucgcccucgagaaccagcauacaauugaccuuacugauagcgaaaugaacaaacuguucgagaagaccaggaaacaguugcgggagaaugcggaagacauggggaacggaugcuuuaagaucuaccacaagugugauaaugccugcaucgguucuauucgaaacggcacauaugaccaugauguguaccgcgacgaggcacuaaauaacagauuccagauaaaagggguugaacugaagucaggauacaaagacuggauccucuggauuaguuuugcuaucagcugcuuccugcuuugugugguccuguugggcuuuauuaugugggccugccaaaaggguaauaucagguguaacauaugcaucuga

SEQ ID NO: 137151 - RNA, 1701 nt, Artificial Sequence
  derived and/or modified CDS sequence (opt3) from hemagglutinin__InfluenzaA__AFM72054
augaaggccaaacugcucgugcuucugugcgcuuugagcgcaaccgacgccgauacaaucuguauuggcuaccacgcgaacaauuccacugacacggucgauaccguuuuagagaagaacgugacaguaacucauucugugaaucugcuagaagacaaccacaaugggaaacucugcaagcugaaaggaauagcuccccuucagcuggguaaguguucaaucgccggcuggauuuuggggaacccugagugcgaaagucucuucagcaagaaauccuggucuuauaucgcagagaccccaaauucggaaaacggaacauguuacccgggcuauuuugccgauuacgaggagcugagagaacaacugucaagcgucaguuccuucgagagguuugaaauuuuccccaaggagucuagcuggccuaaacauaaugugaccaaggguguuacugcugcaugcucccacaaagggaagucaaguuuuuaucggaaccucuuauggcugacagagaagaauggaagcuacccaaaccuuucuaaauccuaugugaauaacaaggaaaaagaggucuuggugcuguggggcguacaucaccccucaaauaucgaagaccagaagaccauauaccgcaaagagaacgccuacguuagcguggucaguucucacuauaaccgacguuucacgccugaaaucgcuaagagaccaaaagugaggaaucaggagggccggauuaacuacuauuggacucuacucgagcccggggauaccaucauuuuugaagccaauggaaaccugaucgcgccuugguacgcauucgcccuuucccgcgguuuuggcagcgggauaauuacaucgaaugcuucuauggacgagugugaugccaagugccagacuccacaaggagcaaucaacuccucacugccguuccagaaugugcaucccgucaccauuggcgaauguccuaaguauguuagaaguacaaaauugaggauggugaccggucuccggaacaucccaagcauccagucccgcgggcuguuuggagcuauugccggcuucauagagggcggguggacgggaaugaucgacgguugguacggcuaucaccaucagaaugaacaagggucuggauacgcggccgaucaaaagagcacucagaacgcaauuaauggcaucacaaacaaaguaaauucaauaauugagaagaugaacacccaguuuacugcuguggguaaagaguucaauaaguuagaaaagcgaauggagaaccugaacaaaaaggucgacgauggguuccucgacaucuggacauacaaugccgaacuucugguguugcuagagaacgaaagaacccuggacuuucacgauaguaauguuaaaaaccucuaugagaaggugaaaucccagcugaagaauaacgcuaaggagaucggcaauggaugcuucgaauuuuaccacaaauguaacaaugagugcauggaaagcgucaagaacggcacguaugacuaccccaaauauucugaggagucaaaacuuaauagggaaaagauugauggggugaagcuggagaguaugggaguauaccagaucuuggccauuuauagcaccguugcauccucucucgugcuguuagucucgcugggugccaucagcuucuggaugugcuccaacggcucacuacagugucggauaugcauuuga

SEQ ID NO: 137152 - RNA, 1701 nt, Artificial Sequence; identical to SEQ ID NO: 137151
  derived and/or modified CDS sequence (opt3) from hemagglutinin__InfluenzaA__AFM72065

SEQ ID NO: 137153 - RNA, 1701 nt, Artificial Sequence
  derived and/or modified CDS sequence (opt3) from hemagglutinin__InfluenzaA__AFM72087
augaagaccaucauugcccugagcuacauauucugccucguguuugcucagaaacuucccggcaacgacaauuccacagcaacucuguguuuggggcaccaugccgucccuaacggaacguuaguuaagaccaucacaaaugaucaaauugaggugacuaacgcgaccgaacugguacagucuucaaguacagguagaaucugcgacagcccacacaggauucuagauggcaaaaauuguacccucaucgacgcucugcuuggggauccgcauugcgacggauuccagaacgagaagugggaucuguuuauagaacgguccaaagccuucucuaauuguuaucccuacgacgugccugauuaugcaucguugcgcucacucgucgccagcaguggcacucuggaguuuaucaacgaagguuucaauuggacaggggugacccaguccggaggcucuuacacgugcaagcgaggcagcguuaacuccuuuuucucacgucugaauuggcucuaugagagugaguacaaguauccagcuuuaaacgugacuaugcccaauaacgggaaauuugacaagcuguacauuuggggaguccaccauccuagcaccgaaaaagagcaaacaaaucuuuacgugagagcaucugguaggguaacuguuuccaccaagcggucacagcagacagugaucccaaacauuggcagcagucccuggguccgcggguugucuuccagaaucagcauauauuggaccauugugaaaccuggagauauccugcuaauuaacucgacgggcaaucucaucgccccaagggguuacuucaagauccggacugggaagucuuccauuaugcgcucagacgcuccgauaggaacauguaguagcgaaugcaucacccccaacggcuccauuccuaaugauaaaccauuucagaacgugaauaagaucacuuauggcgccuguccccgauacgucaaacaaaacacacugaagcuggcgaccgggaugagaaauguuccugagaaacagacgaggggaauauucggugcaauugccggcuuuaucgagaacgggugggaaggaaugguggacggcugguaugguuuccggcaccaaaauucugaggggaccggccaggcugccgaccuuaagagcacacaggcagcuaucgaucagauuaacggaaaauugaaucgucucaucgaaaagacuaacgagaaguuccaccagauugaaaaagaguuuucagagguagaaggccgcauacaagaccuggagaaguacguggaagauaccaaaaucgacuuauggaguuauaaugccgagcugcucgucgcgcuugaaaaccaguacacaauugaucugacugacuccgagaugaauaaguuguucgagaaaaccagaaagcagcuaagggaaaacgccgaggauauggggaacggaugcuuuaagaucuaccauaaaugugacaaugcaugcaucgguagcauucggaacggcacauaugaucacgacguguaccgagaugaagcucugaauaaccgcuuccagauaaaggggguugagcucaaaucuggauauaaggacuggauccuguggauuucauuugccaucaguugcuuccuucuguguguggucuugcucggcuuuauuaugugggcuugccaaaaagguaauaucagauguaacauaugcaucuga

SEQ ID NO: 137154 - RNA, 1701 nt, Artificial Sequence
  derived and/or modified CDS sequence (opt3) from hemagglutinin__InfluenzaA__AFM72098
augaagaccaucauugcccugagcuacauauucugccucguguuugcucagaaacuucccggcaacgacaauuccacagcaacucuguguuuggggcaccaugccgucccuaacggaacguuaguuaagaccaucacaaaugaucaaauugaggugacuaacgcgaccgaacugguacagucuucaaguacagguagaaucugcgacagcccacacaggauucuagauggcaaaaauuguacccucaucgacgcucugcuuggggauccgcauugcgacggauuccagaacgagaagugggaucuguuuguggaacgguccaaagccuauucuaauuguuaccccuaugacgucccugauuacgcaucguugcgcucacucguggccagcaguggcacucuggaguucauaaacgaagacuuuaauuggacagguguuacccaguccgggggaucuuaugcuugcaagcgaggcagcgugaacuccuucuuuucacgucugaauuggcucuacaagagugaguauaaauacccagcauuaaacgucacgaugcccaauaacggcaaguucgauaaacuguacaucuggggagugcaccauccuguaacugacagagagcaaaccaaucuuuauguuagggccagcgggcgggugacagucucuacuaagcgcucccagcagaccgugauuccaaacaucgguucaagacccugggugaggggcuugagcagucggauuucuaucuacuggacaauagucaaaccuggggauauucugcuaaucaacuccaccggaaaucucauugcuccacgcggcuauuuuaagauccgaacggguaagagcucgaucaugagaucugacgccccgauugggacuuguuccucagaaugcauaacacccaacggaaguaucccuaaugacaaaccauuccagaacguuaauaagauuaccuacggcgcgugucccagguaugugaaacaaaacacucugaaacuugcaacaggcaugcggaauguaccugagaaacagacccgugggaucuuuggagccauagcugguuucauugaaaacggcugggaggggaugguggauggaugguacggcuuucgccaccagaauagcgaggguacggggcaggccgcagaccugaaguccacccaagcugccaucgaucagaucaacggcaaauugaauagacucauugaaaagacaaacgagaaguuccaccagaucgaaaaagaguucucugaagucgagggaaggauucaagaccuggagaaguauguggaagauacuaaaauagacuuauggagcuacaaugcggagcugcucguugcccuugaaaaccagcauaccaucgaucugacagacucagagaugaauaaguuguuugaaaagacucggaagcagcuacgagagaacgcagaggauaugggcaacgggugcuucaagauuuaccacaaaugugacaaugcuugcaucggaaguauccgcaacgguaccuaugaucaugacguguacagagacgaagcccugaauaacagguuucagauuaagggcgucgagcucaaauccggguauaaggauuggauacuguggaucagcuucgcuauuucuugcuuucuucugugugugguauugcucggauucaucaugugggccugccaaaaaggcaauauucgguguaacaucugcauauga

SEQ ID NO: 137155 - RNA, 1701 nt, Artificial Sequence
  derived and/or modified CDS sequence (opt3) from hemagglutinin__InfluenzaA__AFM72109
augaagaccaucauugcccugagcuacauauucugccucguguuugcucagaaacuucccggcaacgacaauuccacagcaacucuguguuuggggcaccaugccgucccuaacggaacguuaguuaagaccaucacaaaugaucaaauugaggugacuaacgcgaccgaacugguacagucuucaaguacagguagaaucugcgacagcccacacaggauucuagauggcaaaaauuguacccucaucgacgcucugcuuggggauccgcauugcgacggauuccagaacgagaagugggaucuguuuguggaacgguccaaagccuauucuaauuguuaccccuaugacgucccugauuacgcaucguugcgcucacucguggccagcaguggcacucuggaguucauaaacgaagacuuuaauuggacagguguuacccaguccgggggaucuuaugcuugcaagcgaggcagcgugaacuccuucuuuucacgucugaauuggcuccacaagagugaguacaaauauccagcauuaaacgucacgaugcccaauaacggcaaguucgauaaacuguacaucuggggagugcaucacccuauuacugacagagagcaaaccaaucuuuacguaagggccagcgggcggguuacagugucuacuaagcgcucccagcagaccgucaucccaaacauugguucaagacccugggugaggggcuugagcagucggaucucuauauauuggacaauugugaaaccuggggauauccugcuaauuaacuccaccggaaaucucaucgcuccacgcggcuacuuuaagauccgaacggguaagagcucgauuaugagaucugacgccccgauagggacuuguuccucagaaugcaucacacccaacggaaguauuccuaaugacaaaccauuccagaacgucaauaagaucaccuauggcgcgugucccagguacguuaaacaaaacacucugaaacuugcaacaggcaugcggaaugugccugagaaacagacccgugggauauuuggagccauugcugguuucaucgaaaacggcugggaggggaugguagauggaugguauggcuuucgccaccagaauagcgaggguacggggcaggccgcagaccugaaguccacccaagcugccaucgaucagauuaacggcaaauugaauagacucaucgaaaagacaaacgagaaguuccaucagauugaaaaagaguucucugaaguggagggaaggauacaagaccuggagaaguacgucgaagauacuaaaaucgacuuauggagcuauaaugcggagcugcucguggcccuugaaaaccagcacaccauugaucugacagacucagagaugaauaaguuguuugaaaagacucggcgacagcuacgcgagaacgcagaggauaugggcaacgggugcuucaagaucuaccauaagugugacaaugcuugcaucggaaguauuagaaacgguaccuacgaucacgacguuuauagggacgaagcccugaauaaccgguuucagauaaaaggcguggagcucaaguccggguacaaagauuggauccuguggauuagcuucgcuaucucuugcuuucuucugugugucguguugcucggauucauuaugugggccugccaaaagggcaauauccgcuguaacauaugcaucuga

SEQ ID NO: 137156 - RNA, 1701 nt, Artificial Sequence
  derived and/or modified CDS sequence (opt3) from hemagglutinin__InfluenzaA__AFM72120
augaagaccaucauugcccugagcuacauauucugccucguguuugcucagaaacuucccggcaacgacaauuccacagcaacucuguguuuggggcaccaugccgucccuaacggaacguuaguuaagaccaucacaaaugaucaaauugaggugacuaacgcgaccgaacugguacagucuucaaguacagguagaaucugcgacagcccacacaggauucuagauggcaaaaauuguacccucaucgacgcucugcuuggggauccgcauugcgacggauuccagaacgagaagugggaucuguuuguggaacgguccaaagccuauucuaauuguuaccccuaugacgucccugauuacgcaucguugcgcucacucguggccagcaguggcacucuggaguucauaaacgaagacuuuaauuggacagguguuacccaguccgggggaucuuaugcuugcaagcgaggcagcgugaacuccuucuuuucacgucugaauuggcuccacgagagugaguacaaguauccagcauuaaacgucacgaugcccaauaacggcaaauucgauaagcuguacaucuggggagugcaucacccuauuacugacagagaacaaaccaaucuuuacguaagggccagcgggcggguuacagugucuacuaaacgcucccagcagaccgucaucccaaacauugguuuuagacccugggugaggggcuugucaagccggaucaguauauauuggacaauugugaagccuggggauauccugcuaauuaacucuaccggaaaucucaucgcuccacgcggcuacuucaaaauccgaaacgguaaguccagcauuaugagaucggacgccccgauagggacguguucuuccgagugcaucacucccaauggaucaauuccuaacgacaagccauuucagaaugucaacaaaaucacauauggcgcgugucccagguacguuaagcaaaauacccugaaacuugcaacuggcaugcggaacgugccugaaaagcagacacgugggauauucggagccauugcugguuuuaucgagaauggcugggaggggaugguagauggaugguauggcuuccgccaccagaacagugaagguaccgggcaggccgcagaccugaaaagcacgcaagcugccaucgaucagauuaauggcaaguugaacagacucaucgagaaaaccaaugaaaaguuccaucagauugagaaggaauuuuccgagguggagggaaggauacaagaccuggaaaaauacgucgaggauacaaagaucgacuuauggucuuauaacgcggaacugcucguggcccuugagaaucagcacacuauugaucugaccgacagcgaaaugaacaaauuguucgagaagacacggaaacagcuacgagagaacgcagaagauaugggcaaugggugcuuuaagaucuaccauaagugugacaacgcuugcaucggaucaauucgcaaugguacuuacgaucacgacguuuauagagacgaggcccugaacaauagguuccagauaaaaggcguggaacucaagaguggguacaaagauuggauccuguggauuuccuuugcuaucagcugcuuccuucugugugucguguugcucggauuuauuaugugggccugccaaaagggcaacauccgguguaauauaugcaucuga

SEQ ID NO: 137157 - RNA, 1701 nt, Artificial Sequence
  derived and/or modified CDS sequence (opt3) from hemagglutinin__InfluenzaA__AFM72131
augaagaccaucauugcccugagcuacauacucugccuuguguucgcucagaaacugcccggcaacgacaauuccacagcaacuuuguguuuagggcaccaugccgucccuaacggaacgcugguuaagaccaucacaaaugaucaaauugaggugacuaacgcgaccgaacuuguacagucuucaaguacagguagaaucugcgacagcccacacaggauucucgauggcaaagacuguacccugaucgaugcucuacugggggacccgcauugcgauggauuucagaauaaggagugggacuuguucguggaacgguccaaagccuauucuaacuguuaccccuaugaugucccugacuacgcaucgcuccgcucacugguggccagcaguggcacucuggaguuuauaaaugaagauuucaacuggaaugguguugcucaguccggggagucuuaugcaugcaagcgaggaagcgugaaguccuuuuucucacgucucaacugguuacacgagagugaauacaaauauccagcccugaaugucacaaugcccaacaauggcaaguuugacaaacuuuacaucuggggcgugcaucacccuagcaccgauagagagcaaacgaaguuguacguaagggcuucugggcggguuacuguguccaccaaacgcucacagcagacagucauuccaaacaucggaagcagacccugggugaggggucugaguucucggauuuccaucuauuggacuauagugaagccuggcgacauucuacucaucaauagcaccgggaaccugauugccccacgcggauacuucaagauccgaacaggcaaaucgucuaucaugagauccgacgcgccgauugguaccuguucaagugaaugcauaacgcccaacgggagcaucccuaaugauaagccauuucagaacgucaauaggauuacuuauggagcauguccccgguacguuaaacaaaacacacuuaagcuggccaccggcaugcguaaugugccugagaaacagacucgcggcaucuucggggcuauagccggauuuauugagaacgguugggaaggcaugguagacgggugguauggauucagacaccaaaauuccgagggcacaggucaggcagcugauuugaagucuacccaggccgcgaucgaccagaucaacgggaaacucaauaggcugauugaaaagacgaacgagaaguuucaucagaucgaaaaagaguucagcgagguggaaggccggauucaagauuuagagaaguacgucgaagacaccaaaauagaucuguggucauauaaugccgagcuccuuguggcacuggaaaaccagcacacaaucgacuugacugauagugagaugaauaagcuauucgagaaaacccgaaagcagcugcgcgaaaacgcugaggacaugggaaauggcugcuuuaagauuuaccauaaaugugauaacgccugcaucggguccaucagaaacggaacauacgaccacgacguuuauagggaugaagcucucaauaaccgguuccagauuaaggguguggagcugaaaagcggcuacaaggacuggauacuuuggaucucuuuugccauuucaugcuuccuguugugugucgugcuccugggguuuaucaugugggcaugccaaaaaggaaauauucgcuguaacaucugcauauga

SEQ ID NO: 137158 - RNA, 1701 nt, Artificial Sequence
  derived and/or modified CDS sequence (opt3) from hemagglutinin__InfluenzaA__AFM72142
augaagaccaucauugcccugagcuacauauccugccucguguucgcucagaaacuucccggcaacgacaauucuacagcaacucuguguuuggggcaccaugccgucccuaacggaacguuaguuaagaccaucacaaaugaucaaauugaggugacuaacgcgaccgaacugguacagucaaguagcacagguagaaucugcgacuccccacacaggauucuagauggcaaaaauuguacccucaucgacgcucugcuuggggauccgcauugcgacggauuucagaacaaggagugggaucuguucguggaacggucuaaagccuauucgaauuguuaccccuaugacgucccugauuacgcaucauugcgcagccucguggccaguuccggcacucuggaguuuauaaacgaagacuucaauuggacagguguugcucaggaugggggaucuuaugcaugcaagcgaggcagcgugaacuccuuuuucucacgucugaauuggcuccacaaguuagaguacaaauauccagcccugaacgucaccaugcccaauaacggcaaguuugacaaacuuuacaucuggggagugcaucacccuaguacggauagagaccaaacuagcuuguacguaagggcuucugggcggguuaccguguccacaaagcgcucacagcagacugucauuccaaauaucgguagcagacccugggugaggggccagaguucucggauuuccaucuauuggaccauagugaaaccuggggacauucugcuaaucaacagcacaggaaaccucauugccccacgcggcuacuucaagauccgaaaugguaagucgucuaucaugagauccgaugcgccgauugggaacuguucaagugagugcauaacccccaauggaagcaucccuaacgacaaaccauuucaaaaugucaacaggauuacguauggcgcauguccccgguacguuaagcagaauacucugaaacuugccacaggcaugcguaacgugccugaaaagcagacccgcgggaucuucggagcuauagccgguuuuauugagaauggcugggaagggaugguagauggaugguauggcuucagacaccagaacuccgaggguacugggcaagcagcugaccugaaaucuacacaggccgcgaucgaucagaucaauggcaaguugaacaggcucauugagaaaaccaaugaaaaguuucaucaaaucgagaaggaguucagcgaaguggaaggacggauucaggaccuggagaaauacgucgaggauacgaagauagacuuauggucauauaacgccgaacugcucguggcacuugagaaucagcacaccaucgaucugacagacagugaaaugaacaaauuguucgagcgaacucgcaagcagcuaagagaaaacgcugaggauaugggcaaugggugcuuuaaaauuuaccauaagugugacaacgccugcaucggauccaucaggaaugguaccuacgaccacgauguuuaucgggacgaggcucugaacaaucgcuuccaaauuaagggcguggaacucaaaagcggguacaaggauuggauacuguggaucucuuuugccauuucaugcuuccuucugugugucguguugcucggauuuaucaugugggcaugccagaaaggcaacauuagauguaauaucugcauauga

SEQ ID NO: 137159 - RNA, 1701 nt, Artificial Sequence
  derived and/or modified CDS sequence (opt3) from hemagglutinin__InfluenzaA__AFM72153
augaagaccaucauugcccugagcuacauacucugccuuguguucgcucagaaacugcccggcaacgacaauuccacagcaacuuuguguuuagggcaccaugccgucccuaacggaacgcugguuaagaccaucacaaaugaucaaauugaggugacuaacgcgaccgaacuuguacagucuucaaguacagguagaaucugcggcagcccacacaggauucucgacgggaaaaauuguacccugaucgaugcucuacugggagacccgcauugcgauggcuuucagaacaaggagugggacuuguucguggaacgguccaaagccuauucuaauuguuaccccuaugaugucccugacuacgcaucgcuccgcucacugguggccagcagugguacucuggaguuuauaaacgaagauuucaauuggacagggguugcucaggacggaggcuccuaugcaugcaagcgaggcucugugaacagcuuuuucucccgucucaauugguuacacaagcuggaguacaaauauccagcccuuaacgucaccaugcccaauaacgggaaguuugauaaauuguacaucuggggagugcaucacccuucaacggacagugaucaaacuagccuguacguaagagcuucugguaggguuaccguguccacaaagcggucacagcagacugucaccccaaauauuggcagccgccccugggugagagggcagaguucuaggaucggaauuuauuggacaaucgugaaaccuggcgacauacuacucauuaacuccaccgguaaccugaucgccccacggggguacuucaagauucgcaauggaaagagcucgaucaugcgaucugacgcgccgaucggcaacuguuccucagagugcauuacgcccaauggcaguauaccuaacgauaaaccauuucaaaaugucaacagaaucacuuauggggcaugucccagguacguuaagcagaauacacuuaaacuggccaccggaaugcggaacgugccugaaaagcagacucgugguauuuucggcgcuaucgccggguuuauagagaauggaugggaaggcaugguagacgguugguauggguuccgccaccagaacagcgagggcacaggacaagcagcugauuugaaauccacccaggccgcgauugaccagaucaauggcaagcucaacagacugaucgagaaaacgaaugaaaaguuucaucaaauugagaaggaguucucugaaguggaagggaggauccaggauuuagagaaauacgucgaggacaccaagauugaucuguggagcuauaacgccgaacuccuuguggcacuggagaaucagcacacaauagacuugacugauucagaaaugaacaaacuauucgagaagacccggaaacagcugcgagaaaacgcugaggacaugggaaaugguugcuuuaagaucuaccauaagugugauaacgccugcauuggcaguauccgcaaugggacauacgaccacgacguuuauagagaugaggcucucaacaauagguuccaaaucaaaggaguggaacugaaguccggcuacaaagacuggauucuuuggaucagcuuugccauaucuugcuuccuguugugugucgugcuccuggguuuuauuaugugggcaugccagaaggggaacauccgguguaauauuugcaucuga

SEQ ID NO: 137160 - RNA, 1701 nt, Artificial Sequence
  derived and/or modified CDS sequence (opt3) from hemagglutinin__InfluenzaA__AFM72164
augaagaccaucauugcccugagcuacauacucugccuuguguucgcucagaaacugcccggcaacgacaauuccacagcaacuuuguguuuagggcaccaugccgucccuaacggaacgcugguuaagaccaucacaaaugaucaaauugaggugacuaacgcgaccgagcuaguacagucuucaccaacagguagaaucugcgacaguccgcacaggauucucgauggcaaaaauuguacccugaucgacgcuuugcugggggauccccauugcgacggauuucagaacaaggaaugggauuuguucguggaacggagcaaagccuauuccaauuguuacccuuaugacgucccagauuacgcaucucuccgcucgcugguggccucaagcggcacucuggaguuuauaaacgaaaauuucaacuggacagguguugcucaggacgggaagaguuaugcaugcaagcgaggauccgugaauaguuucuucagccgucucaacugguuacacaaacuggaguacaaguaucccgcccuuaaugucaccaugccuaacaauggcaaauuugauaaguuguacaucuggggcgugcaucacccauccacggacucagaucaaacuucucuguacguaagagcuagcgggaggguuaccgugucuacaaaacggucccagcagacugucauucccgacaucggauaucgcccuugggugagaggucagucaagcaggauuaguauccacuggaccauagugaagccaggcgacauucuacucaucaacucuacagggaaccugauugccccgcggggauacuucaagauccgcaauggcaaauccagcaucaugcgaucggaugcgcccauugguaacuguucuuccgagugcauaaccccuaaugggucaaucccaaacgacaagcccuuucaaaaugucaacagaauuacguauggagcauguccuagguacguuaaacagaauacucuuaagcuggccacaggcaugcggaacgugccagaaaaacagacccguggcaucuucggggcuauagccggauuuauugagaaugguugggaaggcaugguagaugggugguauggauuccgccaucagaacagugagggcacuggucaagcagcugaccuuaagagcacacaggccgcgaucgaucagaucaaugggaaacucaacagacugguggagaagaccaaugaaaaguuucaccaaauugagaaagaauuuuccgaggucgaaggcaggauccaggacuuagagaaguacguggaggauacgaaaauugaccuguggucuuauaacgccgaacuccuuguugcacuggagaaucagcauaccauagauuugacagacagcgaaaugaacaagcuauucgagcggacucgaaaacagcugcgcgaaaacgcugaggauaugggaaauggcugcuuuaagaucuaccacaagugugacaacgccugcauugggucaaucagaaauggaaccuacgaccacgauguguauagggacgaggcucucaacaaucgguuccaaaucaaaggugucgaacugaagaguggcuacaaagauuggauucuuuggauauccuuugccaucagcugcuuccuguugugugugguacuccugggguuuauuaugugggcaugccagaagggaaacauccgcuguaauauuugcaucuga

SEQ ID NO: 137161 - RNA, 1701 nt, Artificial Sequence
  derived and/or modified CDS sequence (opt3) from hemagglutinin__InfluenzaA__AFM72175
augaagaccaucauugcccugagcuacauacucugccuuguguucgcucagaaacugcccggcaacgacaauuccacagcaacuuuguguuuagggcaccaugccgucccuaacggaacgcugguuaagaccaucacaaaugaucaaauugaggugacuaacgcgaccgaacuuguacagucuucaccaacagguagaaucugcgacaguccgcacaggauucucgauggcaaaaauuguacccugaucgacgcucuacugggggauccccauugcgacggauuucagaacaaggagugggauuuguucguggaacggagcaaagccuauuccaauuguuacccuuaugacgucccagauuacgcaucucuccgcucgcugguggccucaagcggcacucuggaguuuauaaacgaaaauuucaacuggacagguguugcucaggacgggaagaguuaugcaugcaagcgaggauccgugaauagcuuuuucucucgucucaacugguuacacaaacuggaguacaaguaucccgcccuuaaugucaccaugccuaacaauggcaaauuugauaaguuguacaucuggggcgugcaucacccauccacggacucagaucaaacuaaccuguacguaagagcuagugggaggguuaccgugagcacaaaacggucucagcagacugucauucccgacaucggauaucgcccuugggugagaggucaguccucaaggauuagcauccacuggaccauagugaagccaggcgacauucuacucaucaacaguacagggaaucugauugccccgcggggauacuucaagauccgcaacggcaaaucuuccaucaugcgaagcgaugcgcccauugguaauuguucgucugagugcauaaccccuaacggguccaucccaaaugacaagcccuuucaaaacgucaauagaauuacguauggagcauguccuagguacguuaaacagaacacucuuaagcuggccacaggcaugcggaaugugccagaaaaacagacccguggcaucuucggggcuauagccggauuuauugagaacgguugggaaggcaugguagaugggugguauggauuccgccaucaaaauucagagggcacuggucaggcagcugacuugaagaguacacaggccgcgaucgaucagaucaacgggaaacucaauagacugguggagaagaccaacgaaaaguuucaccaaauugagaaagaguucagcgaagucgaaggcaggauccaggacuuagagaaguacguggaggauacgaaaauugaccugugguccuauaaugccgaacuccuuguugcacuggagaaccagcauaccauagauuugacagacucugaaaugaacaagcuauucgagcggacucgaaaacagcugcgcgaaaaugcugaggauaugggaaacggcugcuuuaagaucuaccacaagugugacaaugccugcauugggagcaucagaaacggaaccuacgaccacgauguguauagggacgaggcucucaauaaccgguuccaaaucaaaggugucgaacugaagucaggcuacaaagauuggauucuuuggauaaguuuugccaucuccugcuuccuguugugugugguacuccugggguuuauuaugugggcaugccagaagggaaauauccgcuguaacauuugcaucuga

SEQ ID NO: 137162 - RNA, 1701 nt, Artificial Sequence
  derived and/or modified CDS sequence (opt3) from hemagglutinin__InfluenzaA__AFM72197
augaagaccaucauugcccugagcuacauacucugcaugguguucgcucagaaacuucccggcaacgacaauuccacagcaacucuguguuuggggcaccaugccgucccuaacggaacguuaguuaagaccaucacaaaugaucaaauugaggugacuaacgcgaccgaacugguacagucuucaaguacagguagaaucugcgacagcccacacaggauucuagauggcaaaaauuguacccucaucgacgcucugcuuggggauccgcauugcgacggauuucagaacaaggagugggaucuguucguggaacgguccaaagccuauucuaauuguuaccccuaugacgucccugauuacgcaucguugcgcucacucguggccagcaguggcacucuggaguuuaacaaugaauccuucaacuggacagguguugcucagaaugggaccucuuaugcaugcaagcgacguagcgugaaguccuuuuucucaagacugaacuggcuccacaaauuagaguacaaguauccagcccugaaugucacgaugcccaacaaugacaaauuugauaaacuuuacauauggggagugcaucacccuaucacugacagugagcaaaccagcuuguacguacaggcuucuggcaggguuacaguguccacuaagcggucacagcagaccgucauuccaaacaucggcuaucgccccugggugagaggggugagcaguaggauuucuaucuacuggacaauagucaagccuggagauauucugcuaaucaacuccaccgguaaucucauugccccacggggcuauuucaagauccgcagcgggaaaucgucuaucaugcgauccgacgcgccgauuggaaacuguaauucagaaugcauaacgcccaacggcaguaucccuaaugacaagccauuucaaaacguuaauagaauuacuuacggugcaugucccagguaugugaaacagaacacacugaaacuugccaccgggaugcggaauguaccugagaagcagacucguggaaucuucggcgcuauagccggcuuuauugaaaacgggugggagggaaugguggaugguugguacggcuuccgccaccagaauagcgaggggacaggacaagcagcugaccugaaguccacccaggccgcgaucaaccagaucaauggcaaauugaacagacucauugaaaagacgaaugagaaguuucaucaaaucgaaaaagaguucucugaagucgaggguaggauucaggaucuggagaaguauguggaagacaccaaaauagauuuauggagcuacaacgccgagcugcucguugcacuugaaaaccagcacacaaucgaccugacugauucagagaugaauaaguuguucgaacggacccgaaaacagcuacgcgagaacgcugaggacauggggaauggcugcuuuaagauuuaccauaagugugauaacgccugcaucggaaguaucagaaauggcacauaugaccacgauguguacagggacgaagcucugaacaaucgguuccaaauuaaaggggucgagcucaaguccggauauaaagacuggauacuguggaucagcuuugccauuucuugcuuccuucugugugugguauugcucgguuuuaucaugugggcaugccagaagggcaacauuaaauguaauaucugcauauga

SEQ ID NO: 137163 - RNA, 1701 nt, Artificial Sequence
  derived and/or modified CDS sequence (opt3) from hemagglutinin__InfluenzaA__AFM72208
augaagaccaucauugcccugagcuacauacucugccuuguguucgcucagaaacugcccggcaacgacaauuccacagcaacuuuguguuuagggcaccaugccgucccuaacggaacgcugguuaagaccaucacaaaugaucaaauugaggugacuaacgcgaccgaacuuguacagucuucaaguacagguagaaucugcgacagcccacaccagauucucgauggcgagaauuguacccugaucgacgcucuacugggggauccgcauugcgacggauuucagaacaaagaaugggauuuguucguggagagguccaaggccuauucuaauuguuaccccuaugacgucccugauuacgcaucgcuccggucacugguggccagcaguggcacucuggaauuuaacaaugaguccuucaacuggacagguguugcucaaaaugggaccucuagcgcaugcaaacgccgauccauaaacucauuuuucagucgucucaauugguuacaccagcugaaguauagauacccagcccuuaacgugacgaugcccaauaacgacaaguuugauaaauuguauaucuggggaguccaucacccuagcacugacucugaucagaccucccuguacacacaggcuucaggcagggugacuguaagcaccaagcggagucaacagacaguuauuccaaacaucggcucucgccccugggugagagggauuuccagcaggaucucgauauacuggaccauugucaaaccuggagacauccuacucauuaauucuacggguaaccugaucgccccacggggcuauuucaagauccgcuccgggaaaucaaguauuaugcgaagcgacgcgccgauaggaaaguguaauuccgagugcaucacucccaacggcucuauuccuaaugauaagccauuucagaacgugaauagaaucacauacggugcaugucccagguaugugaaacagaacacccuuaagcuggccacugggaugcggaaugucccugaaaaacaaacacguggaauauucggcgcuauugccggcuuuaucgagaacgggugggaaggaaugauggacgguugguacggcuuccgccaccagaauagcgaggggaccggacaggcagcugauuugaagucaacgcaagccgcgaucaaccagauuaauggcaaacucaacagacugaucgagaagaccaaugaaaaauuucaucagauugagaaggaguucagugaaguugaagguaggauacaggacuuagagaaguauguggaggauacaaaaaucgaccugugguccuacaacgccgaacuccuuguagcacuggagaaccaacacacuauugauuugaccgacagcgaaaugaauaagcuauucgagcggacacgaaaacagcugcgcgaaaacgcugaggauauggggaauggcugcuuuaagaucuaucauaaaugugacaacgccugcaucggaucuauuagaaauggcacuuacgaucacgacguguacagggacgaggcucucaacaaucgguuccagauaaagggggucgaacugaagucaggauauaaagauuggauccuuuggauuaguuuugccaucagcugcuuccuguugugugugguucuccuggguuuuauuaugugggcaugccagaagggcaacauccgcuguaauauaugcaucuga

SEQ ID NO: 137164 - RNA, 1701 nt, Artificial Sequence
  derived and/or modified CDS sequence (opt3) from hemagglutinin__InfluenzaA__AFM72219
augaagaccaucauugcccugagcuacauacucugccuuguguucgcucagaaacugcccggcaacgacaauuccacagcaacuuuguguuuagggcaccaugccgucccuaacggaacgcugguuaagaccaucacaaaugaucaaauugaggugacuaacgcgaccgaacuuguacagucuucaaguacagguagaaucugcgacagcccacaccagauucucgauggcgagaauuguacccugaucgacgcucuacugggggauccgcauugcgacggauuucagaacaaagaaugggauuuguucguggagagguccaaggccuauucuaauuguuaccccuaugacgucccugauuacgcaucgcuccggucacugguggccagcaguggcacucuggaauuuaacaaugaguccuucaacuggacagguguugcucaaaaugggaccucuagcgcaugcaaacgccgauccauaaacucauuuuucagucgucucaauugguuacaccagcugaaguauagauacccagcccuuaacgugacgaugcccaauaacgacaaguuugauaaauuguauaucuggggaguccaucacccuagcacugacucugaucagaccucccuguacacacaggcuucaggcagggugacuguaagcaccaagcggagucaacagacaguuauuccaaacaucggcucucgccccugggugagagggauuuccagcaggaucucgauauacuggaccauugucaaaccuggagacauccuacucauuaagucuacggguaaucugaucgccccacggggcuauuucaaaauccgcuccgggaagucaaguauuaugcgaagcgacgcgccgauaggaaaguguaacuccgagugcaucacucccaauggcucuauuccuaacgauaaaccauuucagaaugugaacagaaucacauacggugcaugucccagguaugugaagcagaauacccuuaaacuggccacugggaugcggaacgucccugaaaagcaaacacguggaauauucggcgcuauugccggcuuuaucgagaaugggugggaaggaaugauggacgguugguacggcuuccgccaccagaacagcgaggggaccggacaggcagcugauuugaaaucaacgcaagccgcgaucaaucagauuaacggcaagcucaauagacugaucgagaaaaccaacgaaaaguuucaucagauugagaaggaguucagugaaguugaagguaggauacaggacuuagagaaauauguggaggauacaaagaucgaccugugguccuacaaugccgaacuccuuguagcacuggagaaccaacacacuauugauuugaccgacagcgaaaugaacaaacuauucgagcggacacgaaagcagcugcgcgaaaaugcugaggauauggggaacggcugcuuuaaaaucuaucauaagugugacaaugccugcaucggaucuauuagaaacggcacuuacgaucacgacguguacagggacgaggcucucaauaaccgguuccagauaaagggggucgaacugaaaucaggauauaaggauuggauccuuuggauuaguuuugccaucagcugcuuccuguugugugugguucuccuggguuuuauuaugugggcaugccagaaaggcaauauccgcuguaacauaugcaucuga

SEQ ID NO: 137165 - RNA, 1698 nt, Artificial Sequence
  derived and/or modified CDS sequence (opt3) from hemagglutinin__InfluenzaA__AFM72230
augaaggccaaacugcucgugcuucugugcaccuucacagcuacuuacgcagacacgaucuguauuggcuaucacgccaacaauagcaccgauacagucgacacuguuuuggagaagaacgugaccguaacacauuccgugaauuuacuggaagauucucacaacgggaaacuaugccuccugaagggaauagcgccccuucagcuggguaauuguucagucgcuggcuggaucuuggggaacccugagugcgaacuccugauuaguaaaaagagcugguccuacaucguggagaccccaaauccggaaaacggaacuuguuaucccggcuacuuugccgacuaugaggagcugagagaacaacucucuucgguuucaucuuucgagagguuugaaauuuucccuaaggagaguuccuggccaaaucauacagugaccggugucucugcaagcugcucccacaacgggaaaucaaguuuuuaccggaauuuacuguggcuuacgggaaagaacggcuuguaucccaaucugagcaaaucuuacgugaacaauaaggagaaagaaguacuuguucucuggggcgugcaucacccuccaaacaucgggaaccagcgcgcccuguaccacacugagaaugcuuaugucuccguggugucaagccauuacagucgacguuucacccccgaaauagcaaagagaccuaaggucagggaucaggagggacggaucaacuauuacuggacacuucuggaaccaggugacacuauuaucuuugaggccaauggcaacuugauugcuccgugguaugccuucgcgcucucucgcggguuuggauccggcaucauaaccagcaaugcacccauggaugagugugacgccaaaugccagacaccucaaggugcuauuaacucgucucugccauuccagaauguucaccccgugaccaucggggaauguccuaaguacguaagauccgccaaauuaaggauggugacgggacugcggaacauuccaucaauccagagucgcggccucuuuggcgcaaucgcuggguucauugagggagguuggacuggcauggucgaugggugguauggauaccaucaccagaaugaacaaggcagcgguuacgccgcggaccagaaguccacacagaacgccauaaaugggaucaccaacaaagugaauagcguuauugagaagaugaacacucaguuuacagcagugggcaaagaguucaauaagcuagaacgaagaauggagaaccugaacaagaaagucgaugacggauucuuggauaucuggaccuauaaugcugaacuacuggugcuccuggagaacgaaaggacgcuugacuuucacgacagcaauguaaagaaccuguacgagaaaguuaagucacaauugaaaaauaacgccaaggaaauaggcaaugggugcuucgaguuuuaucauaaguguaacaaugagugcauggaaagugugaaaaacggaaccuacgauuaucccaaguacuccgaggaaagcaaacucaaucgggagaagauugacggugucaaacuggagucuaugggcguguaucagaucuuagcuaucuacucaacagucgccaguagccuggugcuacucguuucccugggggcaauuucuuucuggaugugcucgaacggaagccuucagugucguaucugcauuuga

SEQ ID NO: 137166 - RNA, 1701 nt, Artificial Sequence
  derived and/or modified CDS sequence (opt3) from hemagglutinin__InfluenzaA__AFM72246
augaagaccaucauugcccugagcuacauacucugccuuguguucgcucagaaacugcccggcaacgacaauuccacagcaacuuuguguuuagggcaccaugccgucucuaacggaacgcugguuaagaccaucacaaaugaucaaauugaggugacuaacgcgaccgaacuuguacagucaaguagcacagguagaaucugcgacuccccucaccagauucucgauggcgagaauuguacccugaucgacgcccuucugggggauccacauugcgacggauuucagaacaaagaaugggauuuguucguggagaggucuaaggcuuauucgaauuguuacccguaugacguccccgauuacgcaucacuccggagccugguggccaguuccggcacucuggaauuuaacaaugagucuuucaacuggacagguguugcucaaaaugggaccagcuccgcaugcaaacgccgaucaaacaagagcuuuuucagccgucucaauugguuacaccagcugaaguauaaauacccugcccuuaacgugacgaugccaaauaacgagaaguuugacaaauuguauauauggggaguccaucaccccucuacugauuccgaccagaucucaauuuacgcucaggccagcggcagagugaccguaaguacaaagaggucucaacagacuguuaucccuaacauuggcuccagcccaugggugcgcggggucucgucucggaucuccauauacuggaccauugugaaacccggagauauccugcuaauuaauucaacagguaaccucaucgcgccuagaggcuauuucaagaucaggagugggaagaguuccauuaugcggucugacgcaccaauaggaaaauguaauagcgaaugcaucaccccgaacggcucaauucccaaugacaagccuuuucagaacgugaaucgcaucacguacggugccuguccacgauaugucaaacagaacacucugaagcuagcuacagggaugagaaauguucccgagaaacaaaccaggggaauauucggcgccauugcaggcuuuaucgaaaacgggugggagggaaugguggaugguugguacggcuuccggcaccagaauagugaggggacuggacaggcugccgaccugaaguccacacaagcggccaucaaccagauuaauggcaaauugaaccgucucaucgaaaagaccaaugagaaguuucaucagauugaaaaagaguucagcgaaguagagggucgcauacaggaucuggagaaguauguggaagacacgaaaaucgauuuauggucuuacaacgcagagcugcucgucgcucuugaaaaccaacacaccauugaccugacagauucagagaugaauaaguuguucgaaagaacuaaaaagcagcuaagggagaacgccgaggacauggggaauggcugcuuuaagaucuaucauaaaugugauaacgcuugcaucggaaguauucggaauggcaccuacgaccacgauguguaccgagacgaagcccugaacaaucgcuuccagauaaaggggguugagcucaaaagcggauauaaggacuggauccuguggauuuccuuugcaaucucuugcuuccuucuguguguggucuugcucgguuuuauuaugugggccugccagaaaggcaacaucagauguaauauaugcaucuga

SEQ ID NO: 137167 - RNA, 1701 nt, Artificial Sequence
  derived and/or modified CDS sequence (opt3) from hemagglutinin__InfluenzaA__AFM72257
augaagaccaucauugcccugagcuacauacucugccuuguguucgcucagaaacugcccgucaacgacaauuccacagcaacuuuguguuuaggccaccaugccguuccuaacgggacgcuggugaagaccaucacaaaugaucacauugagguaacuaacgcgaccgaacuugugcaaucuucaaguacaggaagaaucugcgacagcccacaucagauucucgauggugagaauuguacccugaucgacgcccuucugggcgauccgcacugcgacggguuucagaacaaagaaugggauuuguucgucgagagguccacugcuuauucuaauuguuaccccuaugacgugccugauuacgcaucgcuccggucacugguugccagcaguggaacacuggaauuuaacaaugaguccuucaacuggaccggcguggcucagaaugguacgucuagcgcaugcaagcgccgauccauaaaaucauuuuucagucgucucaacugguuacaucaacugaauuauaaguacccagcccuuaacgucacuaugcccaauaacgagaaguuugacaaauuguauaucuggggagugcaccacccuagcaccgauucugaccagauuuccaucuacgcucaggccucagggagaguaacaguuagcacuaagaggagucagcaaaccgugauuccaaacaucggcucucggcccuggguccgcggcguguccagcgggauaucgauuuacuggacaaucgugaaaccuggagauauucugcuaaucaauucuaccgguaaccucaucgcgccaagaggcuauuucaagauuagguccgggaaaucaaguauaaugcggagcaaugcaccgaucggaaaguguaacuccgaaugcauuacgcccaauggcucuaucccuaacgacaagccauuucagaaugucaaccgcauaacuuacggugccuguccccgauauguuaaacagaauacacugaagcuagcuaccgggaugagaaacgugccugagaaacagacuaggggaauuuucggcgccaucgcaggcuuuaucgaaaaugggugggagggaaugguagacgguugguacggcuuccggcaucaaaacagcgaggggacaggacaggcugccgaucugaagucaacccaggcggccauuaaucaaaucaacggcaaauugaaucgucucauugaaaagacgaacgagaaauuucaccagauagaaaaggaguucagugaaguggagggucgcauccaggaccuggagaaguaugucgaagauaccaaaauugacuuaugguccuacaacgcagagcugcucguggcucuugaaaaucagcauacaaucgaucugacugacagcgagaugaacaaguuguucgaaagaaccaggaaacaacuacgggagaaugccgaggauauggggaacggcugcuuuaagaucuaucacaaaugugacaaugcuugcauuggaucuauacgaaacggcacauacgaucacgacguuuaccgcgaugaagcccugaauaacagauuccagaucaaggggguggagcucaagucaggauauaaagacuggauucuguggaucaguuuugcaauuagcugcuuccuucugugugucguguugcucgguuuuaucaugugggccugccagaagggcaauauaagguguaacaucugcauuuga
